United States Patent Application Publication US 2013/0096032 A1 - sequence listing, part 24

SEQ ID NO: 784 - DNA, 78239 bp, Arabidopsis thaliana
aagcttattcctcttatctaccggtggaaggtccaccaaaaaatatgtgtgattaggctttaatatttgattcggctctagaggtttggcgcgaactcctaatcgtttcacggtctcggagtctaacagcacgaatccgggatactctttcgtggcgtcactcgccgtcaccggagttttgagccggaaaatatcgccgtcgatcttcataactttcaccttgtttctcctcaccattatagtgttccccatttttctgtcttttttgttgaatatatctcataaagcatgcaacgctatctatttatatgttgaggaggatttggttcaagctttttgattagtgtgtgaagctttgatattctctgagattcctcattttttaataaagtctaacgttgaatttaattaactaattatgttgaaaaaaaataaacgtgaaaaagtcggtcgattgcgatacattttctcatagcttttttcttttaggcattttaaaaagtaatcagtagtcgccatgattatcctaatattaacgactaggtacgtacgttacgttatattcaattctgttaggcggttatccaagttatactcggtcaccgtgttattatagtatagaaattcatcccaaacaaaaaaaagtattgtgatgaagctattggaactcacctaaaaagtaagaaaatcatacatctatttagaaactacgacattttgatcatctatatgtatgaaaaatatgtttcacagatgaaatatgaaaaatatgtttcaaactttatattggtactttatccatatagaaaggatattcgtcatcgcccatcaaagtgcttccagttccgaaaagacttgttttcttacaactaacatcatctttttgttaagttgtaggtcaatccaacctgaattactctatcgttcggcaactttcatgaccgttctcctagaaggctagatagttttgtacgtctcattgtctattctaaatcgattctctaattttcttgctccttttcattccttcctcttatttttttccgtaaatcattctaaattatggctccgtacacaaaaaagcacaagaagagaaagtggaatatataccacatttaataaaagaaaaagttcacattttgagttgttgttacataaggtagtacgtaccaaaaaaacataatctaaagtaaacaataaaaaatgcttactaaatacactataaattaataatgttagaccttgaagtttattaatttatagtaatattaaattataaaaagattacgcaaaatacaatttctttatttaaatttcttttaaaaaaatttctttatgctttcttgtttgtatattcaattatgttaaattttatttttcttttgacttccttaatttctttttatgcaagatagtatatacttatatctatgacatttatgaacttcaaattgtgattaataattttggttatcggaatagaaaagatatcaatagcctattcgactatatagttgaaaataaagcatgctcaaatttttgagtatagaacaaattgtagcttttgtttgcaatgttggtgaagaagttgaaaacgataatattgaacctttggaagtagtaatacataagaaagcaattgtcgagtttagaagacatcagaagtttttgatgcaatatgaaaaattagagatgaattttaacgagatttgaactttaatactagattcgtattatactagattatcttaaaatgtatgcttaagaattaatattattaatttatgatattattgagaccatatttttatataaaaaattttaaaaaatattatcttatcgatttttgttaatttttacattgatccgacttgaaacggataaaatttattaatttatctattaatttatagagtgtttattaacatttagtatatcacaataattagtttttttaatcatataacatctttaatagccaaacaaataaaacaataaaaaataaataaatggaaaaacagttccgtgattttgaaatgaatctggattttggtttaggattcccaaaaaaaagaaaaaaacgtgccagaccaaaaaaaaacctcacctaaccctatctagagacattaacttcgttgacaaattctcccgccgccgggtatagaactttaatatcgggtccggtttactgtaagaaaccaaaccgaatagtcctcaaattagcaatcgaaccggtttgagtccgggtatgaaaacagtgagctttagttaaaaagtctcatgggtcaaacagaagctatcttaaaggtcagctcttgatgccattctccttcccgacaacaacaaccacttctcttccattccacaaggaccacaatcacttcaaccttaatcgaaatctccggttttgctcaaacctgaaataatttgtacaattgtacttaactaatacagttgtgttttgtttttctttaatttgatatatatttgttttttttagtggattttgattgataattttgttgtaagatcgagaaataggagaatgacgacgcctccagttctatctctcgctcttccttcagatactggtcgtgttcttagtatccaatcccacactgttcaggtttttgttcgaactcttaagatttacttatcttatcattagaaactgtgtttaaagtttcaattttgattggttgcccttaagaaaaaaacagagctttttctgcttttgaatctgaatttgtttgattacaaagattcaagattctactttattccctgcatgatgattttcttataaaggtttagacttttttattgaattgaagaacaataatatgtttacttatcttatcattagaaactgtgttaaagtttcgattttgttttgttgctcttaaaacgttttaagcaaaaacagagatttgtttttgcatttgaatctgaatttgggataaatcaataagctggtaatgaattgtgtgctaattcacattgaatatattagtgatgcaatgtttttaatacaagattctactttattccttagatgactttgcataaagttttagactttaggtaatcaaaagaagaacttcgatgtgtggagaacaatttatagtctgttccttaatttaccaattgttgatgataaatcttgtgtttattggttcgatgagtaatatgattttgctaatggaagtcaaatatattagtgtttctatgcttgagttaatataattgtgctaaggtatgtcaacatattagtgttggttagattacactgtctctctatgcttgagttctgcaacttttttttttttgtgtgtgtgtgtgtgttaccagaaatgtgatgccattttatatgtctattactttcttagggatatgttggtaacaaatcagctgtctttcctcttcaattgttggggtatgatgtggatccaatcaactctgtacaattctcgaatcatacaggtaatatttggtcacagtaatgtagagcctaatgttcctgaaattactgttgtcgtatcttcgttattggtgtatctgaatctactgatttggcattactaaaacttttttccagggtatcctacatttaaaggacaggttttgaatggtcagcaattgtgtgatttgattgaaggtcttgaagcaaacgatttgttgttctacactcatgtattaacaggttctcactttaaacactggatgcttcttttattggtcaaatgatatttccttaaggaaaaatattggaaaggatggggcttctctatccctttcctacttagttgaagtggctgagactatggaacttatatccctggtttatgtgattatagtgtgttgaaacctctggaaaaattgagcatttctctggaaccttgtatcaatagctatgttttatagtaactctcttatgcttcaaatctgaatgtgacaatacttttggtgtagagtcatttttaaaagcagcagtgctttgtattagttctttaaatctttatgttttcaaaatacaggttatattggatcagtgtcattcctggatacaattttggaggttattaataagcttcgctctgtaaacccgaatcttacatatggtgggtgcattgcgtcctctttttagtccctttatgtttttgataccttggaagattggaatagactctatctttgtagtatttttagttgcagaaaactggattgagaggtcattatctgttatgtgaacatgttttggatctctgaaatggtaaaattatgctaattttagtctattcctgattagtatgtgatccggtgatgggtgatgaaggaaagttgtatgtgcctgaagaactggtacatgtttatcgtgaaaaggtaaacatgtgactataagaaattattttgtgctttcagttagatcagttgatatatatactttatatgttacccttttctcattgtaaatgtgtaaatccctaatggtattattctgttaggttgttcccttggcttctatgttgactcctaaccagtttgaggcagagaagttaacaggactaaggtacttgattatttatcgaacgttgtagtctttagcctgtgaggtgtcatgaatggaactgtgtttgaagtggttgttgaagtttatacttatatggtagtggcatttagctctctgattgagttaagtggaaactgtgaacaccggatatgtgggattccctactgtagaaatcttttttgttatggttaaaaacatcgcagtcctaaaatactacaggataaattctgaggaagatggcagggaagcttgtgctattcttcatgcagctggtccttcaaaggtttgtacgctacgcttgcaacctcttttctctactcattgcatccattagaaaccttccctaaattagcttctttgcttaccgtgcacgattagctttgcggtttctataaaaattctcaacgatttttaatgtttggcaggttgtgatcactagcattactataggaggcattctattacttatcggaagccatcagaaagaaaaggtaggtttctaatgaattttcgcagcattgagtatgttgtaactaaacagaattaactgatcttagtttttaaacctcagggtctcaagcctgagcaattcaagattttgatacacaaaatccctgcttattttacggtatgtacttcatcatttacagaagtttaaatataataccaatcatatggtttccacttgtgtgaaatgctgaagtttatgcacttttcttgcagggaacaggagatctcatgactgctcttctacttggttggagtaatgtaatgcatatttatttccatatgaaagcaaaattatttctctgtcagtttccctaatacgctaagacgtttcttatcaataattgttatatgcagaaataccctgacaaccttgacaaagcagccgagcttgcagtttcaacgttgcaggtaatagtctaaacttgtaaagctacaaacttctcttactatgttattgttactcacaaaagttaattatggtgagcaggcgcttttgcgaaggacgcttgatgattacaaacgagctgggtatgatcctacctcaagcagtttggagattagattgatacaaagccaggaagacattcgcaacccgaaggtcgaactgaaagctgaaagatacagctgaagcaggtgaaaaaatgtaacatatttatctgaaataagaaaacatagatgattttggggatacaataattatgttgcacgattcttttatgcatataaaagagtacagacttcagagtaataggatgttcaagagctcctataaagcttttaaaacagccttagactgtttggtttggatacttatctttcatcattttgctgatgttaatacgttaacaagaaaagatggagcggagatacgcgttctgttcctctttctttcagatacgaatcggtaaacacgtattgaattcagctctcccaagttattaaccaaacctcttctgatgcttccttctgagactttttcattttctgtttgtctgtctatttcatagtagtcttgtctgcatgtttagcgaattcacctgtttcttgtgcttttcttggcctttgaatcctatatactatcccaacattgcctctgaacagtccatataagcttttagtaaaattggcaaaaccaaatactagagaagctacatatgcaccaatcgatatcaaaggaaccatttagggttcttggtgttccaactcagccaacgaactgaatgaaactcatgggccaaaacagtggggattgcaataagggagttatacaaagggaatagattttaactaatgtagtaacagagttctttaacactctaagccaacatttgaaaaagactatactactatgcttgaaataagcccaagtggtgaaaagacacatatctagttaaagctaacttcaaccactaacttcttcaatcagtagtaaaagccatgaactggtcttgagctgaactgttgattcatagactgaactggccttgagctgaactgttcatgattcatagactgaggaacaagagatggaccattcatcatctgaccatggaagcctctctcattcatcatctgaccatgaaaacctctctcattcaccatcatattatttactcttcctccaatctgcatgttcattgtttctgctgcagggtatgcattagagtatccaagatccatgtccctcatcagatttggtttcacatcttcgtagttgttgtgtctttgcggtatttccccaaatagctcttggaaatcttcaggtgaatcactcatttcgaagtaatctgcatcgttcatcatcacaggtttcatgttcatcatcatcatcatctcttcatcactctgatgattaagcctttcataacttggcacattgttgtgattgcttccgaaattgtattgtgtgttccccaagcttctgttgtcatgattaagaacagcttgatgattaccaaagtattggtccttatggtaaggagtcaagaacataagctgagcatgtttccctctcttgttcaacttcttgaccaaaatctctggatctaagttacctctaacaatcactgcttcctgatctgtgtctatatcaacagagtaaacacctgaaaccaagaacacatgaaaaaacagttattggaccaaactataagaaagatatgcattaaataaatctttttttattttctcaccttcaatttttctaagtgttttcttcactttcatcttacatccttggcagttaatgttaactttgagaaaatatgtctgtcacataaaaaccaaatcaatgttggaaagtaaaaaaacatttgaaacagaagaatgtttgtgtcttaagaaaagagagaagtgatctgttttttataccttcaaaggttcgtagacgtttcgtggcatttcttgatttctggacttgatctttctttgaacttcttttatgttttttttggggactctaaacaacaacaaaatgtggtataaaaagagttatgagagagtatagagatacataaaatatatggagagagaaacaaagatactggtggccagagaaaatctcgatcttgtcagctttttctagcaggtaagtatcagaggacaacacaccagtttcttgtgatgaagatggtttctgttggtcaactatcactggctctaagtgtcaaaatcgaaagatgaaaagtaaaaaatgtaaaataaagatggaaagtaaataggaggaggaccacttctaagaaactggtactgcaaaagttgaaaatttcagagtttgtgagtatttatgtttttttaggttataacttctttatgaagcattagctctgcgttgcggctacaaactctagtctcttgtcactttaaagcttcttcaattgggaacaacttttatactcagaactttcttatttttcttataatataaaaacaaactgaaatttcattttgataattttcaaaatttacagttattgattttcgttttattttacttatgcatggataaattatcaaacacatgaactaaaccaaactagaggtggtggtatgcaaaaaggaccggactaaattcattaattcgagaaaccaaatcaaaataaccgaacccagaccaaacttactatgtgtagtagaaacatgatacatcaaaactcacttaaaagtttggtttgctttattatgtaaatatcttttttttttatcttgaacatgatacaaaaatgtaagaaatgagatcatgtctagtggtggtttctaaccaaagtttataatctactaaaataataataaaataaaaataatattatttaatttgaagagttttttaaaatagttggaaaacttttcaaaatctcttaaattagaaactctctcacattttcttagaaactgtcttaattaaatagtattattttattattattgttgtaggtaaaaaactttcgttagaaatcaccactggacatgctctaaaaattcaaagaagccaaaacatcattaaattaacatcaatgtcatagataaaaaaaaaaaaaaagaacctacaaagacacttagacatcttgtaatcccaaaccagacctaatcatacaatcattcatgatttaacttctgatatacaaagctccatctccaacacttcaccacgtaataaactgtaaggaacaagcatgacattgtttaggggtttcaaaactcacttcaagaagtctcttcatctccgacgattcgtgacaacaagtgcgtccatcaaaagagtatgagattcggtatgagaacttctccacttcaggagccaatggtgcaatacaatttacagccacataaaacaccatttggctctctaaaacattggacaacgaacaataaagtttttttttgttgtaatatgttctgatggctcgttgatatttactgtgaagacaattttaaaaatgtttgatgtttctgatgttacatgaaaatgaacacaaatggaagctaattaacaaaaccagcaatcaaattacatagaagaagtatacgaaaacaaatttaggtcacttttattaactcgaaagtttcttaatttgcgctatatatatatatactagcaatcaaattaaaagataatgaaacatgggcagtcaaaatatatgaaaactgtataaaactgaagatgagatgctactgcatgttaaagttaaagcaagcttgcaaaatcatgatcgatcttatactaaatgaccataaaaaggaaactctatggattcaactaaaaatgtaataatcaaaacgtaactcgaaataaaggaacagtgagtggctcgtagcaaataggacaatcaagaaaatcaagatctagccatgtcccctttaccgagcgtgttcgttgcctcttttgtgattgagtgtttctcgaaccatccattttgtaaggaacacttcatgtctcaaaaaagaatataagaggcttgagaaaagttggaaacgaattaggtttatttttatgtttttagtcttctatttgtgaagagcttgaaggaacaaaagcatacatcatgactttgatggaactcgaagagttttatggagtggagcaaagagaacgtcacatcaataatacttcctctgttcctagaagaataatgttttgggtttttcacacaaattaaaaaaagtaatttttatattatttttattattttctgttaatttaataatataagttctacatctctcctctttctattggttactaagaaaaaagaaaaaaattaacctacaacattaatttttatggaacaaatataaaatccaaaacatcaaacttgatggaatagaggaagtaatgactaaggagaaagttgtttcatttgtttcaacacgtgtcatttttcgaaatcaattatgtcgatttgtctttttaaaagttactagaaaaatgattactcaatgagcactcaaccaattattaatctcaatacatgtttcttccaaaaatgaaccattagtggttttgaacttttataaggatagacataatttttattctgttctattccgttgtacaaaaatggcaagataatgttgcgatggtgtgtttgatgtggtcatgactttaaaaaaaaaaaaagtttctgatttagttcatgaactaaatagaaaacaagtcccttatgaaaaccattctcgagatgaatttggtggttaaagataaccacacattcatcttcccaagtctacgcaaggctttcaacaatcaaagagttcggtgaaaacgttaaggctatttttaaccatgcctatgcaggactttttttttttaccatgcctatgcaagactttgagtagtgaaagagttcggtgaaaatttcatggcgttgaaatcgactgtgacgggagcagcatcaagaaactaaatatgctacatagattcttcaatagataaggagaagaaaatgataggtggctcagtgactctgatttttgagcctacaaaatcaactctaaactaaaaccttgttaaatgttaactcaaagcctaaaagcaacttctgatcttagttcatcaggttaaaacttaaaaaaaaggctacttaacgaaaacagacttacaccaaccttcttacatttgcttcaactcattgatgcaaagcatcatccctaacaatggaccacataacaaactgtgagggatcaacatgaaactatctttaggtctttgggagctcactttaagaacctttttcacctttggtgattggtaagtcatagtgactccttcccaagtagtgtacaagagaccatatgagaactctcctacttctggagcagatggtgcaatgcagcttacagatacataaacaccacacggctcctcaaaacactgcactacaaacaatagtttcttctcatataccctttcaattagtatcttatcgctgatgaacatcatcgcggctatataggaaacgccattgaaactataagccgtgctacctgtactgtgagtaagatcatagtgctcgtatagatccttgtatgagccagtataattgcaaccttgtacagggcaggagcatggagagaagttgcatatcttctcatgggttgattctctcccataatagattgtcttggtgcaacctaaatctgcgtatcggcatgggaccaagactgattcaagaactctctccattgctctacagcgaatgtgtccaacaggcaaagcacatgcaggacatttattcctcaatttgggacagcaagaagaacaggccaaatgcccatttccacactaaaaatattaaaccaatgaattttcattaaaagctgtcacagtaacaacgtagagaggatataaactcgtccttgcaaaactatctacccacatatatattttcaataactacaaatccaaacatgaactagggatactctacttctatatttactccaaaattattatactcttcataatgcaaagtttaaaagaaagttgaaaccattcattcagaaagaaggagaaacaaacaaaacctggaagacaggaatcttcaatgcttggtagcaaatgggacagtcgagaatatcaagatccgtcagcatcgctgagcgggtcttatcaactcgcttccttccatcatcggaagatatagaagaacagtgtctcttttgagatccatttctttcgctcaataaaactcccaccatgtcgcctagaactcaataggagagagtggctaaaccttataatcaaatagttttttttacctaacccctaatcttgttatcttattttgttgacgtaaaccctatgacttcgacgagatcctcggtttttactttttagggttttgggaaagatcttccaaatataacgagaaccgaatttcactttagtcgggttggtttaaaactaaactattcggttaggtttttatttctctgattttgttctatttaagttcagtttagatttggtttggttgtagtcttgttatagggtaaattatgggcagtagcctttgaccaagttttactttcaggtattgacaatatgaattgggcctttcaacaattagccattaaggcaaaatgtgacgaaaatgcccctatcattcctaattgtgatatatacgtacggacacgttagttacgatcagacggaagtacaatgtacagttaactaattaaaaattaatattattatatttcattttcattagtttttccagttttttttttcttttctgtgttagaaatatttattatttttgtacttttagttaaaattcatttttttctattatttaagacccactttcatattttcatttttattataaataataatttatttattaatttttacattaaagataatttaagattaacaatatcatgtacatatttgtatgtacatggttacaatttgtgtacgtacactagtacatttatcaaagaatatgtacgtacactactaattatgtacccgatgaattatgtaaatgtaaatgtttacgtacataaatacatatagacatggtagatgtgaaatgaatggtaatagtgtgcaatttagtattggaagatcagttttacctgaatcagaatacgattcgttgaaatattatatatttataatttatattataatatacatgcatacatataacttatatacaataacttaatttggatgtcaaaaaaataaattaatttttttcgtagatagtggttagagactttttacactcattttaatgtagtaccatgtacattccgataaatatatttgtgtacgtacatagtattaaatgtatgtgattttgatatttttaggatgtaactgtttggagtggtcgtacacgtgtacgtgtatcttaatattatcgtgtttgtttacgggtttagtttaaaaccttatttgttctcaacaattttagcttaccaacaaagatgtatgtacattattatacatgtacgtacataacatttttcaaaagtatgaggaacaactatattttgaacatatatttttatttaattattatttatgaatagatttatgggaaaaaaacccaaaaaatatctcatctaatcgaaatacccaaaggtttctaaagtacaaactcaataaatattgtgtatatcgtctttacaataaaacataatgtaacatatttacatgtctacatatacgtacgccgtaaattgcatacatacacataagaaatttaaataaagggtataattgtaatgaacgtgtacggaattctcatcctctgtctatctatcctcgtaggcagttgttagagattttttatactcattttaatattgtactatgtacgcttcaacaaatatttttatgtacgtacataatataagatttatgtgatttaggtatttttaggatgtaactgtttggagcagtcgtacacgtgtacgtgtatctcaatattgttgtgtacgtctattggtttagtttaaaattttatcttttttacacaaataatatcatataacataacgctcattaaaaaatttcaaaataacaattcaatagaaataacaacatcaaaacaaaaagtatcacctatatcgtactaaatacataacatttggctaactcgccgtatgcaccatcgtagataccaaacattacaaagattcgtaaaaagactataattctctttaacagaatcacatataattttattgtaacataccaagtacttgatcattctatgttcataggttctcatctaaacaataccaatgcaaacattttttttatttatacaaggaatctaagtgtaaacatttctgtgtcagtttgtccaatccgataagtaaagtgtgaatattatgtgcatgatgtgggactttgttgatgaaactaaccgtgggttaaggtgaaaatacaataaaaaccatatttgaggtaccaaatgtagttgaaaataataagaaagtagatgagggagaagaagtcgaggacgataaagaggatggacagaaagagggtggagatgataaagagggagttgaagatgacgattagaaacaataaattagtatgacatgagagacattgtaagttgtgagtatgtttagaaacaattatttttctgcaaataacaatgtcttcatctccagtaggactatcgtagaatatatccctactatcggcaatattggtttattattatatcaataaatatatctcaacaattttaactcatcaacaaagatgtacgtacattattatacatgtacgtacataacatttttcaaaagtatgagaaacaactatactttgaccatatatttttattcaattattatatatgcatagatcttatggaaaaactgcaaaaaaatattccatctaatcgaaataaccactgatttataatatacaaactcaataaataattgtgtatgccgtttctacaataaaacataatctaacatatttgcatgtccacatgtacgtacaccgtaaattacatatacgtacacataagaaatttaataaagggtatatttgtaattttggagtcgtcttcaacctcagcaacctaaattttgcagccgcttgctaacagttatctcaaaaatcttgttttttttcttatatttacgttttgaatgcttattacatataaatattgtacatccagcatagtttaagtaaaaatgctaaagagtttgagttttgtttaattgtccaatggttaagtttctcttctttgatgacatattcatttttgtttttttcgttttcaattatacatgaacacgatctgggtttcagttttttcctttgttctgtaataaaattttaggctttattttatttaaaagttttagggtaaatcactattactattcaaactttaaatattatcaataaaagtttgaatttatatcttacacaagcatatttaggcggatcttatctaataaaacaatttataagagagaaaaaaatagaaaaaaaaattagatcgataaatttattatttttggttcgcttctgttttagcacttacgtcattactaaaaatgtatccctgtacatttttttaaactgaactaatcgaaacaagtaagaaagctatattttctaatcaatcacgatcataatcaccattcacccatacaacaagacgtgaattgtacactcataacacaaaccattacaattttcaacaaacattcatcattagacattcccaatcttaatctcattattcaatcctggcttgaaagtgtaggataataaccaatagctatactcaaatgagcatattaacatagaaatttaaagctgaaaataagacagcttattaagttttattgtgcgacgaaaaattagaggaaaagatttagattttcaccaaaacacctaactttagatttgattacataagaggggaaagattaaagtttctcaaagtgttaacttcctaggctagatctatatctttttatgatgtgagagggtatgagtcagatgtgtgcataaaataaatgagacacaaagatttgttaacggggttctgttaacaacctacatccccgggacctaatccagaaacaactccactagaataagatcgcaaatacaattgcatatgattttacagcataattatgcctatcactttttctatatggactttagaaacagtatcaagccacgcatgtcttgactaccacctagcagcaccggtgcatcatcgtcttctctaacgactgcagattccaaaggaataccactaacagatcatcatctgtatttggtggggcgacgccacacacaagtgtgcgcatctctctcaactatatcatagacgtgcaacctttttatgtcacgacatccatctatatatactcaagacaaaaccctaagctccaaatattcttgcaatcttttttccttgatctgaaagtatatgagccaccactaaaggaaacatcacgtctccaatagaatcatgccatgtcatcttcattcctcacttgattctttctgcgttcagttctcctgttgtgttacacagcttccacttgtggaacatcagctctgatactttctgttgatactcttgcgtcacacagatgtttcaatgcctttgttgcagtctgtgcgataggttgcatttatgagtttgatgctagcagcttggtcacaagaggagcatcaatatattctcttgatatttcatgtgagcttgattgcttgagtttcaaactaagctaaaaagggggagaatgacgatactagatcatatgagctataactcagccatcaagggggagaatgttagtatattgtgatgttgctgagttgtgtagctgtgacagttggaacgtgaacaatcagtcaaaatcacaacatatgcagtgacagtttggagaaacattctaagttagtattgaagcttgaagatcatcaaagtacaatctacaaaggtgagcttgagttctaaaacgcagtaacaaagggggataatgaaagtatatttgtaactggttgttagactcaagatgctgacacacaatttaagatatgagatgatatagactaaattgttgcaaaagggtttacacaacaagaagaagtggactattttgacacattctctcctgtgcaaaattggcgagttttagacttttacttggtttagcagttgggaagggttggagtacgtcttaaattgatgtcactagtgcttttttgcatagtgacctggaaaaagagatctttatgagtttaccagaagaatacgctccgccaaatggtgcttcattaccatttaatcatgtttgcaggctgcttaaatcaatatatcgtctcaaacaggcttctcgtcagtggtacaagtctttaacgaaggtttattgacgatggttttatccggtctcaagctgacaacactctctttgtcaatgtcactagtaagtctatcattgctatccttgtttatgttgatgatattctcattgtgagaaatgatgatgatgatgttaggtctgttaaggatactcttggagcacattttaaaacaaaagatctaggagaggcaaaattcttcttaggtcttgagattgctagcaattctgagggaatttcggttcgtcaaaggaattactgtctcaatatattagctaactctggtttgttgggtgtaaaccaaaatttgtgcctatggatcctaaggttcctttgactaaagatactggcacatttttggagaatgctagaccatatagagaaattattgagagattgttatacttgtgcatcactaggcctaatataacttttgtagtcaatcgcttaagtcaatttctattttgccctactgatgtacgtacaccttcaagctgctcattaaatcttgaagtacctcaagaacaatccaggtcaaggcttcttctactctgcttcaacagatttttgcttgaatggttttactggtgcagattggggcacttgcattgactcaagaagatgtacttcgggaatatgtgtttttcttggaattccattaatcacatagaagtcacaagacattgtaagtaacagtaataatgaggcaaaatacaggagtatggctatgactaaaaaaaaactcctttggcttatttagatgttaagaaatcttcatatcaagactaatacttcagcctaactcttttgtgacaaaatattaaccacacaccttgtaaataacctaatctttcacgagaagacgaagcatgttgagatagattgtcaatatgtaaaacctttaagaagccattcttcacaagggatcaagtgaagaatgactttcttaaaggtttcacatattgacacatgaaaccaacttggtggcatattgacaaagccccttcatccaggtcttttctactctctcattagtcgtttatcgatttcaagcctttttaatccatcagatgattcggcttgagggggtgtatgaacatatagagtatattagtattaagtctcctatactttagtattataaatactctcttctatcataactttaagattaatgagaaaaacactttaaattaaagtgttaatatgatttctaatcaatatgggggttatcaattttatgttgtatacaagtattaggcaagactgtataccattgttagcaaataagatcttatggtgactctctctctcaaatgaaacgagtagaacgacctgtgtccccctagcaagtttcacatacgaccacatctccacagatttcgaatcacgtctccagtccacataaaaaaaagttaaagactacgttccacctaaaaagaaagttaaagaactcgatccgcatattttcgaatttagtggtttattattggtttactgtaccaaaaacaccattaaccgataaacaaagaaacaaaaccggatttacccaaaaaccaacccgaactaggacccattaaccccgaatatgactcgaacattcccaaattctaaaaacccccaattctagaaatccctaaatcgacaaaacccctagaaatccagattgttcttgagaccacgaaatcgaacgatggattcgattgagttggagagaaacgtgttagtcgttcatcaagaggccaccggttctattccgcaagaggaaagctcgatcccagatgatggacccgacaatgagcctgacgatgaagacccaagagatcgagatgcgtttgaaatcgagaaggcggtaatggagtttagagatgaaccttcagtttttcacgatgagtatccagacagtgagagtgatgaagacgacgaagctggtcgtgagagaaggcgagacaacatcagaggcggaggtgggaatttgtactatcaccaaaaattcttcagcgccattgcctttaaagaagctgttcttgatcatgctttgaagacaggatgcaatatcgctcaatacaggtatgataaggataagctgggatataaatgtgatggggatggctgtatttggcgtatttattgttcaatcacgaagaaatgtgctaggtggagggttaacgtgtacaaagatgtccacacatgtaatccaaatggagattgtgagatgttgaaggttccggtaattgctaggttgtttttagatagtattagaaaggaacctctgtacttcatgcctatgaagattgaggaaatcattaaaagacgatggaagatcaccgtatctaggcctcaatgtcaagctgcaaggagaaaggcattgagatggattgagagagaacatgatgagcagtttgctaggcttcaagactatgcggaagagatacgagagtccaataaagactcaactgttgaggttcagactgtgacaaatgaggcagacaagaggtattcaacagattctacgtttgctttgatgcgctaaagagaacatggaaagagtcgtgtaggccacttataaggataaatggaacctttataaaaggaaaggttaaaggtcagctacttgttgctttaggtagagatgctgataatgctatatacccaatagcatggcggtgtgtacaagtagaaaatatagataattgggtgtggtttgtgaggaagctgaaggatgatttgggactaatggatggtgatggttatatcatagtgtctgatcgtcaaaaggtaagaagcattcttaatttaagcatagtgtctgattgtcttttggtagtttattaatgatcgttttttttttttttcagggtttgattcgagctgttgagttagagctgcccatggttgagcatagaatgtgtgtgagacacatttatggaaacctgaagaaaaatcatgggaaagataaagagatgaagaagtatgtttgggatgtggcatggagctacaatgagaaaagctttgaagctaacatgaccatgctttacaactacaatgtggcagtttggcgtgatgttgtgaagtcaaaaccaagaacttggtgcagggcgttttacaagcaaggaaacttctgtgaagatgttgagaataattcgacggagtccttcaacaactccatttttaaagctcgagacaaagcatttgtgccaatgcttgaaaccataaggagacttgcaatggtaaggatagccaagagagctgttgaatctcatgagcacaaagggagatgcacgccatatgttagtaaattccttgccaaagaattcaaaaaagcttcagagctgaccataagaagaagcactaatgatatgtatgaagctactataggtaacggttctcataggatatgcttaagtgagaggacttgcacttgtcagaaatggcaaatctgtggcattccttgtgagcatgcttatggagtcatgttaaacaagaagcaagaggttgaagattatgtgtgtcactggtttcggacacccatgtggaagaaaaattacacagacggcctatttccgcagagaggtcctgcattttggccatcgacagaacatcctgatgtgcatgcaccaccaccaccaccacagcctgggagaaagaaaggaaaagagactaaaaaagacaagaagagaaaaaagggaaagaatgagactcctactaagatggcaccaaaacaaatgaaaagggtaatgcattgtggtatttgtaatgcagctggtcacaactcaaggttccacaagaagaaaaagtcttcagtacaggttagccttttggttatgttttgcattgcattaaaacgtgtattaggcctataaaatagtttgactcttgttttgctttaaaatgtgtattaggcctttgaaggattgatgtctcaaggcagtctaggccctagcactcatggcactcaaggcagccaagtggaaccgtctcaaggagttgtgatgtctcaaggctgattagaaggagattagttaggtgtaagaggattagatgggtctagtttttgtttaccatctgattaaaacttaactcggttatgtaattttggttatggatgtttcatttctttgtttcggatgttctttgcctcaataatgtttggtgatttcttagaatacaccaattgactcattcaacgaatctattttgtcttctttggccatttgtctttgttttactcattctcaaacacaacaaaacaaacaacaacaacaagcacaagaatccaaattgggtttttcattacacaaacataagctcgatcaacggttagtacactacaacaacaataacagaaagcgaaaacaaacaaacaacaacaacccaatacactagatttaaattatcaccttactcaaacctaacctatcaccttactcaaacctagcatgatcatacaaccaacaatgacagcaatcgacattttcttcatgcttgattttgattccaacagttcttcttctacactctccacaatctctctctctagcttcatttgcatcttctcaaaaaccatcttttggtgttccatattctctgttgtaatttgggacattgtttcttcaagtgcagccgttcttcgagtcaatctctctatctcatctaacaatgcttcatcaacccacttgaatgtgtggttatcatcaacaagctacaaagaacagagaattaggctataaatttgtatgaaacaactcaaatatcaatcacattaccttatgtgttgcagcataagcacaacgatagtaacgtcgatatggattcgaagcggacttagacatgagcgccgagatagtagcaccacaccaacacatctttggcacacccacgaatcttcttctctgtccaacatttgatgctccactcgtagctccagatgaattgctcatattcaagctcagaattgaattcgaaaatggtgaagaaaagagaagaagaacaatcgagattagggttctaggatttctcaatttggggattgtatttatcgggttgggatttatcgggttgggttgtgtgatacctcgagaataaggtttaattcggtttatccttctgggttttggtttgacatcgggttctgtataataaaccgaaggcaaaccatggaattaacatttttggggatcagagtctgtaactttcgatttagggggaagcatgtttttaactttcattccatggggaccgagattgagtgttagattctgtgtagttgtgatacaatgtgaaacttggtagggggacacaggtcgttctcccaaaggttttagttaatactttaatttcatatcttattcgatcgattaacattcaccatgttgtttagatatcattacaataaatatctaacaactggtaaaaccatatttatcgataaatcagtgtgatacacgggttctaatttagtactaaaaacaattgttataattactactattgtcttttcacattggtttattcgaaataaacagatccttagacaataatgtttttcttaagaaactatttttttctcttatatatatgacagaatacattcaaattatatttatacatttcatgtattttcttctagtaaacaaataacaaccaaagctagctgtattttgaatgattaaaaagtaattaaatttttctgaagaacaattcaaaattgaggttaacatttttttccttccagcaatagtaataaagaggagtttgatttatttttatatttttaaatttttgaatgcgaatacaaaatcggataatttagtattaaacgtttatacgcaaccacatcttatcacctatataaataatgtttttcggtattgatttgtttgaatcaatctaatatagttgactaaaaataaaataaaataaaacaatagcaaattcgaattcagaccgtttcccctatgtggctattaagtattaacaattaatagtttcaagttataataaataaaactttttttttgtcggcatttttattgcaatatatttgtttgacaatttgtaaaccgctaggaaacctacatattatagacatgctcagtaacaacccaatagttgctatttaaatttgaatcattttaagaaaaataattttttgattaaatctgcgaattttataaaattttataaggtttataaggtatttatcagttgtaactactatttggagattcaattccagtatttatgaggtattttataaggtgttataaagtgtcacaaggttttacaaagtattttacatatttacaagataattataacttctaaggtacttgtaagatatttttataaagtatttataaaattttagatacatataaaagtaaatgtttatgctttaataaagtttatacacatatttaatttgagtattggaaaaatgaaaatttaatttttttaacatataatatttttaagatatagtatatgatttcttaaactacataacactacataaccttatgcgatgcgcggatgaaataaatgtagtgaaatatacaatattttataactaatatatatatatatatatatatatatatataaaataaaatatttagttactttataatacatgtaataacaattagcataaatattgtgactatgatatattaattttgaactaaacattttttaggttttataaattataaactaaagctagatttttgttatttttatattaaacatttatcaaattaatcaaaagtgctaattataatattgatatacaatataagttttgcgttttatttaaatctatgaaaatgatatgcaatatttttttaactgatatatttcaaatttgtaagttgtttatatcatattgattttagtatgtgtgtaaattgtaaaatattcaaagttgtgagattaaaaaagtcttgattaattaaaagattaacatatatgaatattgatatattgatactaattgatattaatcaaaagaactcaaatactttatatgatcaatattcaaattatttactatttcttccatcattgaaaaatatggtaagaaattattgcatttaattactaattatttactatatatacacttgtggaatttaataaagaagtttaaagttattttgatgtgcataatcatatattgaagaaaggacacaataatacggttgataaataaaataaatgtaaattttaaaatacaattaaacaattagagtataatgtaacaacttacaacaataatctaacacacgtatacaattaccaaataaaagtcaataaattatatgagatatatcatggtttttactgatttctaacatagtattagaatggtttttatagtctttctaatcttttttgtatcttttttagtcattacaggtgcatatctacttttaagagctatgaagcataataaggaattttggaagcttttcaggaaaagaagacaagcagaaacattattcatacgttggtgtcgatcgacaccacgtcagtatcgatcgacaccacgtcagtaccgatcgacacccttatcgacaaggatatttctcacgtatcataaagtctttaagaagtctagaaatttttcttatttgtaaaatagaccctgcacgtttttactaacctatattatatatatactagatattaacccgcggtaccacgggtggatatgttcattaaaaaattatagataatttttttaaaaattattaattgtatataaataatatattcttaacacataatttttatttatgtaaagcttcgataattcatttttatgttctcatatttgttagttaattatgaaaattcaatatttatttttatggtttgggttttttagaggtaataaagatttaaaacttgtattattattattattattttttaacttgtattatttagagattgacccgcggtacatccagggttgaaatatttcttagaaaattagatattttatttttattaatattgtttatatatataacatattcaagaggtacatcaaacgtctatatttttattaaattaaaaatattattattgtttttaggatgatctatagatacatgctattgtcttttatgtatgatagtatgatacacctctgtatgatttttataactatttttttttagtgtttaaaattgtataattgtatcattccgtattaatatcgatccaaacctatcccaccatataacctcgtcccgtgaaattaaacatcattttatcatttttttatgaagttcgaataattataatattagaaacttcaaaaaagttttaatatggaccaaacttcataattgtatattgattgttacatataggatttcacccgtaatatatcgttcaatattaatatatttttagtatttataatattttaacttcttataaagttcaaatatttacaaaatttacaacttcataaaattttaaaatttttaaatcattaatattaaatttattttatagttattaacttttaaattttcttaagaaattgtaatacttaacttttaataaattttaaatatatataatattttaaaactttaaaacttttacttatttaaaataaagaaccggagtaaaccgaacaatacttttaattttggatgtttgatatatcaaggttccttctcattcgtattcagaatcacttaaatattttttatagtatgactcttaacgatgtcccaaatttttaagcaatgtgggacctttaaaacttttttttttatcgatggagtattatatgtctgttttaaaaaatttgaattttatcggatgcaaaaaaatctaatattttattaaatatatgtattttatatataaactaaaatagctatatataaaaacaaagataatgacagaaaaattatatatttatatttaatgttgatatatagattttaggaaattagccttaatcgaatatagttcaataaaaaaaaatttagttaaggataaaaaattaggaagagttgattcaactaattaatgcaattcaactaattgtaagtttttagttataaagtatttgattgagattaaatttgtaaggactaatattgaaaatagtaaataggtgagggatttttggtcaaaaaccttagcaaaaatatatacatgtaaatattttaagattattgtttagacctaagcaagttttgtgtgagagatatacttttggagagaagaatcatatcactagcagaaaaagaaaaatatttaacttaatctgcgttgtagacttgtcgtattttccttgtttaattttaaagtaataacaaatactatcatgtattgtattgtacactattattttacagttgtccaacgtgaagtcacgatatgttcttgttcctagatgggattcgaagtcttgcttcttcaaacttccaatcgttagaaacaagatccggaaaatccgaagtcttgataattgaacagctctccgaaatcaataatgaacgactttctttaacaaaaaaacaaaaagaaaaaaaaaataatgaacgacttttttataacaaagaatataaaaaagctttcaactaaaacaaaagaaagcttagttgtattcacaagtttttatattaaatggctggctaatatatatatgcaaggggagaaggagaagaagaatatcacaaaaatcgatccaaatctccatattagcagccatgagttcaatgggtgtattttgtaaggaggaaattggtggaaaaccgaatttggtatacacattaacacaaacagacaacccaacctcttctggtgaggccctaaccatggattctggtgaggacgatctccctcttcaacctctttttttctgtcctatgggatataattatatgtccatgtatactttcttaattatatcatcctccatatatatatatatttaactaaccttttttataattcatgatatatacttgatcttgctaaattatacacacttttcaagaactacaactccaaaactgaacatattttgtagaacttcgctagaatcctcaaatcctcaaaacaaaactagtttttgtaacttttagaatctagtaaaagggcaagtttccaacttcgttgttcctaatacagagtttataacaagaaacaccaaaacctggaagaattttagttatcaagaaataagaatcagaaagatggaaaaatcttcttggaagacaggaatcgtcaatgcttcatagcaaatggcctatgcataaattatatcttagtttagattgaaaacattgtgaaacgttttgttggtcgattgcaccaagtctctaaaattacaaccctcatcaaccataacgactatgggcgggttaagataactaaaacgagacagataagagttttctaacaggaagaccccaaccttcttactctttgttcaacttcttgacgctaatcctcatttccaacacatcaccacgcaataaactgttgggaatcaacatgaaattctcttgcggggtttgaaaactcaacttaagaaccctcttcacctctggtgattggtaaatcacagtgtgtccatcgacagtgtaagagagagcatatgagtactgacttaattctggagaagatggcgcaatgcagcttacagttacatacacaccatacggctccctgaaacactgcactgcaaacaaatgattcgtcaagtgttccgttctaatcaatatctttttgctgatgttcatccggacacttaagggaatgtcacaaatgaacgtattaatctggtttatttccatatgggtaatacgatagtgagtgtacagatccttgtatgagctagtgtaattgcaatccaatgcagggcaggcgcaatgagagaacatgcattccttttcatgagttaactctttcccataagatacattctttttgcaacctaacttggcgttcggacacgggatcaagatcgattcaagaacactctccattgctctgcagcgattgtggccaacaggcgaagtacacgcagggcatttgttatttagtttgggacagcaagaagaacaagccaaatgtccattatcacactgaaattcaaaaccaataacttgtgatcaaaagctataacaacgtcgagataatattcatcgaatcgaccaaggataatagttctctccccaaatgattctcccatataattcatgatatagacaagttatacacatattttcaataactatatacaactgcatacatgaacataacttactaaagttcactagaattctataaaatcatcacaagctaaagcttaaggacactcttgaaatctagtaactagtaaatgggcacaattccaacttcttctctctgcaatttctttaacataactttcaaaagttcactagaatcctcaaaagctaaggctactcttagaatcaagtaaatggccacagttccaactatgttcagagttctaaccaaaacagaaactttctgaaaaatacgaaatgattcaatttgagaaattacgaaacctggaagatgggaattgtgaaagcttcgtagcaaatgggacaatcgagaatctccagatccattagcattgtcgagcgtttcttagcgtctctcttagctgcatcactagaagaaagttgtctcttttgcgagagaatgctgttagatccaattccttcgccgggagattccaaaatcgcggcaccaaccatgtcggagagatgactaaaccctaaattcgcttttagtcttctcgaaaactgagagaggcaaatagagaatttagttgattttgttcattgatggatggttttacagagaaaggagacaatggcacaaactatagatgatatgggcttcgatagttcttcaattcccaattaaggcccatataatatataaacaatacctttttttgataaacttataaacaatatctaatttttaagtctattaatatttacaatataaaagaatataattatatatataaaaccatttaaaaattaatattagtcttaaagtttatgtattttttaattcttcaattcccaattaaggcccatataatatataacagaaacaatgtctaaattttacaaaatacaataataattatttatttagtcttaatagtttatgtattttttgctacattaattaataagctaatttttatttttaaaagttatgtagcttttatttatttttttgtcaaaaatgtggttttgaagttgggatttggggcaatcacaaaccactagactaattttaccttggaagattgataaaaatagcaaaaaaaaacaatttcttcaaaaatagcagctcatttgaatagttccaaaattacactcaaaactttaattaattattaaatatttaatataaataactaatttaattaaataaataaaattaaatatttctcgccaaagatttttgtcaaaattttctcacaaaaaaaaatccgtcaaatgtttcccataaaaaaaatttaggaaagattattatacgaaatttgggaaggatttcacggaattcataaaagatttcacaaaaaaatctttcctaaaactcttcctgaattttgtagaatctttcttaaattcaggaaatgattctttgaaagattccacgacatagatgtcactccattcagtatcagagtcctgacctcttttcttcaggtaatttctaaatttaatatatcatagtgttgacctctattcctcaagtaattttcaaattaaatgtttaaaaattcttttgatttttggtggtagactgctaagattaaagagtccgatatctacatgatgaagataatggagtgctatacaatgtaagctagtaattcaaaccttgaggaaaatattattggaaacgcaaggaaaaaatcggcggttgattcacagaattaacagatatataggttagtatatgcttaaaccaatataatttcaataaccatatcgtttgcagaattaacaatttatgagttatatagttcattttttttgaatagggtcaattactatgcagaagtagcagattgctaataaaaaaaaagtttgtgttagcatattcatagagcattcacccaaatgatgaatttgtgtactttttgaatttttttaattgttaattttaataattaaaaataaaataattatttgaatgctattttgtccaaaaaatgtttgagtgctatttttttccaaaaacttgaaatggtgctatttatggaaatttctattttaacttttgctattattttttctgctaaagatttaagaattttggtattagcttttatattcttaactaatatgtaaaattgcagttaaaactaccatattggaattctttaatcattgaatcacaattcacaactaaattttttcttctgcttttagacatcacacgttcgtacgtttacttataattagatttcgactaagagtagaataaaagatggagaccataatcatgacaaacgaaagagcacgcattactccaatttggtcatgcataaagtatagcttagaagttattagattaaaaaactgtgaaatgttttgttggtcgattccatcaaaatttccattatcactctaaatgcacaaaaacgtgttaagcaataccaaacaaattgcatcaaagctgaatcaagccgttaagcaattacatcggatcttagttcgtcaaaacttatataaatgtcagacgagatagagagagtaaaaaaatgacattccttccttctagttctatatcacctcaacattcttactcttggttcgacgtttcgacgatagaaagcttaatatccaacaattcactacgcaataaattgtgaggtatcaacatgaaattctcttgaggtgtttcaaaactcactttacgaaccctcttcatttgtggtgatctgtaaaccatagtgtgttcatccacagtgtaggagatttgatatgagaactgtccaacttctggagcagatggtgcaatgcagcttacggttacatacacaccacacgactccctaaaacactgcactgcaaacaatattttcttctcatatacccttgtaatttgtatcttatcgctgataagcatcggggccttatatggaatgctagatctaaagcagttagtggtccagtatgagttcgagatgtgagtcagtttatagtgatcatagagatcctcgtatcggccggagtactcacagtccaatgaagggcatgagcatagagagaaaatgcattcttcttcatgagttgattttttcccatataagaaactctcggtgcaaccaaacatgtcgtttgggcatgtgaccaatatcgattcaagaatattctccattggctgataaagaaagcacaagcagggcatttgttcctcagtttgggacagcaagaagagcatgctaaatgtccattctcacactgacatacaaaaaaaaaaacactgtaaaaatttcaagaaaaaaaatatgtattaaaagctggaaaaaaacaatttttagacaagaaacaaaacctggaagataggacacgtcaatccttcacagcaaataggacaatcgaggatatcaagatctagcaatgtcgccgagcgttgtctcttagccactctctcccctccatgaccttgagatatcaaagcttctaaggctcccaccatgtcacctagatatcaatagtaaaaatattatcatattttcattaatcaaacaattttaaaacatcctcgactgatgaaggcagaagagtttgttcgaaacttttataagacttccgtaccaaaaaaagtaaaaaaaaaaaagagtgtttaaacgccaactttttaaatctcaaaacacaagtctgatatctcttaaacaacgatggatagatctatttgtagaagacaacttttaatacatctcttaggagtggtaaacacaaatccaaactaactaaggaaaaggaaactaaccagaaaaaggaaatcttgttaaataccttagagcttgaaaaccaaaaacgcaagggaaagctagaagaacacgtgtatgttcggttttattttaattagggttttgtgtaagggttgaagaagtatttgacacaagttcatatcgtaattaacgcaactgatatatgtgtagtcaatcaatcagacattcacatgtgttaaatatattttaggttttttacttatgaagaggaaaattataaaaacaattaaacgactaacatcattatcatcatgatacgtgtgatgatcaatttgattgtaacatgtgtcaaatattttaatattttactgtattatcttatatggcatattaattggtttttaaattttcgcatgtttccaaatatttaatttacgtttctcataagtcaaaaccatggaataattttgatcaaggaagcatggaatgaagcaaacatcattcaagtttcaccgcaagagcttaaaatttctacttgatgaatattactaagacaggagaagaaactacacaccacaatacttcggtgaggactcttctagccattgagatgatgactcttctagccattgatttcggtatttttgagcttggatcggttttcatactcagcttgtattctgctccaaccttaaggtatttatgggtcgcacaattaagtcgccacatttttaaacgaacagtcttgtcatagtatgtttacatcagcatataaacaaagaagagtgatgacaatttatggactaaagcttgacatatatcaaaagttgtgttaaaacaattaatacctagcatgtactgtataataatacatttgaaaagatggaacggttgaaacactgtgaaatgtttggttggtcgatttcatcacattaagtgcaaaaccaaacgagttataatcaaagttgtaatctagttaaactgaaacctaattaaatcaagccgttaagcaatcaaatcgggtcttacttcatcggggcaaagcttatatgttaaataaaacagacgagacaaaaagagtttccatgtacataggaatatgaaaacaataatagaatgaccttcctagttctatatatcacctcaacttcttactcttggtccacattttcgatgataaaaacctgcatctccaacaagtcaccacgcaataaactgtgaggtatcaacatgaaattctcttgaggggtttcaatactcactttacaaaccctcttcacctccggagattcataagtcacagtgtgtccatccacattgtaggagagttgatatgagaactctcctacttctggagcagatggtgcaatgaagcttacagtcacatacacaccacacggttccctaaaacactgcactgcaagcaatagtttcttctcatgtacccttttaattagtatcttatcgctgatgagcatggaggtcgtaaagaaattggcacatctaaagcgcttaatattccagaaaatattcgtggagtgagtcagtttatagtgagcgtagagatccttgtatgagccagtgtaatcgcagaccgatgaagggcatgagcattgagagaagatgcattctttttcatgagctgactctttcccataaaagaaactcttggtacaaccaaacctgacgtttgggcatgggatcaaaatagattcaagaacactctccattgctctgctgcgactgtgaccaacaggcaaagtacatgcagggcacttattactcagtttgggacagcaagaaccgcaagccaaatgcccattatcacactgaaaaaacaaaatacaaattgtggttaaaaagctgtaactacaccttcaaaattcgagaaaaaatatagatattaaaaactggacaattgaattttcagataacagtattcattggcatcttagaatggttcagttttttagcaattcctaagcaattcttttaaaatttcacattcaacctcacgaagttgtacaaacgtatatttttctttttgactataatttgacattattcaaaaaaaaaaaaaagtgaattttcatataagacacaaaacctggaagataggactcgtcaatgcttcacagcaaataggacaatcgaggatatcaagatctagcagtactatcgccgagcgttgtctcttagccactctctcccctccatcaccttgagatatcaaagcttccgaaattgaagctagcaccatgtcgcgtagaaatcaataggagaaatttgtcctcggctgatgaagggggaagggtttagagggtttgttcaaaactttgatacaaacaaaggtgagaattctcttctcgtgtctgaacaccagtttatttaatctcaaaaaaaaagtatgataattaactcttaaacaagaatgatggagagatctctgtttatagaagacgaattttagaaaacacctcttagagtcttaggaattggaaataaaatgtcaaaaatcccaaacaggaaaaagggaacaaactagaaaaaggaaaaacaatcaaacagaagggaaagctagacttgaagaacacacatgtatgttctgttttttaattagggttttgtgaacctttgtttattaaatatcttgtattgtaaaggttgaagaggtgttaaaatcataaattaacgcgactgacacgtgtaatcaatcaaacagacatcgacatgtataaaaatattttaattttcttttgacattattttgtatacgtcttccgattaaactacataattccttatgaaatttgaaagtatgtcttatgtatgattagagagatttgaggtgcaagtttctgtttgttatatatataagggagacataaacttatgagaagttgggttttgatagaataaaaatccctaagagatttgatgtgagagattatgggtgatcatatgtgacgtagcttcgcaaatttggtgtttgtgtgatcaaacttatttgtgtattggtgtttaccattcgtgttggagagttttggtgattgttggttttgttggtgcgtagaattgaagtctaggttcagggggagtttagctcaggttaggttatcatgattaaatttaggttcatattgaatttagttaagggtagagatttattcttaagacttcatattaatagaacagagcggtgaatcaagagggttgtgcttgctttacgtgtttgtgaataagttgtatttgttttctggttctattgaaatcaaaatcttgacgtggtctcggagagtagaaaaaatcaaatctcgttaacaaattttgtgtctctttactttatgcactttcaagtggtagcaaagcgggttctcgatagagatttagtcttgtttcgggtagatcagggtgaggttcataagatcgttcaggagatcattcatgagatcattaaggaagtaaaacggagctaagaatcgtgcgttatggattcatacaactcatgaatacttggtctaggagagttaatcattacagagatggtgcaatggggtttcatccttggtttcgatggaggcgatccttgaattagtttttgacatgatgtgactcaattaaggggagattggtgttgctaggttgatgtgttattggtgatgaagtcatcgaaactagagttgttgagttcaaatacatagtcaaaaagggagagattgaatatgcaattatctcgttgttctgtactagtcgtcgaaatagtgcaggaagtagtacaagaagtgattcaagaagttgagatgcataaatgatgacgaggagatcgagtacttggattttggacggtgtgttacgtcaagaaaaaaggaaattatatttgctttaagacaaaaggactcatataagtttgcttgaagagaaaaagaaactggcaaaaatgtggctcgagttatacgaatcggttagtcttcttagccaaagaagtgaataaccattgaagaatattttcatttcaatctcgtagatgtacattccataggaaagatacgcattccttttttttcattcatccatgtattaagaaatccaacaattcaaacttctagagatgccacaagagattgtgttaaacatagacagagaaacttaggccatagttcaaattctactgctactaccaccactgctctttgcaaattatatacatacaccaaaaaatagagtctgcacagtttttgagactatccactaaaacactaattttttctattcaacatcctcatcagtaagtaaggttgagccaatcaaactcattctctggcagctctttctccatttctttcactcctctctccacaatcacattgattctccacaacacaatcttacttccccatttcatgcctttgattacatagagtctccaaagcagacccttaacgaatttgtattggctcgtactgtaccattccaattgtttcttgacaatactttccatatctctgaaagctctcctaacaatcccaacttccatttctctttccacaagctctcttatagaatctatcatcttatgtgcaatctccttaacatacttagcataacctgggtcctctatcaagtgaattgctgcacagaaagcacccctaaacaccaagacccagcaaccgttatctaccaacaacactgttggtgggtctaaccttgtgattatctctgggaacagtttctccataacaggaatcacaaaatcgtcatcaacaagcggcattgttaagcactggaagatataaactgctctctgaaactctgttttactcgatgcaatataatctcgtagctcatagcatctctccccttggtagaccaacatctcataggcaacatggttcaccacctgacctaggacttgaaacatagagtatgaaactccttgttcctttaagcaagacatgaacaatggctggagttgtctcatctctgaaatgtctattttcgccttctttgaaatgtgacgagagagtacaacttcaagtcgtctaatagctatctctctggtcctatcttcaagatcagttgacgcaaagattttcaaaagttcaagtgatgataaatactttaaatggtcataccaggcacgatcaaattcttctccatgatcttgagtttcgtgaggttgttgttttgtaaacaacatgttgatcttcgtcacaagctcattggtttgtgttccaacttcactgagttttccgatctggctcacgaacgtcgacacaaaacggcattgtacttcactgtacttatacagattcatgtctcttgacacgaacctttcgaaatcttgaagcactcgtaccaaaaacatttcgtttccattgtccactagcttcttagctgattccacaatattcacaagctgaaatctcaatatcttctttatcacgtcttgtttcattcctgtattgaaaaactgaatccctaatttaacaacagtttgtaaagccaagctccattcttcaactccactttcctcaggattaagcaaaacctccttagctttctctaaaataatcgtcagaaacttcttgatgagttcctcgtagccaggtggcatatctatgaagacgtgaaacgccttgacaggttcttcgctactcgctagcgataagatacaatcaccgagttcgtcccatttgtctttatgcaactccacaacattgtaagctacacaagacacgatctttctaaggatcttgatttcagattcttttatttcttgcattgtcaagaatgcaatcaaaagggttttgatttcatagagagagtcgagagagagtttgcgatttctcaaaccggtgagagtttgggagagttgatagagtgatcggaatctgagaatgccattagaagaagactgatagagcttaagaagctttagggttaagcaacctaggttacaagagacgcagtaatcgtacaaagctcgcgatgttttatattcttcggagtctttacgcttaaagagattatcgacgatcatcgctagttcttcgtggctttcactcacaagaatctctctcgctattaactgacgattcaaagattccgccattgctattcctccagaaaattttcgtatcagaatcttctacaagttgttgtgcgtttttgttacgaagcttaagatgaaccggaattaaccgtatttttagtcgaaatcattcggtttatgactttaattaactccaaaactgaaccgaacgtacattaatcatatttaacgaacgttcagacaaaaacttacactagaagttaagaacaacaaagatctccaccttcttttatcactcgtcgccatcgtcagagatggtaatcttcttaccgcagaaaaggcccatcgtcagaggtagaagtagtcagtgcatcagcgcagatggaacaatcaagagtacaaacatgacaagtctttcttaggtggtgttattcaattatggagttaaagtcaattctttaagctttagatttgttttttgatattgcttttaagaatatgtttgtatgaatttcaaaatctctgcaatatgtcttggattttgattctaatgatttactcataaaactccaaagagctttcatttcaaatcaattaatatacaaagattttacaagtcttttagttttaaataacattggattttaatgaaatatttaaaatcttaattgaataacaccaaactttagaatctattaagcatgatttacaaatatgagttccaataacactagattttaaagctggatttagaatcattagttaaataacagtggattagtgttggatttcaattctattaaaatccattaacgaataacacccccttagtttgttacatcatgtcgaacaagcaacaaaaccaaattttttgagtaaaaacagttttgaaaagattttttttaagatagcaaataatttattattttcaaacttctatactgaatattaaagggagaataaatataatgacctatgtacggggattaataactagaataatggccacaaaggtaagattctcaaactaaatcatgcaactcaccagatcttaaaaacatgcacatttcatatacacctaaacttgttcatgacaagcttttgattcaactttagttctttacataatcacgaatgaacaaagatccggccatggccgatccaaatctgcagattcaagttgtcattaccagagaacaaataggaaggaatcaacatgaaaccatcttcgggatgttcattcgtcactttttgtatgttcttcaccataaatccttgcttcagtaagctatcaacggttatcttcgcaagacggcatgataacctacccactcccggtgtcaaaggtgcaatacagctcacactgacatacacagcatgcaaagccctgaaaacttggactacaatcacatgcccatcgttttcttcctgaagaattgtggtcttcttattgaggtccaagctaatggttaaacgagtattccacacgaacgagatcagatcatctttgtgttcagcacggacgtgattgttgagatccttgtaatacccagtgtagtggcagtcaagtatggggcaagaacaaggggtgaaaacacatacctgctcatgactaaaacggtttccataggaggtactctccttgcacccgtatttggcatttagacacgagactctagatgcttctataaccttctccatagctctgcaacgaacataacctatcggtaatgtacacgacgggcatctgttcctcactttggtgcagcacaaagtacaagccagatgaccattatcacactaaacacagaaccacaaagctattacaaacagatatatgacaataagaacaccaaagaagctgtaagcatcggtgaaactctaaggcgtactaaaggacgtagaaccatacatactacaatgaaagtttctttaaggaacatgattctgaacattcttaaaatacaaacaaaagagcttaacatagtcctacaacagatttccaattgcatcagagctcaaatcctaattcctctaagttcttctatctatctactcaatctacacaagttatggctcctctaagatctatcttcctattgagaactctaacctaaaatcagagtgcttcaatggattgtgtaatcaatgaagaagcaaaacctgaaagataggaatcttcaatggctcgcaacaaataggacaatcaagaacatctggatccaataacgttacagaaagaggcgaatctttgctagaagaagaactctgactatttacaaatttaccaaatcgtctctcctcaatcacaacttcacgatcgctatcatcgctcgttgatcctcgatcctcagattctggtctcattccttgattctgagtttcgtcttcgtcttcttcaccggaacttccggcgtcggaggtctcggcgtcttcttcattttcatcgattgaaggaagtcgttgccttttccgggattggtgattgttgttacttggtccttctccgtcgtctcctccgcaaactgagaatctcgccataagtcagatctaattttcaaagaggataatttaattttgatccagatttaggtcgggatacaaatcaaaccaaaccgatatgaaccggtttcaataacccgaacaggtaattacgattattgaaccgggttttgatactttgtggtatgacaaaactatgattttatgattttgatagataaaagtgattttgaagtttggtcataaacggattatatgaattgtaaataaagtttagtcatgcgtataaaatagcctaatatccactataaaaaggagaaatgacatattattatactgtattcacatgtttttttttgttttggcaaatactgtattcacaatcacatgttaagtattgatgtttggtacaattataaaagtttctaatgttttctgaaaataattttaaaaatcagttttccatacacttctccaaaatttataaaattcttttataagttcagatttttatcaaaaaatgataaattaataacaatttgtaaaaatggcgtgaaaataattttgtacatttatggctttgcagttttgcttctccattttgaaacatacttaaaaaaaaaaaaaaaaaaaaaaaaaaaaaaaaacgtaagaaatagtatagtagaaaaaagatctacataaatttctatgcaaataaaaacaagaaaaagtcagatagatttcatattagtgtggggctaattcacactcaaaaattagtttaaggaaggaggattgccacaatactgtacatatatattgtccaaagaatattatttcttctaatgtgggataattctaatatctccatcaaaataaaaccggtcctgaaattgtaaagactatcggtttaattttttttagcacaattcaatattttagggttttgtgcagagatgtcctacacggagaccgagattagtaaaaagaatttacagtcaatactcaatagttaatggtattggtttgtactagattcgatattttgtgaatgaaaatcgaatataaaaaaactttaacttgccaaattttgcaactttactgtttactcaaaaaaagtgcacattaatactacgaaatcttaaataatacgtaatatgactcttaaacgtatatagttaacgttttcactgtcacatatattaaatttttacgaatttgatggtaacgaaaaacaattatatttcgtattatttttgattttgatgatcaatatacattttggaagtaaagagtaaagttagaaaaagtgacaagttaaatgtttattttttacaaaacccaatattttaattaagaaaacaagatataaacgatggtgggaggtttagtttaaacaccttacctaacgatacctttactttggaaaggtttctaagcgggacataccactagactaatgagagtatgagactatgtactgtacacaaatattgagctgcaaaaatacagtaatctattttgaaactgcaataccaaatttcctttacttaggtttagtagtgcatggctcgactttgaagaaaatacttacaaagggtaaaatatagcagtacaaaacaattgaaatacttactcgtccatgtatgttgcttgatatttttattatctttccattgtcgttttgttattattattgacattgcaaaaaaacagaaaacaaactcattctaatcgttgtccaatcagtatgtcattgaaacaaaccaaaaatgaattatttttttatttaccaatctttttaagttaatcgtcacgaaagaaggagatcaattattaaaggaaaaaatatatatatatatatatagaaggaagatcgatatcacgtggttacgttaggggtggacatgcgggtatgttggtcgggttcggataaaactcgatcgggtatggaatttttggatataaaagtttatgatttagggtaaatctaaattagcggtttatttttagtttagtccaatcatatttgggtatagatttcgaggtctttttttcagaaccgatacccaaattattgggtaaatactcgggttttttggtaaataccgggatttttaaataaaaactttggatttcgagtaaaatttggatattcgaataagatttttgagtattttcaagtctgagtcgaattcggttacaattttttgagtagaaaagtttaaagaaaaattctttcaaatgccttttccatgatgccccttttcaactctacccttttgttttatccattttcatttctaccctctttaaatttttaatgaccattttacctctatttgaaaataattttaggttaataaaatgaaatattaatattttctcgccaaaaaatttcccgccaaaaatttttcgaaaaaaaatttcccgccaaaatttttcgaaaaaatatttttcccatcaaaagtttttttggcaggaaatagatttacaagggattttaaaagggttttaaaagatttacaagggattttaaaagtgttttaaaatatttacaagagattttaaaagggttttaaaatatttacaagggattttaaaagatttacaagagattttaaaagggctttaaaagatttacaaatgattttaaaatatttacagggattttaatgaggtttaaaagatttacaaaggttttttaaagatttttaaaaggtttaaatttgttttaaaacggttttaaaatatttacaagggattttaaagggctttaaaagatttacaaaagtttttaaaatagttcaaagggtttaaaagtgttttaaaagatttgcaaggaggggtttaaaagatttctaagagatttttaaagagtttaaaagagttttaaaagatatacaagagtttttacaagatttttaaagaatttacaagaaaacccttgaaaaactcttgtaaatcttttaaaactcttttaaaatcccttgtaaatattttaaaacccttttaaaatttcttataaatcttttaaaacccttttaaaatctcttgtaaatcttttaaaacccttttaaaatctcttgtaactcttttaaaacccttttaaaatccctcgtaaatctatttccagcaaaaaaaaaatttacaatgatttttaaaagcatttttttggctcagaaaaaaattgttacgaaaaaaaaaattggcgggaaacttttttttttggccggaaaatagtttggcggaaaatttttttttggcggaaaaaataaaatttggcgggaaaatttcagttttcaattacatgttcctactagatgagggtgatttggtcattctgttcaggggaaagagtatttttaaaaatggacaaaataaaaaggtattgttgcaaaagggtagtaaaaaaggggtaattttgcaaatctctaaattcaaaatccaatatggtaaaatctaaaattttggattcgatatcaaatccaatttttcggatactcggttgcagttctttttcccagccctaacgtagcacgtgattcctctgctttggtattttacgtcacaaaggtaaaaacgcaaggaataaccaaaaatgatattttctgtttcttttttgtttaccaatcttttctaacggtaactaaaagaagcagattgattataaataatcaacctcatctacacaaaaaaatattgaatcggaaaaaaatggcgaacatctgcatagcgacgacggcaactaacaatcaggtgattctccgtgactacgtgagtggattccctaaacaatccgacctctacattgccacaaccaccattgacttacgtgtacctcccggatccatggcggttctagtcaagaatctctacttatcttgcgatcctcatagccgcactcgcatggggaagcctgatccctcatcccaggcttccatggctcatgctttcactatcggcaaggtaaaatattcgaatctctagtgaaagtttttcagtatgattattttcattgtgttgtgtgtgttgtagccaatctctgggtttggagtggctaaagcaatagattcagggcacccaaattacaaaacaggagatttactttggggaagagttggttgggaagagtatagtgttattactccaactccttcttcacatttcaagattcatcacaccgatgttccattatctttctacactggacttcttggtatacacttagtaaatgaatctttttttttgttttcattactatacttaaaactatgtgttttcctatgttttgttcttataaggtattccgggtctcactgcgtatgttgggttttacgagatatgttctccgaagaaaggagagactgtatttgtatcagctgcatctggcgcagtaggtcaacttgtgggacagtttgcgaagatggcgggatgctatgtcgttggaagcgctagcagtaaagagaaggtctctatcacttgtttaagagtaatacagttcacattttgatttaggttttctagcaagagagtgtgatatacatgtccacttgattttataggttgatcttctcaagactaagtttgggtatgatgacgctttcaattataaggaagaaaaggatcttagtgctgccctaaagaggtcagtgaataaatacatctttacatgtttcaagggatgtgattcagttgtgggtttgatttttgtattaatcaataattaatatatatatattgtttgtaattttaaaatgaaattatctagtttattcatttcgactgcaataagttgggttttgtaagaaaatatggtgtggttttggtgtttgtggatcgatcaggtgtttcccagaaggaatagacatatactttgagaacgtgggaggcaaaatgttagacgcagtgctccaaaacatgaggacacatggccgaatcgcagcgtgtggaatgatttcacaatacaatctaaaggaaccagaaggtttacataacacagccaccattgtccacaaacgcatccgtgttcaagattttgcagctgtcgaattttttgatagatactccaagtttttggacttcatacttccacacgtaagagaagggaagataacatatgttgaggatatagcccaaggacttgagaatggaccttctgctttgatcggactcttccacggtaagaacgtcgggaaacaacttgtcgaagttgctcgcgagtgagattaaaattaacaaatgttttattaccgtttggttttagttgttgctggaaataagatcggtttgtacaagctgtgacaatgttttgtttgttggtcagaaataaatggactttgtttgtctgtaaagctttgtttctgacatgagatgagccgagttgagctagatatctcactttgacatatctagttacaaccaatgttgaactagatccaaaactagcaataaggtcacgctgatccaatatatcttgtagcccaaattaaacagcttaaaatattataacttttgtttcaaaattcttaaattttattttgtcaaaccaaattttgcattttctaacatacatttgaatcaagataaaaatattgtattttatataatgatatggaaaatatcattatctatgcctagatgaatgctaaattagttctttctccttcctacttttgacatttactgtacatgttaaaaagacaatctcatccttgtatctctctttccttctcctctttgaattctcatctcttttctttttcattctttgtttctccgacaaaccaataccataaatgacctccaatgaaaaccggtcgatagtggctgttgcgactttgattccctgaaggttgagaccaaaaacatgataatagtttcaattccaagtgatcatttcaaaacctgacagaattgtgttatgaggaatttgttagttggggtttaataaggtttattgagcaaaaaggcgaattggtatcgttggtggcaacgaccattgtcgaattcttctgggttagattcgcaacagccactatcgaccggttttaattagcaacgcgtacaaacatgctaacatataaattaacgtaataactaaattatcatagtaaataagtatgaaaacatataagttaccggtaaaaattaaattatcagagtaaataaataggttactttataagttagctgataccagtattttaacacgataaatttgaacatacattgtataaattacacgttaatatatatatatattatccatttatcaaatattttatcatgttcatacaaatattattcggatattagtaaacttatcgcgatattatattatttacgatatgttatcggcatattaacgtatcaaaatgaacagtattatccgtataataagcatattgtagctatggcaattttgtaattaatccaaaaataaaagatatttttggtttatattttctttctctttcatacttacctaatttttaaattatcatgtatataaatctaatttttttggtcaattgggcatataaattaatatagcccatatgatataatttaaacctttattctgatcataaaatcattatcatgatttttaattttttgtcgaagatgtgatagtttagattttactactaattgtttttatagtaaattgtgtgctagacctgtccaaatctaatggaggttcagtgtgaattcaaaagttaatatcgttcttaaatttttagttgaaaattctaatgatattcattctagaaaagtagtatatagataatatgttggatttaaggttatcaaaataaattatctaactcatctcaacacattatctaatgggtttagaattaaatgatttagtggattgacccaattcatggactgaattaaaggatttcgagatttcttttaaattagttgagttaatttatgaactaattgatgggttaaatgattaaaggtgagttaattaatgggttaaatgattaaatgtattgaatcattaaaataataaattaacattaaaacaacaaccatcatcatcatcaccacaaccatcaccatcaccatcacctttatccatcatccatcatcatcaataggcgggatacggattcgtatcttttagtgaaaaaacttgcagattcttattttttgggaaaaaattgtggattcatagtttttggcgagataattatgagttcacatttttggcggtaaaactacttatttatgttctttaaaaggaaaattaacgggtttacctttttggcagaaaaataattacgggtatccgaatttggcagaagtattacgaatttgtgaaaactacggaatacggatttactttttttggcaaaaactatgggtttacttttttagcggacaaactctttgacctatctaaaaatgtttgaattaggaacaaagaaagctacaaaaagttttctattatttcaaaaattttagacatcaacgataggtaaaaatttataaaatacgcagaagtgtacattttttattgaatctaaacacacacacatgatacgatttgtacattattattatgataactacacagcataaataatgacataactagttttgtcattatctccattttcattttcttttaagcacgatcaaatagttcacgtactttatacaccttttgaaattaattgggtacttgtcgagcttcttagctagtggatcgaatagttcattgaccacaccgtctccaaagtgtttttcaataatcgtattgagaatggctcgaaacatggaagtgatgaagtcgttggttaatggcatataatccataggatgacttatctcctccattgtctcgaccgtaaagttttcatttggctcaatgtttgccttgaattcactaatgtgcagaatatatctgggcaaactgaacacttcgatcttgtcctttctcgttaattattccctacaaaaacaagcaaatttaaccaataattgttcagagttagttatttaacattttagagaagattgagcattagagcacaaaataagagccatctatcgctactttctgtaccaaaaggtatatatatatatatatatatatatatatatatatatatatatatatatatattagctttggcaaatgtgatatcaataaagctttaaatcacatcatatagaaaaagaaagttagttggaaacgatcgaggaattgtggatgtggatgggcggaccatcaccaccgtaccgttcattggaaacgattgaggaaaatccattgctgataataaattctcaacagttgtattttttggtttttatacaaaagagatctgactattttttctaagtttacccttagcttgtataagaacataacttgcaataaaataacatgcgttttttttttttttttaacatgcggttattgctatcaagcttgttaggttatgattataagttttgatcaacgaagactatgtgacaagaagtttaaatttattcttagagcgacaaaaacgctataatgtatatatatgatcgtaagacttttccaaatatatataagcattatattgcagattaaatttatttccgtaagtttgacctatatttatacaagttgaagataaaccggaaaaaatagtcatttaatttggaaggtttttgcagaagttcttcgaatatgatatctcattctcgccaagtccaaatagttaaacctactactgttatgacttttggcgttaaacaaatgtaactttcttcgatgtaacatgaattcagaatcacgtgttttgttccctaccatttccataattttgtttcctacgtaaaaatgtttagccaacttaaaaaataataataatctttgtccccgcagatcacttataagttataactgattccaaattcatggtatgacttttggcttttagagttacgctactgtaattaagaatcacgtgttttggtcctaccattctataattttgtttcctacgtacataatatgtttactgtttagccaataatttgtaaacatttttgtccccgcatatcaattatatagctgattccaacctatttttaaatctatttttggtatttttcataaagagtttgctttttcttacaacgattgttccggactttcttactttttttggacggcaagtattgctcccaaaaattgtgataaatgttttctctaaatttgctctaatttattttacattggcatttctaacaatgatttaatccaaaaaaacaattcttgtaaaacaaaacgacggtgttttgtactatcatccatgtggcatcctagtcactttgttgttgccgttttgaattattatctgtatgacatgctgatcaccttggtgatgacagccaagaaatgagacaggaccagtcagttatgttacgtttgtaacctggctggccgagacgtctaagaatctgatgccaaatctgaatattataatcacagtaaatcgaaagatgatcgcgtgtctccgattgctggttgcaaaggaaacaagatatgcctgtagtaatacccatgcgattctttattcttctatgttcgtggcttataaattgaaaatagaaacatttatatccatgttacgtaaaatatcaaactaaaaaagtatgctaataagttatttggggctgatttttcaattggatggtaattacaattgaaataatgaagtagatgaatcaattggagcatgacatgaccgcgcacatggaatgatatttttttttttgacatgactgcgcacatggaatgatatttatacctttagaccatctccatcctttctcatgaagggatcttcgcacaacaaaaatataatatgtaatgattggacgtttttaaattaaagacattatgtctaaatgttatgttttggtggaaacatattggaaagagatgtctttaagttaaagacacttccatatttaaatattaacattttgtaattattatatttttagttttgttaaagatatttttaaaccatccacattgtatattttatttgggtgtcttctcatataaatattattaataaaatatgaatagtgttttaaaatggaagacttatgtctcaatgtgtctcaaaatgtcttctttgagacattttaggaaggatatctttcatttaaagacattattctcattttattaattaaatttatgtgagaaaacatttaaactaaatgtgcaatggatgctcttatagttatactcttattgtatactaaaaaaattctcacacgatgtgtgggtaaacttaatattgtaaattatgtaaatatatttattttgaaattttttaattaataatatttaagataaaaatatttacccacaaaaaattaatagaaatattgtaactaagatatatctattgtaaactaagaatctattaggtcttgtgaattattatctaaaataaaagaatatttgtaattaaattttttctaaaaaaaagaaattgtaaccctttgactattagatatctcagtcgagattttatataaattatagatttcattatatatagcatgtgtataacttgtaaaaatgtcattgttataaacttggtcattggtgatcagaattaatacttatatctttctttgattcaatgtaaattaaaatgttacaatgtaacaacttgaaaaaaaaaattacacatgaatacatatcattgtataaagctcgacgctcattataggctctataccacgccatccatgtcatttctatcgaactgtagtcttgatttagtctttacttgcttcattataaaataagtaagccattaaacatatgaaacataataagcaaaatatgaatacttttggtctaaattcatcagttgaattacttttggtctttttgtgaaatctataagaaaataagaatacttttgaagactaacatacatgcatactacatagaaacatctctcagatctaaacaacatctacaaacttcaaaacattaaaaagaaacagaaattgaaagtaaagaatacaataatagaccttgtgtcttatgatttagatcttctcaatcaatcataatcacctttcacatgtccacctatagcactcaccaaattttattttattttggcaaatattcagttgacatgagttaaatatagaacacaataaaacatatattttaaataagaggaagagaaaattaaatatttaccttttggaggacaactacagcatatacgttttggtgaaggctagaaaaataatagcggctcctgcacttcagcttgttattaccttgacagtttgttattaccttgagatgatctgataactaaactctaaacatgaataatatattacctttgcgattgttaatgtttgtgtgaagccgtgatggcatgaaaaattgaattatctttcattaatatttattcttgattccctcatattgtgtgtcattagctaggaaaaacgccactatttataacttatatgagttaagtagtagggtttaaaaggatcatcatgactttttcatttaatccatacgttgtagctctaatactgacttatgaaaactatacgttagtagattaattggagattagtgaaactatatgttacgaaagttacgttgtgtatttattgtttttgactatattaaatatttctatttgtatgcttgatagtagtatgtttctgtgtcatttttgtgttatcaatttaattttgcctaatcccaacgtcaacttgttaataaatgtgggtactcttacgccatcaaaagcttgcataatttctaatcttaatatatatttttttctcttatcatggtcattaaattttaccaaatttaatgaatttattttattttattgtttagtgagaagaaaataatataactaatcttgttaattgtagatgttaaatggttcaatagagtgaaagtgaagcactattttttaaatggaaaagggtatttcgctatctttagaagtgtgtaaaaccttataaacattcggtaaatttttataaatcttataattttataaaattataaatcttttagatttaatgagaaacggttttttaaatgaaaaactaaaaggacacactgtcaaaattttaagctttttatagtattatatatattttgtatttaaacttgttatgtattaaattgattaaatgttgaaatattagtgtatatattaaatgttatactaataaagttttgtagaaaacaaacatttaagtattgattatgccacatatcgtaaaaggagagtgccaaatgtcatggaaatgctcttatatttctaaattgttttattttattttttcttttgtggccgtgaggacaaagaaatcggaaatggaggaaacatcggagagaaggagaagggtagtttaggttccagttccagctcaaggacacatatctccgatgatgcaacttgggagagcccattctttaaagggtttctcgattacagttgctcagactaagttcaattacttaaacccttccaaagacttagctgattttcagttcatcaccatcccagagagcttaccagcctcggatctgaaaactcttgggccaatttggtttattattaaactcaacaaagagtgtgaaattagcttcaagaagtgtttaggtcagtttttgctgcaacaacaggaagagatcgcatgtgtcatctacgacgagttcatgtactttgctgaagctgcagccaaagagtttaaccttcccaaagttattttcagtaccgaaaatgcgacggcttttgcttgtcgctctgccatgtgcaaactctatgcaaaagatggtatagctccccttacaggtatccatctatattctttattttcttgctttagaatttaaatgatcaaatacaatatttttaagaaaggagaaactctttctgatttttggcatttgtgtttacaatttgaaaatgtattctattaaaaagctgatttgttttggtttcttctcaaatgtgaaattttcttacaaatgttacaatttttaacccttttcgttttaacgcaatgccaaaaatattgatataagaggaaattccttcatcgtgactatggtagtatatgttgatgatatgaatattatcaagatccaaaaatataagcgtttattatttataaatatattatttaaagtggagaaaataatgtattcatctttaaacacttgaaattttaacatgttgatggaaggagaacgcatcaactaaattaaatgtttgaaacaattgtggccataatttgcttttaatatattggttttgcagaaggatgtgggcgagaagaggagctagtgccagagttgcatccccttagatacaaagacctaccaacttcagcatttgcaccagtagaagcctcagtggaagtgtttaaaagttcatgtgagaaagggacagcttcctctatgataatcaacacagtgagttgtctagagatttcatccttggagtggcttcaacaagaacttaagattccgatatatcctataggcccactttacatggtttcttcagctcctcctacgagtctactagacgagaatgagagttgcattgattggctgaacaaacaaaagccaagttctgtcatatacataagcttggggagctttactttgttggaaactaaagaagtgttggaaatggcttccgggttagttagtagtaaccaatacttcttgtgggcgatccgacctggatccatacttggttctgaattatctaatgaagaattgtttagtatgatggaaataccggaccgaggctacattgtgaaatgggctacacagaaacaagtgcttgcacatgcagcggttggagcgttttggagtcattgtggatggaactcgaccctagagagtattggggaaggaattccgattgtaggccttttactactgatcaaaaggtgaatgcaaggtacttggcaaatgtatggagagttggggttcacgtggagggtgagctcgagagagctgtgaaaaggttaatggtggatgaagaagggggagagatgaagataagtgctctcaatttgaaagagaaactgaaagcatctgttttgcctggaggttcttcatacaattcactagatgacttcatcaggactctgtgaaactatttagtacctatgctttggtttgcaaattaatgaaatcatgtactgttttacggtgtgaactatatatattcttggatctcatcaccagcgtctcaagcaactactccgaagtgtataacaacgtacgcaacaatcttcttcatttggaaagaaagaaacaacagtacagtaccggctccacaacagcaccgctacttctcactgttaattgttcaagtaaattgacagatgcataagcgacagaatccttggcagcattcaagaatcttctctcccttttgagtaagtggttatggttattctttctcttctttcgattagcctttttattattttttgggcgtttagacaccatttagcttcgccaagtagtatataaacattcgtacttttttggtatataaattcacatattatcaaaaaaaaaaaaaacctaaagacaaacaacgaaaaaatttaatgaaaaaacacgttagtattagttaagagtttctcaagtgagagattttactaaagaagaaaaacgaaaattctatcaaccgatccaatttaaacccatgaactatattaatgaaagttcatccacagatagagaaaagatacatcaatgaaattaattaatccctcattttataatttcatttcaaggaagaagaagcatttaggggttttttaaggacacgtgggttgtttattttcatttttatttttgaatttagttttaacttttaaatctgtattttttctttgccaaaaaacaaaaaatctgtatttaagagaataaaagactacggtgatacaaaagggaagactgtcttaggtttgaaaaagccttaataatgtgttcttaaaatctattattataggctatttttctttatgttgttaaaataaattggggaatggttatgaaacattgtcaagagatattaaaacttattctttaaagaaaatatacaatagacatattatttgttaagtctataactttatgttattaaacaaaataaattatttgttaagttatagacttaacaaataatatgtctattgtatattttcttttgacaataagttttaatatctcttgtatttctatctcattaaatataaatttttatttaaaacaatatttatcaattaataatttgttgataaaagtttccttcaatagttttaaattattataagaagaaaactatggttagtaattttaaaacattttttatctttttcattatttccttcaaaaattcttaaaatgtcctgcgaatgatttttcacaggaagatggtagaattaattcctacgatattcctacgaaacttctacgaaaattagtttgtaggaaactattgaagtgtataaatcagtaacttctacgaaaacttctattggcgtcgatttaaaaatcccaaaatcgtatagtgtataaatcagtaatttctaaaacttaatatatattgaaaactcatcatttagtgggcgatataatttggaatatacttatcatccttcatcgtttatagttttacacaacataaaattgtaaatggaaaaatgtcaaaaaaatcaccaactttcaaatttgggacgatttaatcttgaacttcacaaaagacaaataattcgtaaagtttttgttgactttctagataaatgacaaagtttttgttgacttgccatttgagtcatgtcgttaaataggttaacaattttttttacgatgttaatgttccgtttatctgctctattaaaacaaaacgacatcgtctacttcaacttccttcttccgttttctcttctttcgatttgatttgggctgagaaacatcgttcgtctcctcgccagatgggattcgaatcgattccgcttctgtaggatttgagataatgaaatcaatttggtgatttagggtttaaatttgtttcaacagacaaaacgacgtcatttatctctacaataaacgacatcgttttgttctaatagagcagataaacggaacattaacatcgtaaaaaaaattgttacaagattttctttacagatttttcttttcggattaaatcatggctagaaatgccagatgtaaaataaattagagcaaatttagagaaaaaaacatttatcacaatttttgggagcaatacttgccgtccaaaaaaaatgaaaaagtccggaacaatcattgtaagaaaaagtaaactctttattaaaaataccaaaaatagatttaaaaataggttggaatgagttaggaatcagctatataattgatatgcggggagaaagatgtttaaaaattatgtacgtaggaaacagaattatagaatggtaggaccaaaacacgtgattcttaattatttggaatgcgtggacaaagatttttttttctaaagttggctaaacatgttttctaaaaaaaattaatgttcaattatattcagaaaatataaacgtttatacagaagaatgtaaactttaattataattttttgaaatcactaaaggctttaatctatggtattgttttgatacaaaccacatttgtatctctcctgcatatttctctttgcccattttctttgttgtgttttcggtttcaaacgttcctgtctatcatccttatgatcttctccacttccgaaagtttgctaaacatgcttacgtaggaaacaaaattatggaaatggtagggccaaaacacgtgattctgaattcattttacatcgaagaaagttacaattgtttaacgccaattgttacaattgtttaacgccaaaagccaaaagtcacaaaagtcataaaagaaagaaactctttaacaaaatgagtttgtaagatacagaaccatttgtttgtttataaactacttattccaagaatataaatagatttcttttatcgaaaagacaactttcaagctaaatttcgagagattggaggaagggaatattatttcctagaagtagtatattatctatatataataccaaatatgtaactacgctcccattagaagattctttttcatttctaatgaaatcaaattctttgtttgcctcattaaaacgaagattttaataccgagattaggcccggctcaaagctaaagctcatgaagctagtgttttagacatcacaaatatatagtaaaagttgagggcatgattcccaatttaacttgtggcatagtggtataactgtactaaaacgtccacgagataactggttcgagttccttctttttggattttttatttaagttttgtttgttagtggacttaaattttttttttgtttaggtatgaaaattgtttggaccggctctaaccgagataattattttaaactataaatggaattatgaagcttgtataccttcctatccgcttcaacttaaaaaatcgcatataatttatgcaaaaaaattggttgaataaatttaacattcattccattaaaaaaatgttcgttttgtaagaaacattcagtttggtttggttttggtgtttgtggatcaatcaggtgtttcccagaagtaatagacatatactttgagaacgtgggaggaaaaatgttagacgcagtgctcgaaaacatgaagacacatgggggcgaatcgcagcatctggaatgatctcacagtttccagtaaaaggaaaggctcgcagagcagaagagtatattatcaaattggatgagttgaacggatacacaaaagaattgggaccacaatatcatataatctaaaggaactagaaggtgcacataaattagccaccattatttacaaacggatagagttcaagattttacagctgtcgaatgctttgacaaatactctcaagtctttgtattttgtgcttccatatgtaagagaaggaaagataacatatgttgaggatatagcccaaggacttgagaatggaccttctgctttgatcggactcttccatggtaagaatgtcgggaacaacttgttgaagttgctcgcgagtgagatttaaattaataaatgttttattaccgtttgttttagttgttgctggaaattagatcggtttgtacaagctgtgacaatgctatgtttgtaggtcagaaataattgtactttgtttgtcctatataagctttgcttctgacatgagctgagcagagttgtgcgagatatcacactttgacatctctaatgataaccaactttgttgaactagactaaatctagcaagatagtcacgctgctgatccaaatcggcttaaaatttcgcaacttgtcttttcatattctcaaattttatgtttgtcaaacaaatttttgaatgtgctaacatacttttgaacaaaaataacaatgatatattcatattatgaaataatttaaaactttatattcgtttccatacaaaataatatcactagaatttgatcataaaaatcattatcagaactttaatatttcgtttatgatgtgatattttatattttactaataatgtatttttgaataaatatgatatggacgttcaatgtgaattcaaaagttactgtctgtcattctaaaattttatttgaaaatggtaacgatatacattccagaaaatagtatatatacataactagtgatatgtaacatatccatcatatgttttttcaaaatactagttaaattttaaatgtgtttaatcataattagtttttttattactacaactctattgatgcattatacttattaaaaaaaatagagaaaataacttttggacaacaattaaaaaacataagcaaaataaaataaaataaaaaataaatgttaggtttaaatttgatatttaaaaaatgtgattattgaatacaaacctttaaaataaaaaagcaaatacaacaatacaaaatactccaaaaaatcaacaattaagttggtgcattatgccatgtacttgagataaaagacgaaaaagttttataaaattgaggaagtgaagtcttgaacacagattacggattactcagatgcgattaatatgagagtggctctaagccactgctgtgttttgttttgtgcaagtcatattgatgtaattatccaaaccaaagagatacacacaagtgtacatttttttaattgaatctaaacacaattcacagacacacacagacacacacacacacacatacacatgacatgatttttacattattattgtcataaactacacaacataaatgatatcatcactagttttgtcattatctcgcttttcactttctcttaagcacgataaaatagttcacatactttttacaccttttgaaatcaattgggtacttgtcgagccttttagcaagtcgactgaatagctcgttgaccacaccttctccaaagtgttcttcgataattgtattgagaatggctcgaaacatggaagtgatgaagtcgttggttaatggcatataatccataggatgacttatctcctccattgtctcgacattaaagttttcattttgttcaatgtttgccttgaattcactaatatgcggaatgtatgtgggtaaactgaacagttcgatcttttccttgcttgttattccctacaaaaaataaacaagcaaaatcacaccaataagtatgaaaaaatttaacatttaagagaagattaagcattagagcacacgataagagccatgtttcgaaaacttagaatataagaataagtgtttgaaaataatatttcttaccaatttagccagatccataagacaatctccaatcatatcgatcacaacaccttgccatgtcaaagcctttgggataccatcgggcaagcattgtcctgaaaggatcatcaatccgcccgagacaagctcttccgcccttgcctcaagaaatcctccaaaatcttttctgaactggatcttgtaagccttggtcacttcatctactaaattattacattgaatatagcttttattcaatgccggagatttcttgtcacaaacatgttggggaacattagaaagccagtggagtgtataggaagtgtgacctatatggaggctattttttggtaatactctaccatggaaggagcctggaactcccacggaaaaatattctttccgggaaaagaacggttgggttcgaaaaagtgtgttaaaatcattgtttggttgatcattgaagcatacttggaactcaagaggagcaccaatataggttttgttttcttttaggcgtttttgtttcactgtatcaatgatattttggacaacatcaaacgtgttaggtccaatggaacaaccaaaatccacaattctcaagatattttcttcagagttacggttgaggaattcaagatcgagtttttctaagatcgcttcgcttgtcctttctttaacgccatcgatcgccactttctgtatcacaagtaatatatattatatatcttagctaatgtgatctcattattgctttaaatcacatcatatatagtaaaagaaacttagtatatgatcgttgtaacatacttgataggaagaattgtggatgtaactgtgcggaccatcaccaccgttcattggaaacgattgaggaaatgttggcatctctctaggtctttcaactacgtccacaaatttcatctctccgtatgttggtcgtcttaatttagataaagtaacacgtaacacattataaatatgcatgctatacgaaaaataaactgagactaaaactaaaagtacaaatcaagaaaatcaccttatcgtagtacgatcaccctgaaaacccacaatgctgacaactggtgaagctatagcaatagctgatgcatgaccccaaaaggcactcaacatagtttagttgcttagaagagaggaagaagtttgtattttcttacgaagagataattatttttgggtttcatgaattgggagaagaactttataaggacaaaaagagagaggagtgcatgtggggataacaaatggggccaaacttaataaccaacattaaattttgtagtttatgttttctcgattaaataaaacatatggagacatgcattctatgacatgagaccatccttattgcaagtctcttactacaaatcttaggtgtaattaatcataataatatgtgaatagtttagaagtgtttcttagataagagataaaagtaggtataagagcttcaaaccattacaaaaactcttagctataatttttttcaataaaacaattcatcaaaatagttaaaagacaaaattaagtctaccattaaggttgctctgatcaagcttgtagtgttaatttttggtgggaactagtgttaatatattttacttgtattatatttttaattcagaaactgtttgggttacataatcttagaatggtgggctagtgttcgggttatcgtcgatattggagttaatatcgtccgtaagactaggtaactggcttcaactatgtgtacattacgagaataacccaacattttgaagactgctctcagaaacaaacaccacgactgttttgaatttgatatggcgtctggtttcggttggggactcacttagggttcaatgggtttggaaaaaattgctttgaaatcgatcactgtggtcaatccgcggtaataccagttcatgatcgtggatgtggaggaaaaagatctcccactctggaaaaggaaaacagcctttataagtgcaagttttcatctcaagatacttggcacttaacacgtcaggtaaatccagttagtaattggtacaaggggtttggttctacaactcgaagtactctttcattacatggattgctattcataaccgtctcacgacgggggacagattgcctaaatggaatgttggagccagtggtaactattttttacgtggggaagaagtagagacgagagatcacttgttcttctcatgctcctactcctcccaagtttggtcagctctagctcatggcatccttgatcataggtttactacaatctggaggtccataattcctctaatctcggctaagtccactacacctatatacactttcacattgaggtattttttcagatcactatttacagtctctggcgggagcgtaatggtcgttgtcatggagagacatcaacaccggcacatacgcttaagagaacgattgataaaaatgtctgcaatcagttgagtaccatggcattaacgtgcacttatgaaggtggaatgcgtttctggttccagaaggttttagaaattatggtttttacgatgcatttattgtaaacattctttttggtgagtattattttacattcatacaaaaacaaaataactcaacatttggtttttcgaaccggttttaattaggagtattttggtctgattttacaaaggtttggataaattactaggtgagtcgtttgttacttgctctcacataatgtgtttgtgctacttggaagacagatccaagtgaaggaatatggggtcagttgagacccacccacaattaaatttaattataatgaaaccataaaaaatagtttatttagcctaacacccataattattgctctacagtttttatttttcattggacgacaattattttgtccaactggggccaaacttgtgagagcaaccacattggtgataaaagtaaaatgtctttagatagattaaaattttaattaataaattgtaaaagcattataaccaataaaaaggtaacaagtaggtagaaaatgtctttaagagatgtctttgtgtcttcttggagacactattctcttctctctcttcacaaatgtctttaatttatattataaaaatagtaaaaacatccattaatatgaccaatggagatgctctgacagtttgatttgatcaaatggggtctaaaactttttaaacataaaacacgtgtcctgcctctagatgattaagaaactttgagaagatctagtcagaaataaaaatacttcgttcttaaaaacaactccattggctttaatgaagagttgatttacagaaaaaatataacagtttcgaatcaattaactttacaaaagaatgtaaaaatataaggtaaatttaacaaatgaacataaatatattaaaataaaattgcataaaaattaaaatgatagtttttttagtttgcatagagcaaacaaaaacgttggaccggtctttggttctttttttttaatgcaatgttaaattaaattaaaaaaaaaattagcgtttttacatcaagaacttttgccgagaaaaaaactatataaacaatttatctatgaattagtttactcatattcttgagtggaaccaaacttggagggccttgtcataccggctatctccacttgcgttgattgctgaaatacaattcctaacttgtttatcgatccgttgagttagtcgagttcccggattaggtggttcaccatgtcttcgcctattcctctcaccccatatggtgtgaaccgctgcttgaaggagatatcgagcaacgaagctctcaattctatcgcgccagtaccctgagactgtagcgagtaaagaagaccagtttgtagagaagcgagattgatggtctttggttcttcacaatttactaaatgactttatcaggatgtatctactcatttcactagtctatgttttcatggaatgaactatatattctagacaagagaaaaacattgagtgttgttttaggagcttcatgttaattaattaaagtattttaattttgttagaaaagatatatatatatatatatatatatatatatatattataaaatatcaaaaaaagttaccctttaacgaaaaatgagtttttaaaatatgaacaattagtattctagctcgtactacgtacgagacaaaaaattgaaatcaaatgcaaagactaaaattgagatatatatatttttctgcatccaaagattgaggttgatagacagccgcatagattcaatcataactaaagggtttgaaaaataaaagtggaaccctctactatctaaaagtcctagttatttttctttttttagataatatttaaaatttgtagagttaattgagaaaaattagttttaaaaaactaacaaattattaacaaacagattgcaatattttgtatttgtttattttgtgcaacaaataattaacaacaaaatgcaaatatttgtatttgtttattaacaacaaaatcgtttaaactacaaataatttgtaatttagaaaacatgagtacaatcaaatcacaattaatatgagttaaatagcaaatgaatgaatattaaaagaaattaagtgctaacctgaatagaatttccatagtcgtttctatagcattcagaagagaaaaaaaaatggatgataatagaaagaaaaatcaaatagagaagaagttgaataaattggagttaaataagggatgaaaaatcggttaataaaacatgttatgattttagcttgatcgtggaggggttagtaggagcaaattaaggaatataggctatttttacactttttctttgcagatcaatattggtttgattttttttttataaagtttttttttctattacgaagcccatacattttggtcaataattagtttcgttttttttgttccttttttctgttttgcacgatctcaattttgttttgaattatttttataaaaattaaattataaaataccattattaattaacgacaaagaaataccatttgatattcatattttgtagggttccatattgtcacgtttcattgtgtagctatagccagatgttcaactttgatgttgaaagtttgcgtgggattgtatcccatcaatccaaaataaatacccataaatttaaacttaacaaaatacacttcaaattattatcaagaaccatacatgtgtttatctttctctacccgtggattcaccatgaaatgttcatctagaaacaacagttagattaactcaaactgcaattacataatttgagtcgtctttatatatctacgtaaaagacaagtgaaaagaacgatactactctcttggttacaactaattcgggtaatcttaaggttctatctacaatgtaaaatgaatcgacgacaataggaacggcaatgcgctgtaatttgtgctccaaacaaattaatttctgcatctaatgaatgtagacattaataacaaataagattcatttaattattttaccaaaaagtaaagaaggtccactgaatcacgtgaaatggaccattccaaattcttcggaaactttaaatacattactagattgtctcactcacctaatagtaaaatagtatagtggctccacaaaattgccgacactgtattttgttttttcttcttaaaagtattcaacaaatacatcacatacaactattttccgaaaaaatataaaaacaaatactaacttttaaatttggaataattatcataaatcataaacaattttaaaaatatttaaactatgtggttggagtcagaattcaaattttaggtgggaccaatgtttggattgaaaattatagttttgaatgtgatgcaaaaaaaaaaaattaattgaaaaattacgactaatatttgatattttttttcttttttaattaaaaaattaaaatttgggttttcagtcacaatcttctcaaaatcgtaactaagagcatttccaaccctactctattttagagtcaaaatgcaaaaattttctccaaccctactctataattgactcaaaatagaaatttctgcagattgactctatatatagagcaactctattctcaactctattttttatttcaacttttttatttatactttagtccctcaaatttaaacttttttatttaatacatataatcattttacaaacaacaattacaacacatagttttataaacttaacaaacaaacaaatactaaatttaatatatttaagaaccaatgtttaaaacaattatcctttaaagttttcacacagaaattaagaaatatatttaatatattttttaattcttttattggttaaaatgttaaaacagttaaaatctatttggaatttttattaaacatttacattaaaaatctaaaacgataatattaaaaaataaaattttagttatagaacaacgattaaattaaaaccgaaggaatatatcgcacgtaaacagaccttttgacaaaccgcaatttttcaaaacgttaatttagttgactttttggttacctcgtatcgcgttacttagaccatctccaagaagacaccaaatcaccaaatttggtgataattttgctccaacgtgacactataatggacggcataattgttttttggactattcacaaaacaccaaaaatttatattattttatttatatttttgatttagttttatatttaaattgttggttttttaattaaagacaagtatactattaatattttttaatgttttcgtttttgtaatatcaaattttaattaagttaatataaaatgataatgtgcacaaacttttgaaataaatatcacattaattaaaatttaaaatacataataaagcttaattaaacatttaaaacataaaattacaacatttaaaccaaaaaaacataaaaacaaaatgcaattagataaatttaaaagacataaagaaattctattatttaaaatttatcgattgtaattttatattaattaaattaaaattaagcagttctaaatttaattagtatttatcaaactattaaaataactattactaagtattagtatttaataatataataatgaaaattttgtttttagtgtgagatttagtgtttatggttggagatagaaaaaaaatctgaacactaaaacactaaatttggtattaaaatttagagttttggtgttcaatggttggaattgctcctatagatttaattgttacctttttaccatcattgtatgcaaatgttgactttttggttttggagattaccaaaagattcatcgtctactagttcttcgtagataacatagtatatctagaaaactcggaacgaaaattttataaaatgtggataaacgtgaagtcctaaagctagcaaagaaatttggtcaaacgttagtttattaatttctctcaaaatattagctatttagtaatattacccaattatataaggatagacaaatgttacttacccaacaatatttcaaatagatgctttgtttctacttgatgcattgttataatgaagtggccgctcctttttttttattttgtcaaacattataatgaaataatgaagtatgtttttggagaacaaaaatgttgtaaaattaccaataatttgggtagtggagttggtgtacactttaggcttatattccattaacttaatgacgttacttgtaatcattgtccaatcagtgacgtcatatatgattttccttttgttaatcttttcaactgttatgactgggtgaaggaaattatcatcttcgtccctaccaaatttttcagcagcgaaaatggcaaacatcagcgtagtgacgacagcgactaacaaccaggtgattctccgtaactacgtgagtggattccctaaagaatccgacctctacatcgccgcaaccaccgttgacttacgtgtacctcccggatccatggcggttctagtcaagaatctctacttatcttgcgatcctttcagccgcattcgcatggaaaaacccgacccttcgtcacctgcttccgtcgctcgcgcttactctatcggcaaggtataaaagaatgtatacattacgaatcttttagctttatagttcacttagatttcattgtgttgtgtttcttgtagccaatctctggatttggagtggctaaagcaatagattcatgtcatccaaattacaaaacaggagatttactttggggaagagttggatgggaagagtatagtgttattactccaactccttcttcacatttcaagattcatcacactgatgttccattatctttctacactggacttcttggtatacactttctcttggtgatttcttgatttggaatgttttttttttttttttttttgaagactttacttattacctattatctgttttcctctgttctgttcttttaaaggtattccgggtctcactgcgtatgttgggttttacgagatatgttctccgaagaaaggagagactgtatttgtatcagctgcttctggtgcagtaggtcaacttgtaggacagtttgcgaagatggcgggatgctatgtcgttggaagtgccagtagtaaagagaaggtttatatcaattattaaagagtaatgcaattcacattttgaatttgtttttttatccagagagggtgatatgtcatcccctctttataggttgatcttctcaagactaagttcgggtatgacgaagctttcaattacaaggaagagcatgatcttagtgctgccctaaagaggtcagtaaattctagggacgtgtatcagttgttccgtttggttcgattttgctcggttatgagaaatgtataccaaaagtagaaaccaaaagtttgtttggctcggttcatttcaacttttggattgggtttagtttggcttgcttttgtaagaaaatttttgtttgatcattttggtgtttttggatctatcaggtgtttcccagaaggaatagacatatactttgagaatgtgggaggtaaaatgttagacgcagtgctcgaaaacatgagaacacatggccgaatcgctgcgtgtggaatgatctcacaatacaatctaaaggagccagaaggtgtacataacttagccagcattgtttacaaacggattcgggttcaaggttttgcagctgtagaattctttgataaatactccaagtttttggactttatacttccatatgtaagagaaggaaagataacatatgtcgaggatatagctcaaggacttgagaatggaccttctgctttgattggactcttccacggtaagaacgtcgggaaacaacttgttgcggttgctcgtgagtgatattgaattaataaatgtggttattatgacaaagctttgtttgtaggtcagaaataattggactattgttaattgtttactatatcgtaatagtccgctggtttaattatgttgtttgtgtgatattatatgcataaaggttctcaaagttcaaaaaatttccatagattcttgtatgtttatttcttcttttttttttttttttttttgacatcagtttagtttttgtatgttatgcaaagaacaaaaactagttctctaataatggaaactgaaacaacaattttaaaaatcggactacttgatgataacttagcaacttttctgggtcatggactcagggatcaacccgattcttccgggtttacaagattatcaagccagttttcgattaatattactgcaggtaaattaatggtatagaatataaaaatattcgagagatagatagagaagttacttgttagataagtgatttgttcacatatttgtattctcttttttcgtcaagacacatatttcatatttgtattctctacattaaaaaaacgaattttcatatctttatactttaaatttattgctaacatgtatacaagaatagtaatgttaatcaccaaaacttttgccaaatctccaactccaccaaaaaccataaccgctcttttggccttgtacaaatatagtgatgtaatccaaaccatagactataaatctaaaaatgtttgaaaagaaagcttcaagattttttctttgtttccaaatttttagacatcaaggataggtaagaatttatgaaacacgcacaattgaccatttttattgaatttaaacatacacacacacacacaataattgacatgatttatttttatgatgaaacaacattgaggatgacataactagttttgtcattatctccatttttattttcttttaagcacgataaaataattcacatactttttacaccttttgaaatcaattgggtacttgttgagcttcttagcaaatcgatcgaatagctcattgaccacaccatctccaaagtgttcttcaataatcgtattgagaatggctcgaaacatggaagtgatgaagtcgttggttagtggcttataatccataggatgacttatcttctccattgtctcgatactaaagttttcatttcgctctatttctgccttgaattcactaatatgcggaatatatatgggcaaactgaacagttcgatcttttccttggtcgtaattccctacaaagaataaagcaagcaaacggaagataaagcattgaagcacaaaatatgatgcatgtttggaaaacttagaatataagaaaaaagtcatggaaataaattccttacctgtttagccatatccataagacaatctccaatcatatcgatcacaaccccttgccatgtcaaagccttagggacaccatcgggcaagcattgtcctgataggatcatcaatccgcccgaaacaagctcttcagctcttgccccaagaaaatctcccatgtcctttttaaactggacccggtaagcttcagtcacttcctctactaaattattacattgaatgtagcttttattcaatgccggagatttcttgtcgcaaacatgttggggaactgtagaaagccagtggagcgcataggtaatgtgaccgatatggaggctattttttggtaatactctaccatggaaagatcctggaactccaaccgataaatatgcttgtttggaagagataggttgggttctaaaaagtgtgttaaaatcattgtttggttgatcattgaagcaaacttggaactcgagaggagcaccaatataggcattgttttcttttaggtttttttgcttcaccgtatcgataatattttggactacttcgaacgtgttgggtccaatagaacaaccaaaatccgcaattcttaagatattttcatcagaattacggttcaagagttcgagatcgaggttttttaggatggcttcacttgtcttttctttagcgccatctatcgctactttctatatcacaagtgatacaaacaatcttagctatagtatcgtaattagctttcaaatcatataatatatagaaagagatatttgttatatcattgttacttacttgataagaggaattgtggatgtaactgtgcggaccatcaccaccgttcataggaaacgattgaggaaatgttggcatttctctttgtttttcaacgacccccacgtgtttcatctctccatatgtttgtcgccttaattaaaattaacatgtaaagaaaaagatgaatatgcatatgcctgctaaacaataaactgaaaatgacattgaaaaaaaaagaaagagagagagagggagagtacaatattcacataatcccaaaagtataaatcaagaaaataacctgatgcccacaatgctgactactggtgaagctatagcaatagctgacgcatgacccaaaaaggcactcaacattgtttcttagaggcgagagaaaacaaactttaggagaattggttattgtttttgggtatgaagaattggaagacaagaagtttatataaggactaagagagggaagcgtgggggataaaaaactggggccacctcgtaatttatattaacgtctagtgttaataatctatatataactcattttacaatttctattaacatatagtgttaattttctgttggagtaattttctcttaagatactttagttcaaggatatcctccacataggttcatacacgaactacattactagtttttagaagaggttcggacgatccgaaagctaaaaattgtagaattttctttgacaggattagtagttctataagaaggttttacgttttttcatttagcataatcgacatccaatacatatctagcttcctgcaaaaaaattagatgcattaaaccaaaaccgggaccaagaagcacttataaactttttctaaacctcctagacaaaagctttataaaatatgcttcgcgggacgagtatgatcagcttgactgctctacatatactccataattatagtgtcttcggggaaacataagagatatatttgggtgtgattggatgcattagttgaaataattttaccgaaccagttttaactataactcgcttggattggagacctttgttcatcagccttcgatgttctcgatgcagtttttgctttatagagtgttgatggcagatctcaaatcaataagaaataatgcatctatccaagcgagttagttttgaagtctcaattgagatttcatttgttggttggaaacaattatgtttccggcaatttcctccaatcatggagacgttttatttatggtttgtctttcgatgcattagcttcactcaagatgaatctgttataaagtttgtttccgctagtctcattcaccgacgataactttccgtttccaaggacacggtccgatgatgatgtcttttctgtcctccgatcagactattcatgttatatgagaaagaaaaccatggtcactaacccacaatgatgccaaggatgttacaacaaaaaacatgatccttgaactattttaagcagcatatctctgtgtttgtttaattaaatttatgcgaaaaacatttgaaagtttcatctataaaatgttaacattttacaagtttatgaagagagtacttaacatattttatgtgttgcttgtaaggcttctgtgtggaaagtaagattacttccacctattcatcaaaattgtgttcaattttatttatttgattcaatggttatatttgaatgattttatgtaacatttttataatataatataatataattgatttgctgttaaaaagatatatatttaaaataccaaaaaatagcataacagattactctattaaataccaaaagttaaaatatttacgctaaactcacattttcttttctctcaattcctctttctcattcactgtaagtttagctgttcagctctttctcaccaatcaaaactatacttttcgtaaagatttatttatttgttgtgtaaagattatatttcccccaatggaaataaattcgtggcagaaaaaattaaaagaaaaaaaaaaggaaacaacaaatactcatgtgacgcctaaaatcgcctattatcgggtattacactattactcttcaatgatatttaatgataaactattcctatacttttattaaatgtatttgtccattatggtgtcaagattcactgtgaacttttttatagtatcatctactgaaagtgacgatagcaaaatattattgcacataaaattattagttaggtagtgaatcaccaccaatagattgaaaaaaagttcaataaaattaaattcctggatgttaccaaaatcatgtgaatctcgaggatataattgtcatactccctctattatttagggttagacactcatacgtcatacatattatcctacggtccactattaaaaaatattaaattttgtataagaaaagtgttttaaaacaatataatcagcgaaactgagcgaatataaatttaagacaagaatgtactatatatgatacaatatctgcacatatctatacttttcttttagtgagaatttttaaaatgatatttgggtaaatacttcgacaactagattttaatatgtggtatactgcgggactatttagttcttttaagaataaaaatttaatttgtttagtcgattaaaaatgtatatgagttaatgttttatattttatgaatattcaactcttatatctgtatattatttagtatacaattactatgtttgatttttactgtttaaaaatataagaacaataacgtacagttcattaagttaaaatctagattataactaaataatttaaatttaaattatatttattttattaatataatttattttctttagtatttaagatattataattatattttgattgttatatctaagatttcaccagtggtccaccgtctcgtattagtatcgactcaaactcgtcctatcatctaatctcgttcagtaaaactaaacaaatctaatggattttactcgtggtataccgtctcgtattactgtcgatccctaccatctaaccctgttcagtgaaattaaacattttatttttgttatttttattttaataaaattataattgaaaagatatataattcaaattaatttaaaatttttcattcaaatggttatttaattgttataaaatccatgcattataatattctaaactccatcccaccatctataccagttcgataaaattaaacattatttttttcttttcttgttctaataatatttttattaaaagatttctaatttaaatcaatttaaaagttttattttgaaatggttatttaattttatagattttatatattatatatattttaaacgtttgttttgttaaacattttaaatattttataaactttaaataactataatatttatctttaataaagtataatattaataaagttataagatttttcctttttaaattcattgcagtgatgtattggttgaacaaaatccttagaataataaaagacaagtcaaaagtgttcaatacaatttaaattcttggctgtcagcacatgataccaaaatcgtgattctcatggatactttttttgtcgagttcttgatattgtacataataatatagtgtaaccagttataaattacatttaatcagaaatttttaaatcgtgattctcgtggatacatttttgtcgtgttcttgatattatacataataatatagtataaccagttataaattaacatttaatcatacagctctaaaatttttaaatcgtttcttttccggtctccactttgtacgtggaaggttaagaatatttgttctccaaacgtttactcgaatattgaaaacctaatagattggatctcgcacaacatatccactctatttgatcaaaaactatctattgataattttttccaagaaagttcatactattatgatcaaagtggtgaaggcttaaaattaataatgcctcgaatcgcgtctacttctgcatctacgaaggcattgaacttcatgtgcttgtatatgttggtgatttggcgatgacatggaaccactcttagccattcgcaccttcaaaagctatttcagtatgtattttcacttaacgatcttgaaaattgaaaacacaacgaagttgcaagaagggaattttcagaaccaacaaagggacacgttggatagtattaatgaagcatggctattaggaagtaatcgtgtggctttttccaattgaaaactcgtaattatactacagttttcgcagaaattatcaagaacattccgatagattccgctaacgtcatttctttagtcatatttagctgttactatttaattcctataactaaatttgttttaactttcaagtatatatggttgatatacaccctcaaagattttaattgtagggtgaattacttccaaatttttatcctatttaatgttttgatcaaaaaattatctatttctcgcgatgttattaattcttttgtttcaataattaataatcattgattgatttttatcaaacaaaaataaccaaagaaaatgtaatgttttgcttttaaaaaaagtaaaactaatccatcacgttcttcgttttatatcaatagatattagtatattaaatatatacacagaaagtgatgtattagttaaatagattccttaaatataatttccctataaaagtaccaataatatgaaaagagaaaatagttcaatacaatccaatttcttgggtgttagctcacgttacaactactgtgattctcgtggataccttttgaaaaatatttgggtttatatttaggaattgatccttttatttatcccattttattttatgtgattaaaatatgctacataataaaatataacaaaaacttatttagttataaaatttaaatcctaaccgcgtttctataatcctaaactgatatataattttatttagttacaaaatctaaactacattccattgtaaactcaaaacggcattaactcgtttaattgtaaaatctaaactttaaccgttctttttaattttaaactaacatttaacattattaaactttaaaattttaaacatgtttataaactaaccgatatttgacttgtttaattgtaaaaaacccaaatatttttcatactttttgtcatatacgttcttaattttgtacataaaatacattatatgaaaactaattaaaaataaatactcaacgatacaaatcaaaagagttaaaagcttttatttaaagactatgtacgtagaagtttaataatattagttcttcaattaaataatttgatcaaaatttcaagttataatttgagaatttatacttagcgaaaagaaattgaacttttctaatacattttttttacgtgtcgattacttgtcaacaagaaaacttattctgcaaaataaatctatactatagaaaagtcaaagctataagcttcttagactgttcacgtgggatttgtaaccaccaatctacttagcttttcgagggattgaagagtacatcccgaacaataatgggatcagctatgtcgtacggatgggtacaataatcgactgatgagcgagaagaattcttctcatcagaaggtgagttagatctctcggtcgaggaatcaagatttttcaacggggaagaagggttcataattatagaaataattgagaagaagaggaagaaattttgttcgtaaagagagagtaagatcaagataaaagctaaaacagagaaaataagaagcgtttataccttctacaaatttgtggttgaggatgaaactgcctcagagtcgtgtgaggagtggaagaattttttccgctttaataataaataaaggaatcaagtcataaatgtgacatgcgtcatgcgtttaaacatggaaagtcctgaaattaagggaaatgatggttcaaaaggcagaaaattaaagatcatgttgcacaatcttcataactaaagaaagcaagtcccccgaactggttcgtcaggtcagaggacttggggggctaattattgatgtcggatccggaacccaaagtttttggatccactcgaagattaccacataagcgtaaaatcaacaagagtgcgagtcaacgaaaaataaatgccgaactgagataaagctccaactctacgaagtgaggagtttggtaaagggagcaacatctcgaaataagataatgggccaagctt

SEQ ID NO: 785 - DNA, 87841 bp, Arabidopsis thaliana
gatcccctatctccttatctctttgtaatctgtacagagatgttggtaaagatgctccaggtggcagagcaaaagcagctcataactggcctcaaagttgcaaggggggctcctcctatctctcatctcctctttgcagatgacagtatgttttactgtaaggaaaacaatgaagagcttggtcagattataaggatcattgaggagtataacttagcctcaggccaacgtgttaattaccttaaatcgagtgtttattttggaaagcacatcccggaggaaaggagagctcttgtgaaagaaaagctgggaattaagaaagagggaggagagggagtgtatttggccttgcctgaatcgtttcaggggtcaaaagtatctattttaagctatttaaaggaacgcctgagcaagaaggtattgggatgacagtcaagattcctttcccccgtgggaaagagacactccttaaagttgtggcaatggccctccccacctatactatgtcgtgctttaaaatcctaaaaacagtgtgtcaacaaatagagtcagttatggcagagttttggtggaagaacaagcggaacggtagaggcatgcattggaaagcttggagccatctcagcaggcctaaagctgtgggagggctgggatttaaagagatcgaagccttcaacatagctcttttggggaagcagctttggaggatgcttactgaaaaagattctttaatggcgaaggggttcaaaagtaggtattttagtaaatctgatcctcttaatgctcccttaggttcgcgaccatcctttgcctggaaaagttttcatgaagcacaagtgcttattagacaaggtgcaagggcagtggttgaagatggagtctctgtgaatatctggacggatccttggatcgattctaaaccggcaaaggctatccaaatgatgaaaagaattcctctggacagtcaacaagcggctagtgctattaactgtgttaaagacgtaatgtcgttggatggacgaggatggaataacactctagtgaaaatgctgtttacagaggaggatcagaggaaaatcttgggtctccggccagggggtaaggatacaaaggacaggtacgcttgggactttagtcgctccggtcactactcggtgaaatcaggttattgggtcatggctgagattatcaataaaaggagtgcacctcaagaagtccttcaaccaagcttggaaccaattttccaacagatttggcggttagaggttccacctaaaattcatcattttctgtggaaatgtttgagtaactgtctttctgttgctggaaaccttgcccacagacacctggctagagataagggctgcgttagatgcccattcctaggagagacagttaatcatttgctttttaaatgtacctttgcccggcttatttgggcaatctctcccttcccagctcctccagggggtgaatgggttgactctctatattcaaacatgtctcatgtcctcatgtgcaatcagtctcagcctcacaaggctgactctcatgagatggtaccctagattctttggagattgtggaaaaacaggaatgatctagtgttcaaaggaatagaattctcagccaaacaggtgatccttaaggctacagaagatttggaggaatggaataaccgcaaggaaccgcagccacaaaaagttctccctcaaccgccaggcatgcaatgcaggagatggcaacccccaagctacggttgggtgaaatgcaacacagatggtgcctgggttgatgtagctccgaactgtggcgttggatgggtgctgagaaaccagtttggagaggtgttgtggatggggctaagggccttaccaagagtgcagtcgatgctggaaactgagcttgaagccctgagatgggcaatcctttcattgtccagattcaattataaaagagtgatctttgagtcggattctcagttcttagtgtctttgatcaagaataatatagaccatccaagcctagcttcaaggatccaagacattaggaatctcctccatcactttgatgaagtcaggtttcaattcatatggcgtgaaggaaacagagtggccgatagaattgcaagggaatctctttctttagtgaattatgatctcattttgtattctgttatgccagactggatcaaacacattgtggttttagaatccgtgtaatcgaacgttggataatataaagttgttgttgagccaaaaaaaaaaaaaaaaaaaaaaaattcagagcctgtctacaacgtacatatatgtacgacatacgttgaacaagctaatcctgtgatacatgacgaacgacactacctatagtactcttagtactggaacctcccatagacaattaacaatcaacaactaaaaaacgaatcccatacttcatgtaaaaggtttaaaaggtcaaggagtttccactatatatcttcttgtagccaaaagttcaagtcaataagacatgtttttataatgattaagcgcataacagtaacaaggggttaaaaaaatagaaaatgcaaaaaaatgaaataaacaaatgcagaaactacaaagaagacgcgcttgaatcgacgacataaaagaagacaaaaaaattcgacatgacccatacaatccattaaccaaaaaaaaaaagaatgaaaaggaaagttttttcataggtttcatcaactcttagtaaagagagagaatggatctgagatcaattaagccactaattgattcatctgagatcaattaagctacttcttagagcgagtctaatccttacttctcttcgtggagtcaacaaattttgttgttgttccataacgcatcttcaaatttcaattgtttttttcattcataaacttgaatcacaggcttggtcttggaatcattggtcaaaagagagaggctacaactttaaaaggtaaaccaaatatgaaaagaattgatgttgatcttaagcttatcttgttccctttgctgctcttgtttagtgtctcggtttttgcttaggggagtctgtagatcgagtccaatacatcttcttggcatgagcttagtcgatgcattgaatcaatctcgaatagtttatgcttctgtttttaaacttttttttttctttttgcatgaaaccatgtttttaggatttcttttatgcaatgttttgaaacccgatccggacgatgaaccggactaccttttgggtcaccaggtcatcgggtcaactggattagaccacgaattaattagttaaaatttatttaataaatttaatattaatagaaattttagagtattttataaaaaaaaaaatttagtattataaatataaaacaaaaataatcatatcatatttaatcaaatataaaattatattatgtttaacaaaatataaaatcatttacacccaaatatatatagaaaaaatcaaacaataataataaagtggttaaaaatttgaaatccaactaaatgtctaacaccgtaacaaatatattagaagatcatcaatgacagaaataaattaataaaacattgtgaattcaaacaactaatctcggttgtctctctcaccattcaattcaattttaaggcggtattgtaaagtcttcaccaaaatctaaaacatcaaatgaatttaagaactgaaaaaacttttaaaaataattgaataaattctaaaatctcatattttattataaaatcaagagaactttttaaaacccacacccggccggttcaaccggttcaccgggtcacgagttaattgcgagtttttgtgggttttttcggttttgaacttgttgggttttagcactaaacccaaaccggaaaagtgttcgggtcacgggttaaccggtcggaccggacggttcgggtcgggcgtgaaaacactgcttttatgtaaaaaataaactttcattttcactaatgattttttttcctattaaatcaaaacccaagaattaatatatgaaaataattaggggacgcaaaaaaatttaaaagaataaggacaacgatgtaataaatgatttttataataaatgatgtttttatataaaagaggtagattaaatgagattttatgatttcgtttgtaaaaaccttaaactacaaccaatatgaaatagagggagtatgttttactcggtagataggttactattcagtacatcagattcatgtcgcattaattggattacaaagatgtttgttgcttttataaagggtagtcatatatcttccttttgtctatgactttataacatttcaaaattttaatcctgaataggccttcaataacgttggaccggctctaagaggacaaagggtagtcttatatcttcagtcttctacaagccaatggttgaagggttctcattgtcattgatgttcctccttgtttcacatttctttgtctcaggtacggtcacttccacataagtataatttttggtttagtcgctatttgatgaattttctttcttattttaaaattttgttttaatggcaggagtaatgtcgagaaactttactatagagaacaaatgcgattacactgtctggccgggattcctaaccatgactactgcggtttcgctccccaccaacggcttctccctcaagaaaggggagtcacgtgtcatcaatgtgccaccgtcatggtcaggtcgtttgtggggtagatcgttctgctccaccagctcaacagggaatttctcatgtgccacgggagactgcggctccggaaaaatcgagtgctccgattccggagcaaggcctcctacgacgctaattgattttacccttgacgctaccgacggtcaagacttctacgatgtaagcgtcgtggatggttacaaccttccgttggttgtggtcccacaacgtctagggagtggccggacatgtagcaacgttggttgtgtggttaacttgaacaagacttgtccgtcggagcttaaagtgatgggaagctctaacaaggaacatcccattgcttgcatgaacgcttgtcagaaattcgggttgccggagttctgctgctacggtgagtacggtaaacctgcaaaatgtcaaccgacgctttactctacgaatttcaagaacgagtgtccactcgcttatagctatgcttatgacaatgaaaacaacaccttcagatgctcaaactcacctaactatgtcatcaccttttgcccgtaagtcctcgtatataactctcctctagtaactttctatttcgtcaaagacatcctacagctttaattttgaccatttactctagttatattttctagaatgtggtaatgtaaataatcaataattgcaatgcgtgtggggattatagctgagatttaccctaatgtctgattagctagcgtgtgcctattgatttttaaaacattggtctttcggacaaactatgaaactaatatgtaataatgtcacttgttggatagcaacgacataagttcaatgtctcaaccatccaaggaaactaatggaggaacgaaacgtaagtttattttatttactttttcataccttatgttattttaatttttgcttaaaagactttttgtttgaatgttcttacagaaaagtcatcatggaagttaaaactcatagttggtaccatatctcgctcaatccatagtacttttgtatacgaaaaacacctcgtttttaattcttcttaattatcttattccaggagtctcagcagctttgaccctgatgatcttaattgtggtcgtaataatagtgagaacaaagaatatgagaaatagtgagtggaatgatcagaacgttgaagcagttgcaatgttgaaacgatacagttatacaagagtcaagaagatgacaaactcatttgcgcatgttctcggtaaaggaggatttggaactgtctacaaaggaaagttagccgatagcggtcgggatgtcgcagttaagatcttgaaggtgtcagagggtaatggagaagagttcattaatgaagtagcaagcatgagtagaacatctcatgtcaatattgtttctctgcttggattctgttatgaaaagaacaagagagctataatctacgagttcatgccgaatgggtccctcgacaagtatatttctgcgaatatgtcaacaaagatggaatgggaaagattatacgacgttgcggtaggtatctctcgcggcctagagtatttacacaatcggtgtgtcacgaggattgtccatttcgacataaagccgcagaacatactgatggacgaaaatctttgtcctaagatttcagattttggtcttgctaaactctgcaaaaataaggagagcatcatatcaatgctacacatgagagggacctttggatacattgcccctgaaatgttttccaagaattttggagcagtttcgcataagtcagatgtttatagttatgggatggtagttcttgagatgattggagcaaagaatatagaaaaggttgaatattctggatctaacaatggttcaatgtactttccagaatgggtctataaagattttgagaagggagaaatcacaaggatttttggagatagtataactgatgaagaagagaaaattgcaaagaaattggtattggttgctctatggtgtatacagatgaatccatcagaccgtccaccaatgatcaaagtcattgagatgttagaggggaatctagaggctcttcaagtaccacctaatcctctcttgttttcacccgaggaaacggttccagacactcttgaagatagtgatgacacttcaaccttctttaatccaagtcattttgaaagaggtactctcttagatagtgaagatgttttacaacatgggtcaaggtcctcctaaactaaagtcaaccggagagcggatctctttaaacttgtcatgatctttagctatttctcgattagtttttaataacttctgacttaatagtgtgtttctatgcttattagatgatgtttactgacgcaggcactcaatattgttggttaatgaagactattttctgttgtttttctcttggaaagagagaaacgttaatataaactccccaaaacaatgttaagatatcaataaaattcttttgtgtttcttgataaaatcttacgataggcgttcaattgtttatagtaacttttgcgccaaatttaatgttcttgttcgttaaccccaaaaaaatttaaccgtttagcaaagagaaaaaggaaaattctaaccatttggagatatatatcaaattttgtgggattgagtaatgttcagggtgtaggtctccttgatcaagtggttgaccacatgttaataattatttggataattgcatatatgccattttcacgatttacgtatatgagtgtatacaacttaattaatttctaactatttttttcttttttgtaccaaacactatttatattaagttatcagaaagagattttcctataaagaaagccattcaggaaccgatttgcttagatgggaaaaaaagacattttcgtgcccgagttttcttagctaaattatctgctcgagtattaagactacgaggaagaaatctaatactaaatgaagggaaaaaacaaattagagaccgaaaaaagccaattccgctgcaaataaaaatttggataaactaaattcttgattcttgttgttctgtttttgattgaaagtcttttggcctgattctttacttttggacattctcttgtttattgcctttcttattcagttgaacaaaaaacatactattatttttaagatactttttagcctcagaaaaatccaatttattgtacttctttcttccttgtcaaggtttttctctcggaaaattcctcctaatcagaagacaaattaaagggtagttctagtttctagttcttccttttgctagagttctttcaaattatttatcgtatactgtcttcttcgagccaatggttaaagggttgttattgatgttcttccttgtttcacttttattcgtctcacgtactgtcgtttccataatttcagagaacatttttggtttagtcccggcgctaagaacatagttggtgatattttcttaattgttaattgttctaaccgcaggagtaacgtcaagaaactttaatatagagaacaaatgcgattatactgtctggccgggagttctaagcgtgacggtttggctctcaaccaccggcttcgaactcaagaaaggacagtcgcgtgtcatcaacgtgccgttgtcatggactggtcgtttttggggtaggtctctctgctccaccagctcaacagggaacttcttctgcgctacgggagactgcgggtctggaaaaatcgagtgctctgtaagagggtatagagatcaacacaacatagagaatagcttataactatattcttattgataacaaactgattacaagtgttatctcggagattacttgatctattctactcaaaagatcaaacccgactaagaatacctaagcctaattctcttctctgtttcttatcactctcacgtgaagacaaagagaactacacactcaccttcaagcttttgcaatgctctgaagtttacaatcgtataacagtattctagagtgctcaaagaactcctcaccctaagttctagaatacttatacctactctccagaaccttaaacctaggatctccgagaatctcgttttaaggaatctttcttgttttctccaagcttattccttcctaaatcttcgagacgatatcttccatatcttctcggtgattcttgtctctgacaccacgccaagtcagcttccatccttggctcttcacatcatccgccttagcttgccacgtctgcaattcaagcggctgatgaaactcaatgcagcttcctgaaatccatcaacgctctgatcgccatcagctgattgattgaactctgcatcttcactctggaggcgcagcgcctccaacgactctagccgatcgagtttaccctcaacagtttcaacggtcaagacttctatgatataagcctcgtagacggttacaaccttccgttagtggttagtggtggtcccacaactaacgtagacttgccaggcatgcgttagcatcggttgtgtggtcaatctgaccaagacgtgtctgtcggagcttcaggttatgggaagctccagcgaggaagagccaatcgcttgcatgaacgcttgtcagaaattcaaagcagtggagttctgaaatactaaataaaacaaacaatattaacaaaacaaatacaacttaaaattgtttttttaaatgcatctcaattattttataatatttaaactttatactaaaaataaaattttagaattaacggatttggatcgataataatatgaggcagtatactattgatgaaatcttaaaattagcaataaaaatataaatatacaatgttaaacctaaacaaaataaacaatattaacaaaaaaatataacttaaactttttttttaagaaagacatctcgattcttttatcagaagtttaaatattataaacatttgaactttatactaaggatgaaatccttaaatttacggttagatcgatattaatacatgattgtatactacgggtgatattaacaatcaaaataatatacaaccttaaacactatacaaaataaacaatattaaccaaacaaatacaacttaaaattttaaaattttagttataaaatatcgtctcgtgctgtagcatacatttaaatttaacaaaataatagcatatatttatagatcatcttaaaaacaaaaaaaaaaaatttttaataaaaaataggcccgcactatactgatggttaatatctaatattagagaaactcgtaacaaaagaaaatactttaatcaaaattcaagaaaactagttaaccaaaagactaagcaaatcctggaaaaaacaaataagtttgaacatatctattattaaaactgtctttcttagaccatttgattatacttgttgcaagatcgaagacaccccaatttgtagcagcaggagaataatatggtggccatacgtcactgacgaaacatattgaaccactcttgattccatcaccaacatcttgaaccggtgctcttatcgtaaccccatgaccaaagatcaacatctcatcatctccaatagattctactctttcccatattttactcgcaagattcatcttaaagatgtaaaataaaactttctcttttgatctttgtgctaatacactcaagataatcaaaacgtctcctgatttctgaatcgctattctcctcttattaatgtattccccttttttggttaagtatcgaaacggatgttcccaatacgggtttttatcgattacttctatgggatcatttccagagaaatcaacaactttgatgtgactcttagtaatgtagatataaagcttgctgtttctgtaagccaaatccaaaaaacttaaattcaagctttccatattccaatggttattccagttccaccacgaatcatctcctttcttgtatgagaacaagtaacgatagttaaaaatccaagcaaccacaaaatctcctgttctctcgtctatccacagaacagctctactttcccgtgtgatggttatttttgacacggtaaccttacgagaaggttcgacaaagtgtccccagttgaatccatgctcgtggttttgctcgaatctcacttttccaccgcgaattgaagactccattgatggaagatcaattcttttgctcgttaacaggttaaaaatgtagaaaccgagatgagaatctaccatcaagagccagtttccggagctagccatataatagctgtcgttggagagtccaacgtttgttcctttgtaaatcttgtcttctccgggtttgaacaacatcaatgaatcttttacgtacatgatccgccatggacaaagaggcttcacgcatgttttccaatttgaataccaatctgagcaaacagtttttgctcggtgaaaatcagtagagctcaagctttcgaggatcgaccgtaagatatcgggacaaagtttggaccaatcgtgatttacaaacacttttaggcttatctcttctctcatcgaatcgtttggcgtatacatgttgcacttacttgccgagcactctaacttggttaaagatggaaaaaaaaaaaaaaaaaaaaaagtatcgaggtttagtttaattctcaaggtcttctttcattttatctccaaatcattatttagttttataacaaaataattatatcattatttaatttcaatagatttagctatgtaaatcattatttttaaaatctatactatatattcaagtaaggttctctaaatattcatattttcacaagatgacacatgacatctctctttgtgatatggatcttcttccattttatcataaaatcattatttactttttaacaaaaaatatcattatttaatttcactagatttaattatgtatatgagtatatcattattttaaaaacatatctgagagatacttttatcctaatgtgtttatcatttaaataaaaagttaaaattacgttactttactctaaacttaaaatatgtaagattctaattaccaaaaaaagatgtataagattctcataataatttatttaatatttaatagtaccctaaaacaccattagcatagtcagataataatgaaacttcaaacatctctaacccaacccagttggaaagaggtaccctctcacctagtgaagatgctttacacttttccaaagaagtgattcaacaaactgttgaagtgagtcaacataggtcaaggtcctcctaaactaaagtcaacacaaaagtggatctcttaaaatttaccaattaagatcttgaggtattcttcggatttgattaattgtgtttatataatctaagcttattaaatgatatttattgacgcaaacactcacatcattgcattggttaatggagacaattttctgttgttttttcttggaattggtacattatgctttggaagagagcaacgtaaatttaaaatccgccaaacaaagctaagaaaaggtgtgtgtagccaagatattaattaacgaacttacttattttattttttgataaaatcttacaagtagataggtattcagttgttttggccaaaaaaaaaaaaaaagagacaggtattcaattgtttgtactttgtagtaacgtttgtgccaaatatgcaacggttacgtgacaaaattctttaagccccaagaaattgtaacaaccgtttatcaaaaaagaagaaaaatgtaacaaaccaatatacttccattaaaaatgaagaaaactaccttaactaaaagactctggtattgaaaaataaattctgaggccagttgattatacttgtgggaagatcaaagacaccaccatcagaaacagcgcaataagatactggccatatgtcatctttaacgaaacaaattgaaccactcttgatttcatcatcactaacatcttgaacgggtgttcttattgttagagctgtcaaagcgggctatccatgtccattagtccagtccaataatgttcattttgatattggacaaatggaatccatgtccactaaggcacatgttcattaacgcacatgttcattaacgcctatgtccattaatctaaatgggttgtccaatgggcataacataaccaaatttcaatagtttttgctttatattttaatcaacacaaaagtcaaaagtctaatactttaaaaatattaaatcgccgaagaaatcgagaaaaaagtaatcgccggagaaagaaaatcgccgaaataattgctcgagaaatcgagaaaaaagtttcaattagtgtttttcgattgatttaacctaacattttaagaccattgggctgtccatgtccatcatgtccagtccgctaaagcccatgtccattaacgaccatgaccattaaagcccgtttcataatgggcttgtccatgaccggtccattaagcattggacacggacagcccacgggtcgcccgcctattttgacagctctacttattgtaaccacatgaccaaagatcaacatcacatcatctccaatagaatatatatactttcccatgtgttactctcaaaatttatcttgaaaatgtaaacaacaatttatcttccaataccttttcatatacacacaacatgatcaaaaccttaaacccattctaactccctttaagtatgacattgtcttctttggacctacatgttctagcccgcaaagatttgttattgggttctttcccaaaaagcctcatactatttggagttagacttggcttatatattagaaacttattttctaaacttctgatgtgggacgttggtttgtacccaacaatctccccttcaaaccaaggaccacgaacattgggcctcccctcgagcgaaactttggcaccattcctcgacaccttcttatttgcaagattcttgagacaccttcttatcgtgtcacattcaagagcttctcccaaaagaactttaacctataatcctaggtccactattttaacgtaggctctgataccatatatcgggctttccaagcccattgtaactaccttttagtatgatattgtctttttaatatatttgatgcctagtgacatctctatcaaggaaaaatcaaaagagtttctcaaacaaacaaaaaaaaataaaatttaattataatttgattatacgataaaaaaatttattttaatgaaaaaattgaaccaatataaaagagaaaaatgtcatgatgggatgtagagagtatctaagagtttcagaaattttctacactctctctttcctttttattatttttactttttttaactgtgagaaactctattgagaggtcttaaaaacccgctaactcaaactatataactagattaaatattaactagatgatactatgaaatagatattttgggtgttaggtttaattttgttccaacatatagtttaatttcattcaagtctcaagatatgaccaagtctttatgatatgggaagtgttacgaagtttgtgcggaagtttctgttgtgagattattaatttgtctaataactctcatttccagtgaagaaaaagtctttttgcctttgctttttttattagttaaaatagttcaactatcatcgtgaactggacaaacaattcgtcttagttgagttagtaaaagatgatcatgtgctcctcttatctatccttcatagttattagtttccagaaaatcagaggagagcacaatgatcaatctttctctatatcagacaaattctttgtcctatacaatcatatggatgctctttgtgattccctcttgtgtgttgtcagttgatgagcgacagaaacactgctctcctacgtttagatgtggcaagcagacagatctctattatcccttttggtcacctgaccgagaagagtgcggtcacccggttttcaaggtcaactgcagcggagatttcgcagagtttactatatccacggttaagttccacgtcctcgagatgaactatgagtctcgtataataagacttgtaagaacagagtatctcaacaatctttgtccttggcatccagagaacagatcaatcaaccaagaagtccttccatttcttcaagacaccgagctaggaaccttttattacaactgctctggtccaacggtagacgaacttgccaatggttacatcagacagcttgggtgtgatgaagaagttggtgggaaaagttactttgtctcgtccccttcacatcctgggaatagagctatcttagatgggttaagtgcatcgtgtgaaagaaacgtcgatatccctgtttctcgatctgccatggagacaacagcgacaaatcagagtctcgaggctataaagaaggttcttgatgtgggtttcgaacttggctttaacagtgattgttccctatgcgtagcatcaaaaggtgcttgtggctttaatcagagctcaaaagcattcgtctgttattgtaaagatgagcctcacgagcatacatgtggaaagatgggtataggtttgtgagtttcaagtgttttttttaagtacgcttctaagttctgtcttgcgtttgaactgaaatgtttctcatggtatttattcatgcaggggtctccaaaaaagcaaaaataggtatatgtttaatccttttccttccaagattcaatgaaaataatctttgtggaacagacctaattattaacagcataaacttatgaaggtcttgtcttattgtttgtttctaggcattggacttggctgtggatttttgggtgccactcttattaccgtatgtttgctctgtttctttttccaaaagagacgaacttcacatcatctaagaccaagagacaataacctaaaggggctagtacaactgaaacagtacagttatgccgaagtgaggaaaattacaaaattattttctcacacgcttgggaaaggaggatttggaactgtctatgggggaaacctttgcgatggtcgtaaggttgcagtgaaaatattgaaagattttaagagtaatggtgaagacttcatcaatgaagtcgcaagcatgagccaaacatctcatgttaacattgtttctttgcttggtttttgctatgaagggtccaaaagagctattgtgtatgagtttctagagaatgggtcgctggatcaattcctctctgaaaagaagtcactgaatctagatgtaagtacgctatacagaatcgctctaggtgttgcccggggacttgattacttgcaccatggctgcaaaacaaggattgttcatttcgacatcaaacctcagaatatactattagatgacacattctgccctaaagtctcagactttggccttgctaagctctgcgaaaaaagagaaagcattttgtccttgctagacgcaagaggaacaataggttacattgcacctgaggtgttttcaggaatgtatggaagagtctctcacaagtcagatgtttacagctatggaatgttagtcctcgagatgatcggagcaaagaacaaagaaatagaggaaactgctgcttctaactctagttcagcttattttccagattggatctataaaaatcttgaaaatggagaggatacatggaaatttggtgatgagataagtagagaggataaagaggttgcaaagaagatgaccttggtgggtctctggtgtatacaaccatctccattaaatcgtccaccgatgaacagaattgttgagatgatggaaggaagtttggatgttcttgaagtccctcctaagccttctatacattattctgcagagcctcttccgcaactgtcttctttctcagaagagaattcaatctacactgaggtatttataggatccacaagttgaaaacttatttggacactccatatctgtaaacatcttaggtatttataggttcacagactccatcatataccttgtggcttatgtaatcgtgcaacaaaatattattgaagaagaattttgcctgacaagtgtaaagagtgttgagtttattgtctatttggtgaacatcatatgagacgttggggaatgttaaagaggttttgtttgaaactctgtcacagctaagcttcagatatggatgaccacaaggataaccacgatctgctcccagaaacggaagtttgctgtgatgtttccacactcgaaaacagagtcatgtgagaagagggatgggcaggttacttagagtacaaggaaggaacatggacaatatcaacaaaaaaaaaacctaagagtgttgcaggatccatcaatttttgaaacgtaagaatttttttgtgtagcacgaagagatattaaaagaagaaaagaatcagaaatttaagtcagtaagcaggaaactgctccatacgccaagtcctctgtttctgttctgttagttgactgggtctaacagtgggattgcatatccacttactcacgttgcgttactttgtttcttttattttggtgtatttaaacatcagctaagacttgaaaaattgacaaaacatagtttatctctttaggtacttagtcttgtgttacacataaacacatctcttagctatgaggagggatcacctatcacacaacttggtcagaccgacgatgagttaaacaagcgttctaaatagaccgaacagaagaaacaaaatatggaaaaatcactgaaggaatcaatttagatccatgcacttgtcgtaagaaaagtcacttaagtcgagtctttatggctctccatcatttgtcaaagtcaactaagtctcccctttctctatagctttaatcactctctctcttttttcggtttctaatcagagcagtagtattcacacacctcatggattctttatcatccatgggatttcaaacagctagtttttttctgatcttgttattcttgttttatcatcttccttgtgttccaagccagcaagaacgaagtaggttatgtaaaccttttcagtgtggcgacatcaccgtcggttttcccttctggggagagaatcgccaaagtgattgcggtcacttttctctgaaactaaactgcaacaaaccctcaaacacaacctctcttacaatctcaggccacaactacagtgtcctccatatagacaacaaatccaacattcttagcctatccagacaagatttctcaggtcctttctgttctgcttcattctcttccacacctttgcgttcagatctcttccagaatttgcaaccttacagaaacctcactgtgttctatatgtgtgaccctcgtcgccatttctttgggaatttcacatgtccagtgaaaggtcttggctctgtggttcagaactctacgtatcgtaaactttgtgataaaagttttagcgtcacagttcctacgagttatgttccagaggaagaagctctgaatttgacacatttggaaagtgttttgaggaaagggttagaggtgaagctgaagataagtgagatgtctggtcaagaatgtgtaaccactgatggaaactctggcttcacacggttttgctgcacgaacgtatcaggaccagaaatcagttgccttacttcaataactactatgaataatggttatcacttgatcttgaatttcatctaatccatagatcataagcatcactaattttacattctcaatgttagaatccatcattttttggatgcaatcttgctcaaaaagacattaaattttgcaggaacttacagcgataatcgccctttcctggtaacaattggaacaggttagagttactgcttcaacttcagcttgtattgaacttttgcgggactgaaactaaggttgttttcaatttttttagttctagggtcaatactatgtgtatgtgtggtgctgtttctagcattttatcttaacgagagaagaatagcaaaggctgcgagaattcagcacctcgaggcgcttggaaccctgagagggtacaattataaacaaatcaagaaaattacaaaatcatttacagaagtagttggacgaggaggatttggaactgtatatagagggagattacgcgatggtcgaaaggttgccgtgaaggtcttgaaagattcaaagggaaactgtgaagatttcatcaacgaagtcgcaagcatgagccaaacatctcatgttaacattgtaactctgcttggtttctgctatgaaggatccaaaagggcgatcatatatgaatttctagagaatggatctctggatcagtcgttgaatcttgatgtgagtacactttatggaatcgcgctaggcgtggcacggggacttgagtacctgcactatggctgcaaaaccaggattgtgcattttgacattaaacctcagaatgtactgttagatgaaaatctcagacccaaagttgctgattttggactcgctaagctctgtgagaagcaagaaagcatcttatcattgcttgataccagaggaacaataggatacattgctccagagttgttttcaagaatgtacggaagcgtgtctcacaagtcagatgtgtacagctatgggatgttggttcttgagatgatcggagcaaggaacaaagaaagagtccaaaatgctgatccgaacaatagctcggcttactttccggattggatctacaaggatcttgaaaattttgataacacaaggcttcttggcgatggactaacccgagaggaagaaaaaaatgcgaaaaagatgatcttggtgggtctatggtgtattcagttccgtccatcagaccgtccatcaatgaacaaagttgtagagatgatggaaggaagtttggattctcttgatccccctcctaagcctcttttgcatatgccaatgcaaaacaataatgcagaatcatctcagctatcagtggaaagctcaatttactccgaagtatgattccatgacttgggaatatatgtaaaaccaatcatatttcacatttataggtcaattttgcattggaaaatatattaaacagtaacgtgtgtctcaaactgcgtttatcaagaaagatcatgtaaaaatgctagggaatcgtaataaatcaagaaatatataatgtaaaattgttgtgcttatgaattggcaatctctgttttcatacaagatatttgtttgtgatttaagattataacttgagatcgtttgtgttgttggcaaattaggtatgattggaacttgaactgagattgtttgtgtcgttggcgaattaggcatttaggtgtagaaaggagatgatgattgattgaatttaataatttgtctcttacaaaaccaaatattaaacaaatttacttttcaaatttgtaaactgaaacttaaaattaaagtcattacaagataactaaaaaagtttgcagagatggaacctgctagtttttttcctttcttttatcttttctgcttacactgttggtactagttggcatttaaaattcgagtttaaacgagcatgcttaattcgggtttggtcgggataaagttttaactgacgactacagctctacttgtgacttgtaagtggccggccctgaaattttgggggcctaaaaattttctaagggtaaatattaaacaaatttacttttcaaaatttataaactgaaacttaaatgaaagtcattactaaaaaagtttgggtacccacatgccacatgcagatctagacttccctttttgattttcctttagttcgatttttttctctcgaaagcttctgtgatttagttaataacaaaaaaaaaagactcttgataataacttcttcttacttgctcttaagaacttataatgagatattgtgtgtcggtcgttttgacttcaagagacttgtggattttggtatatgtgttccatttctaacctatagagaaatcagatcagaggatgtttatgcaattaggatctttccaagcaccatgtgtataaccttttgtttgtggattaccaaattactttatgaatagggatgtactcttggatgaattaaaatcatttttaattaaagatggtagaaacgacaagaaggtaaagaaacaggagttccaaatatcataatgattgagagacaaagtgtgaacagaagaaacaaagatatggtcaagatccatacacctgttgtaagaaaagtctctcccccttataaagtctcccatttctctgtagccttatcaaacaagtgttctaaatatttgttcacagaaaacttattctcacacgtcatggattatttgtcctccatgggatctcaaacagctaggttctgtctgatcttgttattcttgttttattatcttccttgtgctctaagccaagatgatttatggggctgtggtactccgtttcggtgtggaaacatcacagctggttttcctttcttgggagggattcgcggtgaagtttgcggtcaccattctctgaaactaaactgcaacaaacactcaaacacaacctctcttatcttctcaggccacaactacactgtcctctatatagacaacaacaacaattccgtcactcttggactttcaagacaagatttctcaggtcctttctgctctgcttcattctcctccacacttttatcttcaggtctcttccagaatttaccatcttacaaaagcctcactgtgttctacgcttgtgaccctcgtcgccatttccttgggaatttcacatgtccagtgaaaggtcttggctctattattcaaaactctacatatggtatactttgtgatgggagtttcagtgttccagttcctacgagttttgtttcggaggaggaagttttggatttgacccatttagagagtgttcttagaaaaggatttgaagtgaagcttaatatagatgagataccttgtccactagaatgtttttcctctcgtgcaaattgcctctttcttgccggatcttgctgcaaatatcatgatcgtacaacgacctgcggtggtgatacaggagatttattacgtggtaaactcgcctaatcttgaatctcacgtaatcaatagatcataaacaatactaacttggtattttcaatgtaagaatccatgatcttgttgtttgcaatgtttttcatcagtcctttaattgttgcagagataatccctaacactcgctccatactgataacaattggacaaggttagaattactgtttagacttgtattaaactttctaactttgttatgtaactaaattgttattgtatttttcagttgtagggttccatgtatttataattgtggtgatgattatagcattcttgttctggaggagaaaaaaagtaaatgatctgagaaagcagaacctcgaggcgcttgtaacctcgagacgatatagttatagacaaatcaagaaaattacaaaatcatttacagaagtagttggacgaggaggatttggaactgtatataaagggaatttacgcgatggtcgtaaagtagccgtgaagattttgaaggattcaaatggaaattgcgaagatttcatcaacgaagttgcaagcataagccaaacatctcatgttaacattgtttctctacttggtttttgctttgaaaaatccaaaagagcgattgtgtatgaatttctagagaatgggtctctagatcagtcttcgaatcttgatgtgagtacactttatggaatcgcgctaggcgtggctcggggaatagagtacttgcactttggctgcaaaaaaaggattgtgcattttgacattaaaccacagaatgtactattagatgaaaatctcaaacccaaagttgctgattttggcctcgctaagctttgtgagaagcaagaaagcatattgtcattgcttgacacgagaggaactataggatacattgctccagagttgttttcaagagtgtatgggaatgtatctcacaagtcggatgtgtacagctatggaatgttggttcttgagatgactggagcaaggaacaaagaaagagtccaaaatgctgattcgaacaatagctcagcttactttccagattggatctttaaggatcttgaaaatggagattacgtaaagcttcttgccgatggactaacccgagaggaagaagatattgcgaaaaagatgatcttggtgggtctatggtgtattcagttccgcccatcagaccgtccatcaatgaacaaagttgtagggatgatggaaggaaatttggattctcttgatccccctcctaagcctcttttgcatatgccaatgcaaaataataatgcagaatcatctcagccatcagaggaggacagctcaatttactcagaagtatgatcccttgactcttgcactacaagaaaaacagttattaatagcgtccgtaaaacgctatcaattaataccgtagcggtttaagaagcgctatatcatcgtccgcgataataggttaaacacataagataacggtttttttgtttgctatttttatgggtattatcgtagcgttttatatacagctgtattataactacaataacgttactgttatgctattatttacttaattaacagcgttttgtaattgtcaaatatagcattgggttcatgttatgttcttttctattcttataaatcttgttttaccctgaataaaaagttaagaaaacaaataaataattcaatcccaacaatctcttaataactgaaaatattcatacataactccaaagtcaacaatctcttacaacaaactcttataattccaaattcaacaatcgatcttacaccaatcttccaaattccaagttcacacaaactgaagtttattattaggccatgccactgttgttcctaaagcatcagaaacgaattcaacctctgaatttggtctccacacttttgcacatccaatctttattacttgtacccatacttttctagcatcaggtcctaaaggaatgaaatgaaccttatcttctggattcgttgaacatactcgaccctctgccacaatttctcctgtgccatcgcaatctaacaacatgcaccttttttgttcatttgatctcatgctacttccactctgcaactcacaaatttcaaacacaaatttcatgagatgtccaataacacaagtcctagctacaacaagaacagaagataagtcctattctaacacaaatttcactaattaactaatacaggaacagaaggggtaccgcatgtgatgattctttatgtgatgatgctcttgtaggtggttcccttggtgttgcctatcaaatgcataagagtttatatgcttagaatagagcatgtataaatttcatagttcacataataagtactaagagagaattacccatgatccagcagtttgattagttggtgatgagttcagatcactgtccaaaatgattttatcagttggccatgcaattttagcatccacagcttccccaagtgagaaaatcgtcgttgttggcctccagacatatgcatctttgtttgatacagattttacaataacagcagctgcattttgaccaagtggaattcgaccaatcttgtaagttggttcagctgagcagaaatctccttctccaacaacaacatcatcctttgaacaccaatcgagtagttgacatcttactactttgctagcattactagtctccgatatagaaacatcatcactaggctgttttcacaagaagacaataaaattggtaataatatacaaactggcatgattgtgttcactagactgttttcacaagaagacaatgaattagatgaactaacctgttttcctttagctaagcctcgaacttcattttgcagatcattaatcctgttgaccaattctgcctgttgtgcttcaagtttctgtacatgtgtgtctctagcttgaaggaacgctagcttaattggtagctgtaatccctcttcccatccctctcactcttcctgctttgtcttttcctaacacttgactcacagcatcatctctaacgctacatccatctgagctacctatttcactgtcaatagatttgatttgttcctgatacaaaaatttcaacagaattaaaggaagataggaactctaatcaaagctacttctacattatcagttccttatcccatttcacttacaattgtgtcagcaaactcttgtctaacaggtcgtccatctgaatgtgtatgtcctgctacccatactttactcttagtcacattactaggctcagaactcttattcctctacaagcatgaaaaacagtccaattcaagtttcagaataacctaagcataccttaaaatggaacagaacacacataccatctcttgagctagtctaagcattccttttttgctggtggtgtggggaatttgagccatcctgagttctctgtacttgtcacttttaacctacaaaagtgttaaaagtcatgaattcattttctacagaaacatgactgtcgaaataaagagttaaaaacacaaccttaaattctgcgctagtcctactcttcacccaatttttccatgctgcaacagattggatgtttgctggttttaaatcatgtatttgtgtcttgcttgtctttcgtactttagttagaagcttggacttagaagcacgccacacacagctcatctgcttaaaaacagaatctttttgtcatccttcatttatattgaatcttccctgtaatattatccaagtataaacattaatatgcctccaaatataatttttttttctgtttggcttcaaatgcgtcacatgattttgcattcatgatggatggttttaaaactaagatggtaaacagtaaaaaaaaaatcttttttataaaggacttgtatgtggttaagtaaattttatttcattccatacaaaaactagttcaatctgaataagttgtttgaaagcaaacatgtacggcttgagcattgctaggtactctttcctatgtggaattccgaccacttcttgcaaagcattgtgaagtcttccctagtagtaagtccgatgtccttgcaagcctgtctcgccttgttttcctgatcattgagctcttgttgcagcttggattttgcttcactgagaaaagacatagacattgggaactttgcttccgcgtggcctaatgaatcgatttctttctggacaatgtttatttggttcttgatgtgaaagatcgcatcaagaatactcataccctctatggaaatcatcctacaaaaaaaaaaaagatgaaaagaaaattaaatacggtttaaaatagaaataagaatacaacaccatggcatattggcatgttcagttttcacttttgagaagtgataaccatcttccataaatatgttaagacatataaccatgctgaaatcaaacttcgatcaccgaatccaaaagatcaaaattaaaactatgaaactttagtttctccataaacaagggttccaaaatctaaacccaagatacatatagaaacaaagaagctacataacccccaacacggcaagaccatccggagtctatagcacattattctatcggagcagattaaaaaattacttctacgcagaccaaactaaacatagattctgctacagcatgattgtaattcatcctggtttaattatgtctttatggtttattgtaccggtttgtggtactgaaacatttaatcggtttactgccggtttagctaagtatttgtaaggcactttgccatttcggaaaacctaatgaaatgaatactttcctaatctatctctgtctctctctcatttacgctgtcgcctccatccttgtccattaaacccgtttgacctgaggtgatcccttctttctttgatcatcttttgccttgtggtttactcatttcctgagcctgcggtgggttcttgacttggggtgtactaacgactttatccggtttcagattcatgaaagccaaaacctagactagcaaaaaaaatacatagacctagcgataaaccctagaattaccaatgaataagcgaaaaatttgaaacgggtcaaaatatcacaatgagttgacgacaataaaccttactgtttcgcttgtgggcactaaatggtaataaatattatagaatataatttgagttgttctataatattgctgtgtttgatacaagatgctaacatctatatatatatatatatagaataattaatattaacatagtgataacacaacgtaatgtaaacttttcaaatctgaatctaaaagctctaatgatctgtttgatctttgctcattccagattcaaaacctagcaatggaattattttttgttaatatttttgtaatttatttggagattatttgtattcgctttttaatgaaaaactatatgccaattacataattgaattcttaaaaaataaaaaatatatatgcaaagttgccctaaaatttgttaaacaaaatatcaagtctataataaaaaccacacattagtctatatgtaaaatataaattcatgtaatatcaaagaatctgctgtagcacaaaggttatttaagctccaatgatatgtttgatccttgctcattatgggttcaaagcctggcagcgaaattattttttgttaatgttttttagtttatttgtagatttattgtatgcgccttttaatggaaaactatatgctaataacatatttgatttcttaaaaaatcaaaaatatatatgtaaaggtgccctaaaatttgttaaacaaaatatcaagtttataataaaaaccacacattaatccatatgtataatataaattcacgtagtatcaaagaattcgctgtagcacaaaggctatttaagctctaatgatctgttttatccttgctcattccgagtttaaataccggcagcgggattattttttagtttatttggagatttcttgtatgcgctttttaatggaaaactatatgctaatttcatattgatttcttaaaaaattaaatatatatatatgcgaagttgccctaaaatttatcaaacaaaatattaggtctataatgaaaaccacacattaatctattgtacaatataaattcatgtagtgttaaagaatccgctgtagcacaaaggctatttaagctccaatgatctgtttgatccttgctcattccgtgttcaaagcccagcaacagatttattttttgttaatgttttttagtttatttggagatttattgtatccgctttttaatggaaaactatatactaattacataattgagttcttaaaaaataaaaaatatatatgtaaagttgccctaaaatttgttaacaaaatattaagtttataatgaaaaccacacattaatatatatgtacaatataaattcatgtagtatcaaagaatccgctgtagcacaaaagctatttaagctccaatgatctgtttgatccttgctcattcccggttcaaagtccggcagctgatttattttttgttaatattttttagttgatttggagatttattgtatgcgctttttaatggaaaactatatgctaattacataattaatttcttaaatagtcataaactacagtataacctccataaattaatactcgataaattaataacctctataaattaataaattattcccgtcccgagttatgaccaatgtaaaaattgatataaatcgataaattaataagataataactttttcgaaaatcttatataaatatatggtcccatcaatattataaattaataattatataaatttacaaatatatacacatatatatatatatcaatattatatgtaaaatatttattgaaatatgactctaatattattttttcttcaatttctattaattatttgtagagtttaattctaatatttttattacgtcgaaaaaattttgtattattttttaaacttaatcattgttttttccttgtaattagttttagaaaaaattattaattataaagaaaaactacttttctatcgaagttttgtaaaaaaaaaaaatacaaaatttgtaaaatctctctataaattaataattattaatttatcgataaattaatacctctttaaattaataaattttctcgctcccaacattattaatttatagaggttttactgtatatgcgtttttagtttcgagaaaagcaagtccaaactaaaatcaaacttgtcagtgattacaagttttgtaccatgacaaagttacaaccaaatatgaaatcaagacttttgagtttgatctgtttctattagaaaatacatacacaaacctgagaaagaaaaaaacaaaaccacacgtcataattttatgcagaaacatatgaattacagaaacaggagttacaaataacctgttttgtcgatggacctttatatgtcaccagactgaaccttttttccttctaaacctatcaatgctcatacgagacttctcgggtttactagtcttcttagatttctccagctgactgtctacactgtttctagaaacttctggaaggcaacagccaagttgaaacgtatcagcacgcccgttctctgcaggcttgctctgttttttggctgcatccgtcgttgcagtcttgttcgaaccagttcttggtcccttggaaatagaaattacgtatttcttcagatgttttatgaactctggatagagttctagattgcagtgtcctcctccagatacccataaaggctcatacttttcttttgaaagttcccaaagttgttttccatgagaacaatcaaccacttcatctgcagtcccctaccagaccaaacaagagagttaaaaaccttcttaagtgatttaaatttagactaatgtcactaatctgtttttaaggcacaagacaatgattcttattggagaaatactcaagttggctacccaataaatatctcataaatttcaacaacttgagtttcaccaaacattttcttgtcaaatggtccagttaacctacaagttttaattcattacaagaatctgtggaggcaataaatgacaacaagattccaccaataatgagaagatcaaaggcaaagtgaaagagacaataatgaaagaggaataatcatttactcacatggattactaagacaggacaggtaactgcaccgatcttgtcaatattctgaaacaaagaattgtgcgtgtaagcatgaacacatgaaaaccagaacaaacatagctgaatgtttgctaaattaccttgtaaatgtcaaaccaataggtacgtttaaccggatacaaaactctcatcccagagagaatagggctgtgcaaaaccactcctcgcaaattaggcgtgcgtgaagctaaatcaatcgttggtccactaccaacagactgaccatataatatcagttgatcatcttttacaccataatgttccttgaggcaagtatatgctgcatctatatcagcataggtattacattcacttgcctgattcaagtaacaaacttaaatccatcaaaaacaatccctggactctctaacacataacaagacggtcagatacacttttataaagttagaagctcagaatacaacctttccagtagactgaccataaccagagtaatcatacctggaaaaagaaaaccaaagaagagattatagaactattataacctactcatcattggattatagaccgtaactaccgcaataacacaacttaagtggagaaacttttgctactaattaccaatttacagtcttcacagtcgttaaaattgagtacaaggcctaagcaagtacgcatgaagatatgcgaaatcgcattctcagaatctaaattcttcttctaccacagaggagaagtatgattgaaaacagttgcaatgaaatgcttgcatcacaacatttcacaaaagtcaaattatttatatagaaatttcaaaaactatatgaataaatgtcttgaggggtcaacaagacccagaaaattttggctaaagtctctgactttcacatagattttgtcactatattcaggactataagccattaataaccaatccaaaaccaaatcttcaattcaaatttaaaaacatcaacgagataacgaaccaattttggaaagtttcctccttttttcatggaaacccctaaattaacagtatcattcacaacaatcctcaaaaatcgaaactttatacaaaaacagagatagagaagaagaaaaaagttacttaccccatgagattaagtcggagacgattactaagttcgataaaaagctcaaacatttgacccaaatcagcagcgttaccatgtgaatacaaaagcgtaccattagctttaggatgtttaatataaatagctacaatctcgttaccacgacgagtctttagcttcaatacatctacatcatcacggcgaggtacttctgttatgtataatcggtcaacgtcggaaacaaatccataagacggtggtgatggcgggaaaaaagcgaattttgcagcgattgatgaagttactcctcccatgacgacgaagatgatgatgattctcttaacatcacacagataaattagtagaaaaccctaaggttttgattgatttctctttttgtgtttttgagatcttgaggtgaaggaaaggagaaaatgatagaacgatggagaaaggagaagtgagaaagataaagaagaagaagaagaaaaggaaaagttgaaaatgaaagagtttagatttgagattttttatggtttacacgacggtggcgcgtgagggataataagcggcgcgtgtatattgaaaagaattccactggagaaacacgaaagtcgaaaagtaaaatgtcgcgcttctctctaaatggcggttgtcaaacggagctttcacttcttttctaaaaaacaaacaaaaacttatagttttgatattttatttcttgtttgtcaaatattttttttttcataagaaattaagtaagttatgagtaaaaaaaaaaaaatcaactgagttcgcatttgagaaatcatatatgaaatttggccaagaaaaaatacaaaaatcatgttaatgtatcaaacactactctcattttagttttcttatttttattatttttgtaatagtcattatttgataatgactaaaaattttcgtgtattacaacttaactgtttgttacttaaccttctttagtttagtaattttagcttagtcttttctttttattatatttttttgtttacatgatatggtttttttgtatgtttatgataaattggtaacattaatattgacatgtatcttttgttaaatagtgatcttttgagatgttagatataccaaaaagttcaatatacgatcctttctctaatatgaatatatgcaaatgcaaagagagaaacctaaaagtgttgactcaaaagactatttaatttatgatttttttttttcatatgaaaacttttaaagcaaatgagtagtttatatatttgttattcaaattatgtcaatccaatatttagccatgagcctatcatgatgtgattggaatactagattaggagagaatacatggaacaagaaattatttgcttagaatcaaattagataactttcaaaccaaataagtagcataattgcataccattgtatcatattgttgatgtaagtatttcatgatagttaaaaaattttagaaacttgggtatatagataaaaagatttatacatgaaaaaaatataattgatatttgaatcaaaagtgaatctaactatacaaatataattaataaaatgaatataactttattaactacataatagcatatacgaaaataacataaattagcaataaaaatagttaaacataattatttttaaacaaatttcaaacaacatagttataatgaaaaaagaagaaaaagtaataaactattgaagcttatgtcattttggtgttataattaagaaactatattactaatattttcattaaaatatgactaacaaaatagcatcttcaaaatctgtggatctagatttatataataatattctttgttaacctatatttatatactaataatcatagaaatcatagatgtaacatattttctagtcatgtaatggttttcattataattttttatatcataattattaatacaaaaaatagaaatcatatgattaaattacatattgtatactttacataagggttagtcgtcaattcttacaattttaccttccactttaaaaaatacagaataattatataagtccaaaataaaacgtagtatagtctttatacatatatacattgtaaatgttttcaggatcacatacattggatttttaaaattctaaaagtagatttgaacttttcgtctcgaggacttcgattaaatatattatttctcaaaattttataaacttgacaatagcgaaatgggtataataattattattttagattttataaaactattctgtacttttttaaggtggagagtaaaattacaaatattggcaactttgagagttttgtttgcacaaaaccaccctttatatagttaaagcatgttaaattataattattaaatcatagattattattattttgttaataaatatttttgataacaaacctatttttctttgtctaccaaacattctaatctaaacaacattaatgctacaattcgagattgaatatcatatgtttaatattaaactagatgcatgaagactacataattttccttttaacaataatccaaaatacaaatttcacaaattaatttttgagctaccaattggagtagatgatagataggataacgtacaagttacaatacaattttcaaaacacctctctatattcgttttctctcttctatattccaatggcttgtggcgatggtggagttgtaaaatttgtattttgaattattgtgagctgtggtgacttgtgggggtagtggatatgaattcacgttaacggagcaaatacaagttagtggcatccaacatctccatataatccagatgatagttgtttgtggagacatttaagttaattgaagaatcttgtttatcaatgtaattatttatggtttgaccgagccgaactattcgaagtaaaatgatatttaattcatgttaatcggtttgattttgccggttaatcagtgtaaatttcatatgaagactttcacttctaaactcgaaaaaaaaaacattatattaaccaacggtatgaaccattaggtctggtcgtttggatatccgtttggattgggatcaaatagtttgtgtttttgaattttcgaatttaaaagtatagaacccgttcggatatttcaagatttcagatttggatcgggttcgaatcagatatttcggatttagattcggagtacccgaagttcccaaaaatcaatttttataatcaaatctatctaaactactcgaaaatacacaaaatatctaaaaactttaaatatttttactcaaaagtagattaaatactaaatatattttaaatatcggaaagctgcatattttgacaattaaattatcacaaatataaatattaataatatattactactatgtatttaattatggatatgttcggatatctattcgaatatcggttcagattggattcgggtttggaagtataaagcccgttcgaatattttgagattttcaattcggatttagatcgaatttttcggattggatgctaagttttagatattatgcccatccttacaccatgacgatgtattataaaaatagtattctacatctcttcattttaatatagcaattagcaatattcccattagcattattgttatattttaatttgcatgcatcttccaaagattaagcactatttgttcactgtgatttggtaatatatgattttaaaaaaggataaaataaaaattccgatacaaaaataatatatagaaaggataaaatatcggaaccgatgaaaaaagtcaaaaggtgtcgacaaaaaaaaaaagtcaaaaggttaacgacaagatttataaaaaaaaatttcaaaaggcaaaaatgaaaaatgattttttttatttactgacaaaacgaaccttccttcagaactagagtctccttcctactctcttcaaaacgaactcgccgtagtattcgaactactcgccgtcgttttatcagtctccggcgataacggcggaggaacaccatgcttcaacaatccaacatcatcaccaccgttcacatcaatctccacaaccacatccttcgaatcacttatcccatccttctgaatcactctcaaaacctcaacgatctcatccatcgatggccgtacgtctctctcctgttgcaaacatcggaatgctaattcagcaaccgacgacatcatcttcttcaccgaaggatctctcgcgaatccgagtgatagatccgcgagctcatgtacggcgtcgttttggattttcgaaatcgccatgttggcgaggttaatatcgtggcggtgtctggtgatatcaacagcttctttcgatgagattagttcggagagtacgactccgaagctgtaaacgtcactcttctcgtttaatcggtaacattggtaatactcaggatctacatatcctggagtaccttgtggagcagtggagatgtgagtttgatccatcggaaacaaccgtgagagtccgaaatcagctactttgacttggtaattgctatctaagagaatgttagtagtcttaacgtctctgtgtatgatccctgaatcagagaattcatcattagtaaactaatctcattgtgtgtatgtgtcatgtgtgtgtgttcagtatgtgttacctgaggcgtggagataggacaaggcgctagcggtttcgatggctatttggagtcgagcaggccaacaaatagggcgagattgtgcttggtttccatggagatgttcagcgagtgtgccattggagatgtattcgtatactaggagtaactctctgctatgtcttgttgtgcatccgtatagaatcactaggttcgggtgttttagggatttcaagatatcgatttcgttcttgaattgttccacgcgttttagtgatctttcgaagagtcgtttcacagctactgctcgtccgtcttttagtgtaccgtagtagacagtaccgaagcctccatctccgagttctttggagaaattttcagtggcttcctcgagttcttcgtagctgaagacttgaattccagagtagacgcttccgtttccaaggttagatattgaaggtacaagagagtgattgctgccagagattgttgtggaggttggagtgtttgacattgtataattgcttgagtaaggtgttgttgttgataggcctttgtttgtgtattgtgttgctagtttcttccttctccggatgaagatacagagtaaacatccgccgataagtgtggcacccaagaatccagaagcgaatccgatgcctagagataaacggaaagacaagatgttcgtattatgatgcggttacgtaggtatgttctactgaaattagtttccttgaaaggaaaaaggatggacacatacctattttcccttttttggagagacctgcatgagctaccatgagaataatatcagttaaaatttaagacagaattttagaatggtgcataaaacatagtttgaaagtcaagagagtttctgaggaagataagagatctggttcttatggaaggacattagccaattagattcagagacgaatttaggatcagattaacttaggtcagctaaagtattcagtaaagcagataaagatgaatcattactcttctttactatttcagaatagcaagtactctcgtgaggctcatccgcacaatagcaaacaaatgctttcaatctctgatcaaagccacaagcgccccctgatattgcgcattgggaacattcattgttgaagccaagttcgaaaccctcatcaatagccttcttcatagcctccagactctgatttttctctactgtcttcaaggctgaccgagagactggaatatcgaccccttcgcacgatgcactcaatgcagctaaggtagctctatccccagaatgtgaagaggacgagacaaagtaacttttcccaccgatataatcctcacagttaagctgtttaatgtaatcattgggatgtacatctaccgttgattggcagtcgtgataaaaagttgacagcttggtgtcgggagaaaatggaaggacatcatggttgatagatgcattcgcaggatgctgaggacaaagattgttgcgataatccattctggctagtcttatgatttcaaactcatagttcatctcaaggatttggaacttaactgtggatacagtaagctctgcaaaatctccgctgcagttgacctcgaaatctgggtgaccgcactcttttctctcagatatccaaaagggataatagagttctgactggtttccgcatttaaacctaggactgcagtgtttgtgttgctcatcaacaactgagaaaacacaagaggggatcacaaagagcatccatatgattgtattggaccaagattttgtcagagacagagaaagattgatcatggtgatctcctctgtttgttttttttttttttcttggagatgaacaagaaaatgaagacaaagaataagaggtaaaagacagattaggaattggtgaattgtgtttgtctaagtcatagttttatatgagttgaaagaaagaaaatattattaaggtttctttttttctttgttgtttatctgataatattttcaatgggaaatttctttggaattaggtgggttaggaggacttagtcttcgaatagacaatcaagatattcaataaaaaaaaaaaaattttgagtggttgctattaaataattaatttcttttatgtttgtaggatgacctaaacaagtgccggcacaagaactttacttggaaaagccaggcaaagtagaaaaggagataaaactagactatagaagaaaatctccaaaggggttaaaaatcgactatgaagaaagacttgaccgttgttggcccttcttttactctcaactttcttattcagtttcagataaatgtgaaggcatcaaatggtatgtggacagaatgaagactggaacaagaaaaagattctttagtatttacctcggaaactgaacgatgttgataaagatgacagaatctggtaaggaagacttccataccctgaaaatgacttatttgaattgaaattgtgtatgtctagttgctggaaacagataaagactttttagaccactcaagtttctaccttctctcttgagctcactagggactaaggtatatcttaacactgctaaaactgaccgagagatactggaaaaaaagaaaactgtgtgacttggttagagacattgcagaaaatggttttgttttgtataatttagaacaccaaagtatgagctgcggttcttggtgattagcatgttctatatgcttggggcttaccaatttttgcaacctaggggataatagttgtggtatgtgtcatagcagaacttatagaggatgtggatcgacatgtctatttttgcctggttgcactgtggtaatactgcccaaatttggcaagtgggaaatgtatatgttatgcttatgaaatttgctgatagttcagaaacataccactagatccagatggcatcattggagtgcaattgacttctgatgacgagtttgtcttgcagcaaaccggagttgcaacatggtaggcgcagattccaccattggttttacattcttgacacggtctctcatcgatgctaagtttcacctcaaatccttttttaagaacactttccaaattggttacattcaaagctccttcctctggagcataacctatgggaacagtgatgttgaaaatcccaccacagtgattgtgatacaaatcatcctgatgtattgagccaacacccttatttggacatatgaatttcgcaggatagtgaagactagggttgcagaggtagtaagcggagagggtcttgtagtctggcaaaagctcaaaaagttcaggagtcaacgttgctccgctgaatgaagccgagcagaatggacctgaaaagtcttgccttactaatttaagagtactagtagtggtatttacttcgagaacacggtacatcagacttgagatgattagagaagtcgaatttgtttgtttttggcagtgaagtcctaaagatggatgaccacaaggttggggccgagccactccccagaaagggaaaccggctgtgagatccccacaacgaaacagagtgtcacatggttctcgttgactttgagcacaaggaagaaagtgaatataggataagaagaagagaaggaccagaaaagaattaggttttgagaatctgaagagtactggagagaacatgattgatatctggaaagtagtttcttttttggtttgtgtttaaagtagagtagatgataaatgattaaacaaaaaaaaaccaagtggagacagaaaagagctagtggaatggtcgaaccacgactaagtcaatattgagaaggacagatactcatagacttggagaactaaatgacacgtctttggttagttgactttggaagacttttctcgttttatttgtaagtcattcactgtggaaaatcttgttaacgtataagaaaaactatttcagagttcagaaaaatctttcttaggaagaaaagtgataaaatagggttcgtaattgtaatttgtaaggtttgttatattgaaatagcattttacgttaggttatacaaagataggccaacaactataaaatattatacgtcattgaagtataaaattggagttaaaaaaaaaaattgcagctaattatataaaattaaagaaaaaaattgatagctagacgaaataaatatataagaatgcatgttcacacatataagtataatattgtgttttcaactacacaaagtaaatatattgcatgatcatatatataaattatccaacatcatatggttaatactatagaaatacaattttggtacaccgattgattgattctaacgctgaccgacattgaccaacaaatttttattatttatattaatattagaaaaaatagttttatttggtattgtataataaaaatacattctttctgtaacataaatatattttatatgtatacatttaaatcattaactcttacaatagttagttttttttttcatttcaaaactaaactaaaagcgaaataaaaatatttttaaaattttaaaatattaaaagtcaaattaaagctaatgattctatcttttctatattaaaaggaaacactgcaaattttttggttatttatgtgttattacgagaatgtttttaataattttttttacaaagtaaacaagatattatacaaaaaataactttattaatgatttcataatcttcttagaatcaattatgtaaggaaattgtaataaattttttaataataatgcgtatttccagtttatattttcttgaagacacaatctatgaaagtcaaaacaacggtgctaagggcactacccgcaaacaaaataagtgggatccatgattttagtaatgcatggtgaatcgcaatacacacatgaacaacaatgacttcgataatcacattcttcacgaaagttatgtgaagtatatagaatatattgattgattctaataagattttttgtttttaatttaaattttaatattttgaaattttaataatgtttttattacacttttagtttagttttgaaattaattttttttaactattataggttctaatgcattaaaaatatatatacaaaatatattgatattgaatatagaatgtgttttttattatacaacacccaacaaaaaaatatattttctttttaatattaaaaagtaaataaaataatttcttaaatatttttgttggtcaatgttggttaacgtcgaagctagtcaaatagcgtaccggaattgtatgtctatggtataaaacacattacatcgtatagttaatacatatagtcatacatatagtgtcgtaactaagcagagcaagaagaaacaattgactgtagtccccaaaattttagttattttttctttacaaaaaggcccccaattgatttttcctataaattggcccccaattttagaaactacaacaaacttcttaaaaattttaggcccccaaaatttcagggcctgccatgtacgatatgtacctagaaatacaatattatacttgatatatacctaacaatcttttttcctatcacctgcctatagaataatcaaggctcctagcttaaactggaatatgccggtcgaggcctctttgccccatcagaacaagagctgcttgatttaatatagcatctctttctcttggagactcatgtataagtgaaattaacgtcactctaatcgttatcgtcttatcgattaaacatgcaagacgaagagacgattaaaatggagagaatccttcattttttcataagatttttgctttgtcaacaactttatttgattgagtaatgtttagataagtgatactatgttgttggatacaaatatttcgtgccaatttatctatttttttattattatataaaattaaatttattcattttaattttgtacaccattattataccagatagtatttattccataatttataacaaatgtgctagtttcacaaaacattgaaatcattgttggatctacatcagcaatattggctaaagcaaatcatgaaaatatttgtaataaaaaaacttgttggtaaaatcatcatataacctatgactgttaaactgaccacacacacgttaccattttttccatcctctgaccaaaaaatataaaaagcaaatttacaaagtcgcttttccttaaagcatcctctgcatgcgattcattcacatgaaactcataggtccctcaagcattcattgacattgccttgaagctttcggtccaaaacctctccacatatattacccatcaaatgataaaacgccataagctctgagagttgctctatgttcatctttttcatcatgttcctcgccatcctctgcttatcctcgtccactttcaactttttcatatatgatcctccgttcctcaccgtcgctcccatctccttcagcctcatctcttgctctgcgcttagcgccgtgttcgactacacacaaaagaacaaagttagcaaaagatacaataataattcatctttgataaaaacattgtgggtcaaaatagtaggacatcactaaggttgttgtggtggcctggtgggccaaaatcccgtgagccgggcctaacgatatccgttttcaagtaatcaaaacccaccatgcatgttatgtcccacatgcatgtttgcttcccacaagccgaaatcagaaccggcataaaatgggctggtctggtccgaggcgctttggcccatcacaacaaccatagacatcatctaaaatgaatgctatgcatattaaaaaaaaaaaactggcttgcactatgtaactcttaagataacgaaaggccaagcaagtgtctaaaccattttgcctcttgcaatcaaatgtgatcaagattttgtaaagttaagtcgagagatttagtgatcatttacctcaaggaactcggctccaacttcaagttctgattcttttgatgggttcttccctggtgctcctctaacatacatatacttagcaagtgagaaactcctaacaagcatctttcttttattctccatttcactatcaagcttcaatgtctttggaacagacaatgagctattcagcttcttctggtacgcaatcaccgcctttgcaaactcctacaaattaaatcaaaatcacattagaactcaattttcacaacttacttaactaacaacaatcttcaaaatcacacaaacctgataagcagcaggacaaccaggataatcaaactcatcaagatcatgttgtctcattctctctggatgaaactgtaaacccattatgaacttcccttcttcaggattatacgcatccggatcgtaaaaaccttccattaacccatcagcagcaaaagccattggcacaaatctttgtgccagtctcttcacaccttgatggtgataactattaaccaaaatctccatattttcaccatctaatgaatctttaaaccaggaatgaagtggactgttctcaacaatcctcacaacatgtctatgaccatcataattatcataatcgatatgcatcgttcttcgttcttctggtaacttattcgttagctctttctctaaatctagataaagagtcccaccacaagcaacattcaaaatctgccaaaacaaaacttatcatcatcattaacattttatgttctaaccaaaagacataaactcaaaaagagacttacttgtgatcctctacagattcctaagtaaggaatgttctgttcaagacaaagcttagcaagacctaactcaatagaatctttctctttatcaatagctgtatcactagcatgtgtttctctaatctcttgaagctcttcaggagaaagagaagatatttcagattcataaagagaaggatcaatatcttctccttcacaaagtaaaactccatgtattggtttaaaactctcaagcaacatgtgaacacccgttactcttggtacaatcactggtacacatccgtaacgtactatcaaatcaagatggtattcacctgaaaaagaaaaaccccacaatttcacaaaaccacaatataaagagaacccatttgcattatgaagaagaaacatccaaaagtttcgattttaagccaaaaaaaaacagaaccatgcatgattaagacaaaaaaaaacagaacaagaaggtagagttttgttttgtcctaaccaacgaaatcgacgaatttgtttttacgaacggtgcgtctagatacgacgaggacacgagggaggatttgagagagatcattcaactttggatccatatctattgttcccatttgatttgtacctagaaaatgaaaaagcaaataacaaaaaaaatagtttatgtgtgtttgttagatttgatggtgacgtgaaacgttaacagagagagttctcgtgatagagatagagagaagcaaaaggcgaatttatagtgaccaaagagaggctaaagccgacttggattttcgttgtttattttattttattttctgactatttttcctaatttaaaattataaattacggtttttttttttttagttgttgctttgaaggaatacagaaggggacaggtcttattaagttgctgactatactggaattagaatggataaagatatatattataattaataaaactatttttgtttttgggtaaagatttttggtgaattttaaaatgaaaagagttaaatgaggaaatgaatcgaattcatatacgttgtgtctggttaacaacttcctcagatcaaatctaaattttttgagtggtatgtaattaattttctctggcccactttagtagttaattattttctgcttaattttttttttggatataaatatgtaacttttttgttaatttgatataatcatttggaaaaggaaattaaaaattatttactttatatgcatttgatagaaacgaatacgagtgaattcttgataaggttgccacatattcatgtgtgtttctgaataatgcttatgccattaaagagaattataagtcccaaattattttaaaacaaaaatatatactcttaaaaaaatataatgaaaatagctttctaggtggtaccaaaaataaaaattattgttcatacaacttaaaataagatatatttagacctataaaaattataaaagaaaactgtaactgattacaaataattgtatatagattttaaatttatatagaagaattttgctaattttattgttaacgaaagtataatttcttttcaagaaaatacagctataaatttgtacagtgtatcaatattttgagtcaacataagctttaggacacgtgtggtgggaaggctcgttctatggtcctcgtcatagctgacgtagcactatttgcgtaagatttatttactatcaagtctatactcataatcataaactcaccaatagaaaaattcatggccaaacaagaaattcttgactctaattgacctctgtctttgtatctcgaattcactctcatgaagttcactatcatataattagttttgtacaaaaatgaaagtagcatgattgaatggcctatcaaaacgatacatctatgtctattatttaacaaccatctcattgatattaaatacataatacatcactattcaaaattaaaactaaactgatttcgacaaaaaaaaaaaaaaaaactaaactgatttggaggaaaattacattgattcgtaaaatctctaacttgttttcattctttgactagcaacatacagtactagtttgtttcattgatataaaatcaaaataagttttacagaaattttgttttcaatcaataaatatcaacgagaaaagtttgaataactatttatgtttatgtaggatttgaaaaattattacgaattttaatgttttctttagcattgatcaataaattttacatataatttttttttatgtagtatatgtaagatttcgttgtttcttagtattgatcaaatacaattttcctttttttttttttttttaattaaaaataaaaaaatttagatttgtttaatagtaggccttaagatataatatttatcaaatataaaatacataaagcattgatcttggaccatacaaaggattttctctccatattgaccatatactcttgatttccttaaaaaataataaacaaggcatgtgaaggacccatgcaatattgtgtctgcgtttccgtcaaaattgaatttaagattatattattatttttctggactggtcaaattaatgatcgttcaacaagaaggtctcaaactctcaagtctcctctttttttctaatttttttcttgtctgcgtttattaagtattattattattaacaagagggtcagatgtttcaaaatcgaattttggtacccagattactagtcatgcaacccacttttgtataattgtattgaaatttatgacagaccatacaagatgctcttagacccccattattcgaacaagacccatacacttaaaaagttaaattgaaccaaaaatgatgtatgttctagtagaagtccaaataaaataaatgcccaaattgggcagcccaatgttgaggaagtccaaagtcattcattttccttttgttgagacttggagtaataagttttgtttatttgaatgatctttgcccaatacatatcaactccatacctaaatgtagccttacaggcttctcaaaacatccacataagctatttttatagactttcttcatacctcatgccagcttcgtacctaattgtaaaaaagtataaaacaaattaaaacaaattctttgaaaaaaacgttgccagaagtaacgtatccgcatgcatactccttttaagatttaacctaaacccattgtttcacatgagtccacaattgcatcacttttaagtttctttaggtttctagtgtggaacatagggttcctattttaaatcgcatatgtagttccatacacagttctggattccaaaaactcttcattgttctacatgtattattgtctatatctatgttataaacgtgattcttatgattcatgttgattttctcatttagaagagaaaaaaaaacacaatatatgagttcggtgtagctcagtatggtggtggagcggttgagaagtgtgagctaaaattagcaaaacgtaaaaataattgaaatcgaaatcataaattttttaaggaaagatatgagagaagtcgagttgatgaactctttccttaacttttgaatcacccgtagtgtgacagtttttatgtgattcaaggatcccatgatacaacctctataaactggtttcttaccactcaaaggaacatagtttttacgatactctcgagatttaatttaagacatagagaaattgttggagaagatttatttttatatatgtgtgaacgtttaagtgttactctatctgtgaagcgtaacctcgttatataggtttgagattagattttaatttgtttgttcataaaatcaaaaccaagtccaacaaaaatataggaggtagtgggtgacttgatatttcaacaactcctattctcatggagttgaggaagcgaagaagaactattctccaggacgtgaagaacatagcattagcgactttgtttcctcctttcaagacccgatccgacaaccaccagagctccaacgtgagctaagtcatgtcttaagcccatttattttcaaacactttattttaattaagcccattagcttaagtgaaattttggcccaacaagaagtaatcccggatccaaagagaggtgaacccatgagaatcatcgtgtgagtggtgtaagtggatactaatgtttaacttgttcataagaacgataaattgctggaaacttcaaatgcaaagagaggacggtgatctcataggaataaatttgtctttgatggtttgattatgatgacgtagctttcctctaccaaaaccattttgacgaagcttgaatgcttgatgacggcctccacatatggttccaatcccgacaataacacttaacatcctctgtttttctctctgttttaaattcaacacttttaaaaaggagatgcattctatgtaacccatgttttttgttgactaaaattttacgttcatacaaaaaaaatgctataacgttaaactgcatcctctctcacatcaagatgtaggtacaaaaataaaatcgcagagttttctaagaaaagctcaaaaacattcgagttaactgatatcaaatgcaagacaaattagggaacaagagcatgtcaagacaatgataaaagaatttcttacatcaaccaattttaagttatcgattatgaaggacggtgaaagataacatagtgtgtgtcgagacaatggtcttcacaatctaagcatctagaattttcttcaataagcctctttctacaatctacgaggaggtaattcaagtttgtaaacgcaaggtatgatatcttctattcttcaatttattttgtttttgatctataagctcttatggttttcaacagtggatcaaatatcaaagaagcagctaagtagttatcaagagcttatgaaataattacataacactttttatatataagttcttaacaattcgtatacaatatgtagtagacatgtagtgccttttcttaaaaaacgtagtatatgcgaaattcaccgtatatgcgccatataatcaccatacatctcccaccgtattaaacaaatatatagccataatacagtaagacttcccactgtacattgcatatattgaaagcaaccaacaacatcaggataaaagattttattttctgtatttttcatttatcttgatgttgttggttgctctcaaattaatctttgaaaaatttacaaaattaacagaaaaacaagttttaatttctaaaagtaccacaagcttacacttctttagtttgagttttgagagcaaaattcatgagcacaaagtggtgatgattgtgaatcatgatatttgataaagtcaatatttagcttaatcattttcatttgtttgcaagttaatagtggtaggaaataactagtctaatttttttttcctattggttaataggaatctatatttcagttttttttgtcgacttgtacaaatagcattccatttgttttgctttcatacttaaactcatcatattaatatgaataagacatagaaaacagtaataaacgtgtgttcttttgattggaaccaataaagcacaatgtttttattggaaccagtctcaaaaattaacatcatcactgaaatgttgttatataagattaggattcattattactaataattttttacatatatattgagctttaacaagtaggataaggaatattacaaacttctaaaactttgcgagcagctggagaggtaaaaaacaaatagtataatgggtttgtaatgtaaccacataaactttccttttgcccaatcagtgtgttgcaacaatccttagttggttgtcctcctgtggtcattgccggtaagcatagcagcctgagatctgatggaatccacgactgtgccacctctgatttgatcaaaattagagatgatatgacgactatcacaaatgtgatgaccattagtttcacaaatttcatgttttgaagctttgatgatttctttttgcttcaattggttttaaaatttataaatttgagattttggttttctaggtactttacgatgagaaaactctatatatatatatatatatatatatatattgatctatccttgataagaaaaactcatccatttggcaatcatgcaaaataaagtgaaatcatgactaatgtatatgttccacaagtactcaagcatgtgttgagttgtgtaagttgtgagaaatatttttccatttggccatatgcaaaacaaaatgtaaaggtcatgactcatattccacaagtgtttaaacctgtgtagagtgtttaagttgcataataatatatccgttaaaatatatagatcattttctatataaaaatcattgtgactaataaaataaaagctaacatataaaccaaaatacatttgataagattttatttgtaaactaccaaaatcgtctctattactattaatattgtgaaataaaaagattctcttctttttctcctttttgtaattaaaattgtttcaaatttcatttgtcttttggtttgactatatatttcttaaaaaaataacctcatctcaatatctagagtttttttctccacatttgctaaattgtgtatggtttgtttaaatgaatgtaaagtttatttaacaagaaaactttatgtccattaaatgcaacattttgcctaagttaattattttttgataaaagaaactttcaaaaaacagagaagagaattggacttttcttgatctaaaaaaattatcacaacaaatatgtggcccaatacaaaacaaatatttttatggtttggttttttatggtttttggtgtctgtcgcaaggcagagactctacgggggaagtcggcgccgaaaaagaagtctcttcctccaccggtacaggagcagtctagtcagtctcaacaaaaatcctatgctggagcagtcgaaaacagattttaaacataagtcacacgtttctagtcgaagtggtcgatggagcttctttagtggagatatcagatgacctcattcaaaattcagtgcctctttaggaagattttctagagaaaaactttttggacaaggctccccatggagctaaagttcgcgtaatagtaaacaagatctcgcctttgggaaacatatcaattcggattgatgtctatgaagtgaatgaaacaacagtgaaattcagaatcaaggatgcacaaactagaagtagggtactgcgaaaggggatggaatatacctgatattcccatagtggtttctatgtggtcgcctaatgcagcgaaggaagcacatgagatcaaatcaattcttctatggattacacttaaaaatgtgccgcataagatgtacttgagggaagggctctacttcatagctcgtattgtggggaccttattcatgtaatattgtgtatgcgtttccgtcaaaattgaatctatgattatattattattttttctcaactggtcaaattaattatcgttcaataagagggtctcaagtctgaaccttcgtgtctgcgtttattaagtattattatttgtaacaggagggtcaaatgtttcaaaattgattttagttcccagattactagttaatgcaacccgcttttgtataacttttaatggattttctattgaaatttatgagagacaatacaagatgctcttagacccaatttttcaaacaaaaacccatacacttaaagttaaattgaacaaaaaatgatgtatgtcctagtagaagtccaaattggataaatgtccaaattggtcagcccaaagttgaggaagtccaaagtcattcattttctttttgttgatccaaattggagtaataagttttgattatttgattgatctttacccaatacatatcaactccatacctaaatgtagccctagagccttctcaaaacatagaaaagctatttttaaaaactttctccataggtcacgtcagcttcgtacctaattaaaaaaattaaaagaattactttgaaaaaaaaacgtagccataagaaacgtatccgcattcataccccttttaagatttgacctaaacccattttatttcatgagtccacaattgcatcatttttgtgttcctttaggtttctagtgtggaacatatgattccaatttaaaatcgcatagtagttttgtgttttgggttccaaaaactcttcattattctacatgtattattgtttatatctctgtcttaaaacatgattatgatgaatcatgttatttttctcataacaaaacaaaacacacaatatatgagttccgtgtagctcggtatggtggtggagcggttgagaagtaatcccggatccaaggagaggttaacccatgagaattatcgtgtgagtggtataaccgtataattggatacgagttgtttaacttatacataagatcgataaattgctggaaacttcaaatgcaaagagaggacggtgatctcatatgaatatatttgtctttgatagtttgattatgatgacgtagctttcctctaccaaaataattttgacaaagcttgatgacgacctccacatgtggttccaatctcgacaataacacttaatatgtgttttctctctgttttaagttcaaagcttttaaaatggagatgcattctatgtaacacatgcattctaaaattttacgttcatacaaaaaagctataactttaaactgaatcctttctcacatcaggatgtaggtacaaaaataatatcgcagaggtttcaatcttaagaaaagctcaaaaacattcgagttacgtgaaactcgaggctgatgaaacaaattatgattttggtaactgatatgagataaaacgcaagataaattaaggaacaagagcatgtcaagacaatgataaaagaatttcttacatcaaaccaattttcagttatagattatgaagggcggtgaaagataacatagtgtgtgtcgagacaattgtcttcacaatctaagcatctagaaatatttttcaataagcctctttctacaatctacgagaagctaattattaaacaatatcaagtttgtaagcgcaaggtatgatatcttctattcttcaattttgtttttcatctattagctcttgtggtttttaacagtggatcaaataccaaagaagcagctaagtagttatcaagagcttatggaataattaccacttcatttctttagttttagttttgagagcaaaattctttcgaactgaagaatatttcatgagcataaagaggtgatgattgtgaatcatgatattcgataaagccaatattagcttaatcattttcatttgtttacaagttaatagcggtacgaaataactagtctatttttgtttttctccttttggcactatgaatctatatttcagtttttgtcttttccaacttgtacaaatagcattacatttgttttgctttcctacttaaactcatcatataaatatgaataagacatagaaaacagtaataaaagtgtgttcttttgattggaaccaataaacccacaatcgttttattggaaccagtctcaaaaaattaacaccacaatttttaagcttcaaagatgacattgaaaactcccaacaaccatcatcatcactgaactgttgttatataagattaggatttattattactaataatgttttacatatttattgagctttaacaactaggataaggaatattacaaacttctaaaactttgcgagcaactggagagctaacaaacgtactgtataagggattgttaatgtaaccacataaacattccttttgctcaatcagtttgtcgcaacaatctttagttggttgtcctcctgtggtcattgccggtaagcatggcatgagttctgttggaatacatgacgatgacacttctgatttgatcaaaataggagatgacatgacgactatcacaactgtgatgaccattagtttcatgaacttcatgtcttgaaactttgatgatttctttttgctttcaattgtttttaaaacttataaatttgagattttggtttgtaggttcttagttcttacgatggcaaaactctatataaatataacagacaagtcagattgatctatccttgttaagaaaaactcatccatttggcaatcatgcaaaataaagtgaaaaccatgactaatgtacatgttccacaagtgcttaagcatgtgttgagttgtgagaattttttgtccatttggccatatgtaaaataaagtgaaggttataactcatattccaccacaagtgttcaaacatgtgtcgagtgtataagttgcatagtaatatatccgttaaagtatatagataattttctatatgaaaaccattgtgactcataaaagaaaaactaccatataaaccaaaataatgttgataagattttatttgtaaactaccgaaattatctctattaacatttatattgtgagataaaaagattctcttccttttctcctttattcattattgttttttcaaatgtcatttgtcttttggtttgactatatttttcttaaaatatgacctcatctcattatctaaagttttccccccctcatttgttaaatttatatggtttgtttaaatgattgtaaagtttatttaactagaaagccttatgtacattaaatgcaacatttttcttaagttatttgaattttttttataaattttttttttcaaaaaatagagaagagaattggacttttcttgatctaaaccaaataatcacaaccattgccggtcctaagaaagatgtggtccaatacaaaacaaatattttttgatgggttttatagataaaaatttaaaaaggtcatcacatttgggatacaatgacatataatattatattattttgtaagtttgtttagtgttatgaaaaatattagtatgtaaatagggtggccgtttggttttgtttcagttcggtctttcagattttacgtttttttggttttgtaaacattgaaaactatatagaaaccctatgtaatttagtttggttacggttttccgattttacataaaatggaaaggatataaaagtataaaactatatgtattttggttctctttggtttcggtttggttccggactttttaagttatgctatgtttttacaaaacaaaatataaatttgaataagaataaaatatcaataattatatatcactaagagatcaataattataagcccaataaacaaaaaaattagatagtaattctactaattacaatataaactggacaatattattatatatagttatccttaagtttaatcaaaaaccaaaaaactattccgttgtacggttttaaacaaaccaaacctatccaaaaacttaataaaaataacaactaaatgaatttttattctaaaccataatcaaaccaaaccatttattttggtttgctttggttcgttttttttttgcccacccttatgtaatattgtatgagatattattttttacgaactaatcttgttaggatattatttatttgatatgacatttaaatgaatatttttttacgagtaaagaattttattaaattgttttagttgcaaacgtatatatatgttaacttaaatgaaaacattttattatttcgatttttgtctttggcacgagctaagacgctctgtaaaagtgaatgttggacatgggcttcgccccaccaacacgtttaaaagcccaacacattaaaattagtaaaaaagaaggaaggaaggaagaccggcccgttaaaagaaaaagagctcagcatcagacgaggcccgcctcaaggaagctgttggtcaagagaaagtcccacatcgagaagaaacctgaacgatagactgtcctttcagtactataaatactgacaaaggaatgtcagaaaaaggaagaggaaaaagtgggagagaaaagcaatagaaacttctaattaaacttctaattaatattaagtctagttttgacttgtgaagtctgtattaaataagtttaagctcggctgtggaaacattttgtaaacagccgaacttcaaggatattaataaagatcttccttaaggctcggcatttcattcttcggtttggaagtttggttttatactccaacaattggcgcgccaagtaggggtctaccacaagaaaaggagaagagaaagccgaggaagatctacgagaaggaaggatgccgggaagcgaacatgaaagcgaccgtggggagttcgtcgaagacaccccagacaggattcagcaggtcgtcatagctccaataggaggtgaacgtggaaaagatgcgacgaacccgatcgaagtcaatcctgtggagaacgaaccagtactcaacacaccaacaccgaccgtagggttagagccgggagtacaaggaagggaaggacgtccaacccgaactccacaagcacggccagatgacccaggagctttgatgcgtagcattttggcgcaaattcaagctcaggatcaaaagaatgccgaacggttcgacgttctcactaacgcatacacggaccttcgaggtcaaccaacagctcaacattcggaaggattcgcaagcgccatgcgccgagcaaataacacaaggccgagcggtctgaatgccgttggacgtgaatatcaagagcgatctcagaacgaggaaatccaggagctgagaagtacgatccaagcaatgtcccagaaagttcatcaggcgaccagttccgctcctgagttagagcagatcctggaaaaaacctaaaagacaccttttgccgcacacatcagcaacgtctcagttcggcatgataacaagataaagttaaaaagttacgaaggtaacacggatccacaacaatttttatcggctttcagcgtcgccacgcaaagggcccatttccatccgagcgaagctgaggccggcaagtgtcagttattttccgaacatcttatgggtgcggccttgaattagttttctgacctacctgctaattcaatagggagtttcttggaactttcaatcgccttcctgaagcactattccatgtacattgaacgcggcacgacacacgcagacttttggactatggcccaaggcccgaaggaaccgcttcgcacctttattgacaggtttaaggcagtcgtctctcgcatcgccgtcccggatgaggcggccatctcggcattacgcaacgctgtgtcgcacgagtcgcgtttttgcgatgatttgttgttaaatcggccagtgtatctagaagacgccctccacaaggcaacgcgctatatcgaaatggaagaagaaaagctggccttcagcaggaaacatacttctaacaaacagtcaaaagaaaaagttcaggatgattattacgaaccccgtcaacactataatcaggagtaccggcaggagaccgaaaggaaggctgcatcgtatctcgtaagcgaggtagacccagtggctcagccagccaaccttgaaaaggctcgtcgaacagatgaagaggggggtttggaccaatattgcgatttccacaaacgatctggccattccaccgctgcatgtcggcacttacaaagcattctattaaacaagtacaagaagggcgacatcgaggttcagcatagacaatacaaaggccacaacaacacctacgcggcacgaggaggccgaggtggcaacaatgtatttcaccgtttaggcccacacgccggccggcagcaagaagcaccaccaaccaatgaggaagaatgtgatccagacatggaaccccccaaacgaaatcgagaaaacgaccaacaacatatcgacgcaccagttccccgccgaagggttaacatgattatgggaggcctaactgcttgccgtgactctgtacgatcaatcaagaaatacgttaagtcaggagccgccactttatggtcgtcacctacggcaaaggagatggcccccctaaccttcacctcggaagaccttctcggcgtagatctggcgcacaatgatccgttggtaatcgagctccacattggagaaagtgaagtcactcgaatcttaatcgatacggggagttcagtaaacgttatattcaaagatgtcctgcaaaaaatggaagtccatgaacgtcacattaagccgtcagtccgccccttaacaggcttcgacgggaacacattgatgacgaacggaacaattaaattaccgatctatctgggaggggcggcaacatggcataagttcgtagtcgtggataagccagtaatctacaacataatcctgggcacgccgtggattcacgacatgcaggcgattccttcgtcatatcatcaatgcatcaaaatcccaacaagcgtcggcatcgaaacaataaggggaaaccaaaagttagctcgtacgtgctttttaattgaatgcaaacttcgaaaggagctcgacttatagcaattaaaggacgccgaacccaaggaatctgtcgaaccatccactaaaaagcgagcttccgaagccagcagtgacgagcccgcacctaagaaaagagcagaagaagaaagttctcctaccagagaattggtagttcaggttaacatcaatgactcaaacgcagagcggtgtgtggggatcggcgctgatcttgctgaagatataaagaccgagctcataacatttcttaagaggaacgtcgcaacgttcgcctggtcaatagacaacatggtcggcatagatcccgaggttgcttgccatgaattaaacgttgacccaaccttcaagccaattaaacaaaaacgatgaaagcttggtccggagcgctcaaaagctgttaaagatgaagttgataaactcctcggcgctggctccattgtcgaagttaagtaccccgaatggctggcaaaccccgttgtcgtaaaaaaaaagaacggcaaatggagggtttgcatcgatttcacggacctcaacaaagcatgtcctaaagtgctttttaattgaatgcaaacttcgaaaggagctcgacttatagcaattaaaggacgccgaacccaaggaatctaccgaaccatccactaaaaagcgagcttccgaagccagcagtgacgagcccgcacctaagaaaagagcagaagaagaaagttctcctaccagagaattggtagttcaggttaacatcgatgactcaaacgcagagcggtgtgtggggatcggcgctgatcttgctgaagatataaagaccgagctcataacatttcttaagaggaacgtcgcaacgttcgcctggtcaatagacgacatggtcggcatagatcccgaggttgcttgccatgaattaaacgttgacccaaccttcaagccaattaaacaaaaacgacgaaagcttggtccggagcgctcaaaagctgttaacgatgaagttgataaactcctcggcgctggctccattgtcgaagttaagtaccccgaatggctggcaaaccccgttgtcgtaaaaaagaagaacggcaaattgagggtttgcatcgatttcacggacctcaacaaagcatgtcctaaagatagttttccgctcccccatattgatcggatggttgaagccacgaccggcaacgagttattgtcattcatggatgctttttctgggtataaccaaataccgatgcataaagacgaccaggaaaaaacatcttttattacagacagagggacgtactgctacaaggttatgccgttcggactaaaaaacgccggggctcgctatcagcgattggtaaaccaaatgttcgcccctcagctaggaaagacaatggaggtttacattgatgatatgttggtcaaatcaaaaaaatccgcagatcacattgaacacctaacagcctgcttcgaaacgttgaacaaatataacatgaaattaaatccggctaaatgttcattcggtgtaacgtccggcgagttcctcggatatattgttacaaagcgcggcattgaagcaaacccaaaacaaatacaagcaatcctagatctcaaatcgccgcgcaacaaaaaagaagtccagagattgacagggagaatagcagcgttaaacatattcatcgcgcggtccacaggcaaaagtttgccgttctaccaactactaaggtcggcaaataagacattcgaatggacaaacgaatgtgaagacgctttcagtgaactcaagcggtatttgtcaactcccccggtgttatcgaaacccgaagaaggcgagcccttatacctatacattgcagtatcaagttccgcagtcagtggagtaattgttagggaagaccgaggagagcagaagccaatcttctacgttagtaaaacgttagaaggggccgagctaaaatacccaacgttggaaaaaattgcctacgcagtccttatctccgcacgaaagcttcgaccttattttcaattccactcgatcatagtccagacgaaccaaccattacgtcaaattctccacagcccaggacagtcgggacgcatggctaagtgggccgtagaactatcagaatatgacattgaatatcaaaaccgaacgagcatgaagtcccaagtgttagcagatttcatcgtcgagctcccgccgagcttagcgaacggcctcccggttagcgagaaatggagtcttcacgtggatggagcgtcttcccagctcggttcaggcgtcggtatacgtctaacctctccaacaagggaaatcctcgaacaatctttccggctcggtttcgaagcatcaaataatgaggctgagtatgaagccctgatcgccggccttcgtttggccaaaagcctcgacataaaccagtttcaagcttactgtgattcccagctcgtcgcaagccagtacaacggagagtatgaagcaaaaaacgaacggatggacgcctatctacaaattgtccaaggactggcgaaaaccttcgacgtttttgcactcgataaaattcctcgaagtgcgaacgctccagccgacgcacttgcaatattagcttcaacatctgatccggacctcaggcgagttattccagttgagtgcattgacaagccgagcatccagaagggacttttcgtgtgcatgatcaccgagccgataacagacgatgaacctcctgacgttgtgtcacctaaggactggagacagaaatttatcgactatatcgctgacggagtcgttcccgaagaaaagggggaggctcgtcgcctgaaagcaaaagcagttaaatatacaatgatgaaggagcacttgctaaggtggacgacatcaggagtaatgttgatgtgtttaagtaaagaagaagccgagctagtcatgaaagaaacacacgaaggtgccggaggcaaccattccggaggacgaagtttggcggccaaaataaagaagcacgaccaatattggccaacaatgatcacagattgtatccgtttcgtggccaaatgcgaaccctgtcaaaggcatgcttcgattattcactctccaactgaagctcttacaacgtctacggcaccgtatcctttcatgcgctgggcaatggacattgtcggcccattaccatcttcgaacggcaagcgcttcatgctaataatgacagactatttcactaagtgggtagaagccgaagcttataataagatccaggctggagaagtacagcgctttgtatggaagaatatcatatgccgacacgggctcccatacgagataattacagacaacgggtctcaattcatctctaggcaattcgaagacttctgcgccaaatggagaattcgcctcaacaaatcaacaccgcgttacccacaaggaaatggacaagccgaggcaacaaacaagataatcttggacggacttaagaagcgactcgaggcaaaaaagggagcctgggcagacgagcttgatggagtcctttagtcacacagaacaactcctcgacgttcaacgggcgcaacacccttttctttgacatacggaattgaagccatggcacccgcagaagtaagcgtcggcagtttacgcagaactatgctcgtcaataacccataactcaataaccgaatgctcttaagtaacattgacgacgcagaagaatttcgcgatagcgccctcctgagaatccaaaattaccagcaagccgccgctcggcattataacaccaaagtaaagcctcgatccttcacagtcggcgatttggtcctccgcaaagtctacgaaaacacagccgagcttaatgcaggaaaactcggcgctaaatgggaaggcccttatctagtatccaaagtggtacgcagtggcgtttacgaactactcaccatggccggcgaaaacattcctcgatcttggaacgcccacaatctgaagaaatatcattcctgaagaagaagttaccctacaaacctctgtttatccacctttgaataagacttatgtacgacaactaacatgtgaactacgatcggcttgatcccctctgaaggaggggtacgtaggcaacccactctcgggtgcagctgtcctttgtaaaaaaaaaaaaatggactccttacttcaaggatacactgttcaaaacgggcgaacattttaaagccgggcccagaattcattttcgaatgatttcccgcaaaactttgctcgaatgatggaaaaagtttagccaaccttaggttgcataaacatcaattcaaagcaaaaaggggtaagccgggcaccagatggcaagataagccacccgcaccaaaagagaatccagcctaactaaaagttcggcgtaaaatggataaaagccgggctccagtgcaacgtgttttagtgtcacccgcaataataagggtcggcagaagacgttctgcgacccattaagcgaaaaagacacaaagctgaaacacaaaaagttttgcaaagggaaaccagatttttcattaataggataaaggtgcaaacaacgtccggcgaagcagataaaaaaaaaaaacaacttaaaagcaacataaacaaaagaaacaaaaggaagcagagtaacaatcagggccctctcgacgagctagcctcatcctcgtgaagtttagcacgacagtacgccctcagaaaaggcggcagtgggttcaacttgcccagtccgaagcgttcccagtccttgggatcggcctccaacctcctcattccaagctccatttcctgcatcatgcggaggagctcagcatggcggcggcagtaagctcggtgttgcccctccaactgcagaaaaccaccatctaaaaaattcaggattcaggaaaaagcaagaacatgaagaaagattctttaaattaacttaccgtgcgaaaccaatatcggaatcgcgccgcctcttcaggatgaagatgacgaagcagatccgccgggtacttcacactgccgggaacaaaatcacgaccgacgggagtgaatgacggcgaggcggcgatcaatggaggcctcctccaggggtacagcggttcgccaactggaagcgccgggcggcgaatcacgcgatcctccactacgcagatcggagaaggtgaacggtcacgacggggacacccgaaataaccacggatcgacgtcgacgaggaatcaagctcatcatcggaatctgatgacgtacctcgagagacctgagaacctgacatagtcaagaatattctaagaaattttttttttttcagaggaaaggcgaagagaaatcgttggggtgaagaacactcatctccgagaagttccttttatagagtccgagcaatgattgactccttggacgagacgcctcactgactccttgcagtgaaccgtcgcttcgtttggtgtgacacgctataatgattaaaaagaaaacagaacagaacacggcaacatttaaaacggtacaatcacaagcacaaatagcaaaaaaccgcattcattaatgcacaggagggtacgaattgttcaagaaagggaaggagaaatgatgaaaggacaaagttcaacaaaagcctcaagaaaaaaatagggcccatagtcaaaaagagacgagcatacatcaggctcgccaaagacaagaaccaaagaacaaaatgccaactcaaggttcggcattcgaagctagtacggaactgtccccaatggtaggcgcagtctcggcatgtgaagcaggaacggggccgtcttcagtagtaatcacggccgccggctcatcatcagagatcgtcacaatcgccttcttaactcccgcagaaaccaaagcagcgagtttaggatcggtgaagaactcggttatgggatcaatctcgcaagccgccaggaccccaagtttcgagccaaattggttaatccggaagggagactcctccgaaccctgcacattttccgtcgaaccatgaggagcgacaggcgtgatgaccctcccgccgttcaccagctccgtcacgttgaacgcgtcaattttctctttccactcctcaaactcttcaaacgtactcgccggtatagggattttatcctcatcggctagaaacttcagacagctaagtgtaccggttgcttgcgcatgcatcttcaccatatgcgaggcattttcagtctcggcaatatggcgaaagaatttttccgagcgttcgtaatacttgttcagaagctcggcacgcgtcttcgcatttcctctgcgaacttctcttcccgaaaacgccaaaaaatctctttctcctcagccaaccgggcctccagcagagtttgttgcctcagaacattctcgagcgtcgcagcctctttcgaacgctcagctttcagaacaacagtctcttttttcaaggctttcaactcctccaaacccgccttagcttgttgattgttatcagcaatggtacgctcggcattctttaatttgccctcgagcaccagaatcttttcacgagccgagcgcagattgcgatcataccgcgagatcaggaggttattcgcccatacagcctgccaagcgcacatattgtcttctgggggagtagagaagagaacgtcattctacgtgcagctaacctggcactctgcacgcgctcacttctcgaaaaggtcagcctcggccaaaaactcatgttccggttctccgggagctccaaccaccttccgaaggaaacgagcacattcaacccggtcggcagaaaacggggagtccctgactttgtactcatagcggaatgagtgatcagcaattgccaaaagacggggcccggctgaaaggtcgacatcaccgctcccgatacgcctccttttgtccaaagctggagcgacctcttttgaagaacagggacgcttagagccaaaggtatcagggccgctcctctccctatccacgctgcggccagatgatcctttctgaccaacggtgattggacgagctttgtccactcgggtcacatcggtaacgtcccgacgttcggcgccagacgtaccctttttggtcttatcctcatgacccttgcgatttttctcggctacatcaagacgagccttgtcctcatgagttttgtcaactatcgctagacgaggtttggattcagcctccttgcgagctcgtttctcacgcatgagggttgccaagttaacattttcgccggacattttctttggacgggccgaactcttttgtttttgcggtttgcgcttgttctgtttcttatgcttcagacagggaacctgtttccagtcaatcggagcttgttctctcagagtctcggcctgatcaaggattcgtcgagagcaatttcgaaggattcgaaggttcggtgtgcaaaaaaaataataaaaaggaaaatattaaacgaaactcaagacaaaaagaaatgacgaccctaggagagccggacagaggcctaaagtctaccataatcaaggttccattcagtcctaaattcaaccgaaggatcctccacaaggttccggtccaccttagcatagaagtatcctcctaaccagtcccgggtctttgagggttcgttttcgagaatcttgaaacccctaactgagctaatataatgctggccgagcttgtgaggtactttactgaaagaagtaagttcttccataagctccactgaaaggggaatgccgcacctcgcgcaaagcatctggaggcaggctgcagttcgtatcgaagcgaccgtcagttgggatatagcaatctgacggttccgacagaatcgcatgagaaagtcgggaataggaaagcgaagtcccgtctcggtgaaaaacccttcgaagagacaaatgaacccctcaggacaatcgctcggccgatccgtatctcgtgggatcctaatagttagagggcccggcaacaagcaaaagtcggtcgttcggccaacagattcacgggtcgacgtagtgggtcccagatcgaccatctcgttttttctagattcacccgaaacgttttcatccgccgattctctctcatcgtcggcataacgattcccagctccgtcagaatcagtatcatctcgcaagctcggaacaacggtaggaacacgactagagaagggaaccctatctctaacggcggagatttcgcgacgatctatcccggaggaaggaacctcagcagattttccacgatgagtcgaagacccgacagaatgacgagacgactcctcggaccaacctattgaaggagatttcttccctgaaaggtccgaagaagtcctctcgcggatgtaagagtcgacagagttgtttggagatgaagaacccattgcttgagacgagaaaaacgcagatttggaagaaaggcagaaaatgtaacagaaggcacgaatacaagagaatgcagaacgaatcagaaaatcaaagtcgaagggtcgaagaaagttattacctttagagcagagtgcttcggagacggctgatgttgatttaagacagaatagactttccgggaacgacagaagtaatgggctctatgcctaaaacctagcaataatgattgcagctgggcccgcccaatcgtcttcagggacttcacgcgcggcagggaaagatccagaagcttagcagctggcagcgtgaaactgtacggcttcctcaaggtcctgagtggatttcgaagggggggagtaactgttggacatgggcttcgccccaccaacacgtttaaaagcccaacacatcaaaattagtaataaagaaggaaaggagggaagaccggcccgttaaaggaaaaagagcccagcatcagacgaggcccgcctcaaggaagctgttggtcaagagaatgtcccacatcgagaagaaccctgaacgatagactgtcctttcagtactataaatactgacaaaggaatgtcagaaaaaggaagaggaaaaagtggcagagaaaagcaatagaaacttctaattaagattcaaaaagcataagtctagttttgacttgtgaagtctgtattaaataagtttaagctcggctgtggaaacattttgtaaacatccgaacttcaaggatattaataaagatcttccttaaggctcggcatttcattcttcggtttggaagttcggttttatactccaacagtgaagtcaggaatgacattgtaacttctttctagtatgataattggtctccgttggggtccctaatggacataaccggacgcagaggagttatcgatctgggagttggtatcagtgctaccttaagtgatgcgtggcggactcggagaaggcgacctcacctgataaaggctctaaatcagattgaaaataatttggaacagaaacgacgagaacgtgttgcacttcaggctgatttattttcaactcaagacacatggaaccccacacaaacgacatcgagcaaagtcgcttggcataagggagtatagtttacccatgcgattcccagatactcctttggtacgcaatgaaaaatcggctttcaactgcagatagaatgatgagatgggctacagatttgacatcaacatgtgttctatgcaatagttaaatcgagacgagagaccacctattcttcagctgtacctactcgtcgagaatttggactgctctagcaaagcaactactctaacgccaattctccacgacttcgaatgatgtagtaaacatcatctctacggttcagcaaaacaggatccgcatgttcctagtttgatacagttttcaaataacaacacattcgatatggcgggaacaaaatggaaggaagcatggagagcagcctgacactagcagctaatcttttcatgtggatggataagaagattcaaaacaaactatcaatcatacgtaaagagagagacaatagatacgagccaagccttcaagtcatatatttagtttcaaaaaactttcagcaaaaatttgcatttgatgtacccaaattaaacgttttttttttttttgaaaggtgattttctcatatattgaataagaataacatgaaatttgaaagaaacagcgtgtagttagaaaaagatagaatgaaatttattcaaacaaaatagcgtaaaatgaaaatataacatgttgagagaaaagatgtcatgatacatgaaagcatagcatttgtaaaaataaaataaattggaattttaaaatacttgcatgatggggcataagagcatcttcattagacattctttataaatgtctttaatttaaaacaaatgataataataaaattaaagacacaaatctcaaattaaagacatttttcttttgtcgtgtctaaaacgtctttaggaagacacaaatctcaaattaaagacattcatcattttattattattcttttttatagttttatatttaaagacattcacaaataaatgattaatgtggatgctctaaggggacatgatgactaaagatggagggaaggaaaaagactgaagagtgacaagctcatcggcgttcgatccatcgtgggaaggagaaagatctaatcatcgagaaataagaaatatataggccctgttcgtttccctgtcgctggatccagcgacagcgaccagcgacagcaaccagcgacagcaaccagcgacaacatacattgttcgtttgtctgtcgcttgactcagcgaccaattacagcgacaatcgctaataattgtcgctgtgttgttcgtttgactgtcgctataaacagtcgctatatttttttaaaaaattaattatttttggtgctaatttatattttaaaattaaaatataaatcatatatatcatacaccatgagaaaaataaattaatatatttatttattttagttttatcaaatttaatttgactataattaatttatgttatttgaatttaatttattttaacttaatttaataagaattatcttaattaaattagaactcaaacccttcgtgatatcgcagaaaaaaatattataaatttgtttatataataatttctttaaaacaaatctaactccaaatgatgcatattataaatttcgtagttattcaatagtatatatataactaaccggaaaaaataaccgtaaatattttgacagaaaattacaatataggaaggttacaataaaagacacaagcgagaaaaaacaaccgtcaatattttttacggaaagttggattaaaagacacaaccgttcagagtacaaaaagacatttatttaaatttaatttaatttaattctgtttaatttaattatttttaattattttttaatttatattttttgatcgctaagttgttcgtttgcatgtcgctgaatccagcgaccaaaagcagcgactaattgctgaaaccagcaattgatcgctaaaaatttcagcgaccaaaaattgcagtcgccggtcgctggcgactgtcgctacttttggtcgctgaaccaacgacaggcaaacgaacaacttttggttgctgtcgctggtttcagtcaccaacgacagacaaacgaacaggaccatagtcctcaatctcgtcgacggtctcatcttctaatcattgttcagtttcgtagatggaagaaaaagaaatagaagctaaacaataataggtggggggtataagtctataataacatctgtcatcgagatgaacctcttttgattcgattaagaatgtatttgcacacggcccatattaacgaaggccttatagacaccagttttatgctctcattgataaacattgcataatatcataatatcataatgatataagttacataataaaaatccgtagaataaaaatttgcagaatgaaaaactgtacaataaaattatgtttaaaatatgttgaatggatatgcagaatggcaaaacaaaatattatattaataatatatataaatatttatttaaacttaataaacaaaataatatttttaataaatttttaataaattaataatattggctaaatcattttcatttgtttcataagttaataatactggtaggaatcagtttatctactctctttttttcttttggttaactaggaatctgtatttcagtactaaatcctcttgtacaaataaacattccatgttgtttcttactcaaactcaaaagtataatatgaataagacgtaaaaaaacaatagaaatgtatacttttgatcggtaccaaataacacaaatattttttcttgaaaccagttttaataataaacaccacaattttaagcttcaacgataacatgaaaatgcccaacaaccatcatcatcaatgaattgttgttacaaaagatttcagtttcttataaataatatttattttgaaaaatatattgagctttaacaactagtataaggaacattacaagtctctaaaactttgcgagcgactagagagatagtaaacatactatataatgggtttttaatgtaatcacataaacatgtcttttgcttaatcagattttcgcaacaatctttagtcggttgttctcttttggtcattgcaggtaagcatggcatgagctccatcggaacacatgactgtgtctcttctgctttcatcaaaataggagatgacaggacgataatcacaaatgtgatgaccattagtgtcatgaacttcatgtcttcaaaatctgatgactcttcttttgtttcagtttttttttttttaaaatatatatttgagatttgtgttgaaggtttttaagatggtaaaactcatatatataagatttacatggttgtaacagagaagtcaaattagtcttacctcggtaagaaaaactcgtccacttggccatcatgcaaaatgaaatgaaggtccttgcttgttttacaaatgctcacatgaattgagtgtgtaagttgcatagtgatgatacatgcgttaaactactgagagaatattccaaatataaacattatgactcataaaagagaaaccgtcatataaactcaaaataaaactaataaaattttgcatgtattgccaaaaatatccctattaactttgtttttttttttttttgaaagaatgtaaaattatattcaaacaaaaaacgtttatacaataaatgctacttcatgctgaaatttagaagagaagtagaaacagagtttgacatagaaaaacagaacactcgggctaagaggacgagcgtgtggagaaccaaagctgcaggccatccttgtaacgatggttgctagtggctgtgattgtgctgatacggttccgtacggttccatcgattagcttgatttgtcgagttgttgtggtaggtatccctattaactttgatatagcaaaatataataaatttatgttgtctttcttttactttttttggttttttaaaataagttttctcatatattttttaatttttgtttgactataagtatgttcatttgctcgctccaaaatgatattcgcttttgtgcataaataggcaaaaatggtaatttaaatgagtttttaaaattcatttaagattttcaaactcgtctggatacaccaaattagagcatttgaatggcgatagttcaggcaaaaataacaaatgaatataccttgaatattcaaatgatcaagttggctccaaatattagatgaggaacgaacatatataacctaaatgataactttacaattattttttttttaaaacagaaaatcatatttttccatcaaactataaaatcacatataaaaatagtaatatcacgtttttcaccaaaatcgctaagttctattttttgccaaaactgtaaaatcacattatctcattaaaaccgatgaattgtataatatatatggttttctcattaaaattatatccatcaaaaaccacaaaactgtatttttcgtaaaattatattttttaaaaaaatacatgtaatataaatatatatatatatatatatatttatgtttcataaaagcaaaaagaaaaatgaatctcaatttataaatgtatatggatttatgcgaccaaaatccatttgttactaagaggctcttggcattggctcgtacatcccctcatgtcgggagagaccagagtatttaatttggtttctttcatcccaagctccattcaaaccatctacctctacggtttgttgaaatactttactaattgagttattgacattcgacaataacttgaatattaatttgttgtaaatatactttagattaaagattcatatagttaaattaaaaattgtggttaaactaaaacataagtattttagttattttctaacgttaacactatgatgttcaatatctcaaacatcaacaagtaggataacactataattttgttaaccattttaaagtcggaaacgaagaaaaaaaaagcatacaaaaatgtagaaacatgtgtgcttatgtttgttaaatattattatcattaacaactttttttagcaatatctcaaaaatcaacaagtaggataaggaacaccacaagttgctaacgttttcttagcatttgcagaaccaacatattgactatatcttggatctttaatatatgtacaaaaacacggctgttgctccttcagtttcccgcaacactctgtagacggtggtactcctgtgagcattggtgttgcgcatgaactaagctgtactgcatcacacgttacatcagcttctcctccagaaagtttgacctcagttgctctgattgaaactggagaaaccatgacacccaccacgaacacaatgaacacaagcgccgtgaacttcatgtcttcaaactctaggaacttttctcaactttcaatttttttttttctttcttaaaatgtgtatttgagaatgtgatttgattttcaggatggtagaactgctgttatatagatgtagttgtaacggacaagtttttaagtttggttttattaatacacgttcatacatatggcaatcatgcatgaaaacgtggaaaataatgatttactaattctaaattttaacctacctagggaattactaattctcattttcggttacccctccaatcttttttttaattatatatcatcttaataatcgaatagatatataaaattctaaaagactaaagaccaatttaattgactgatcgttattgaacgttaaaatggagaatgcatggtgtgtcaatgtagatatacgtactaatagaataacatttgtaccgtataacatttttgaataacataaaatgacatgttatggtaaaaaataaatatactaacagaataatttgttatatcgttttcttcaaagaaacaggccataacattacattcttttcttttgagccaaaaacatatttaaatcaagatggatttaaactgcttttttagtcgccttggcttgaacatgcttgagatggttctagctatatttaaagaagaatagtgcttggatagggtagaggacatacgaacgcgaatgtggggctcttttgatcataataaggcgatctgcttcgtggaattcattcggtgtttgattaaacaacatcttcattcgcattgtgatgttaggcgttttacagatacatgaaatgatttgtcagtttctcatgaccaaaacatggttcatccgctagaaaattagaaaagtgattttgagactcgttttaaaaaatctttatgaagattaaaccgtttggactgactgtatgattaacttttaagaagttttttggtactttttatatttttgaacagttccattaatgatctatcgtgtatcacggtcacattgttactttgttagtaagaaaaaggtaaaaatgtcaacaaaaaaatacgaatttttgaatttgggacgattaaatcataaactacgaggaagacaaataaatttaaaatcgtaaaattttggttaactttaagtttaaatgacaaagtttgattgaccagtcacttaggcatggtgtttagtagactaattaaaaacttttacgatattaaactcctgttagtcgtctctgttgtatctaaacgacattgttttgtcagttgaaacgagacaaaatcgccaaatcgaaactcaaatcaaaatcccaaaaaaaaacatcagttcaaatttaccattattattatttaaaataaatcacttaattattgaaacacgggaatagactctcagccgtcacacctactgccctccatcttaactggccatgcattggatactataatatgatatgtcacctcccaattcaaaaccatatcttcaccatcgactcattgttacataaagatttagttttaaatttttattattattgtcattaatagcttgttttagtaatatcacaaacatcaacaagtaggataagcaacatcacaagctgctaacgttttacgagcgtttggagaagtaacatacgaactatacaacggattttgaatgtatgtacacaaacaagtttcatgctccttcagtttgccgcaacaatctgtagatggtggtgctcctgtgcttactgctgttacacatgaactaagctgcgtcgcatcacacgttacgttcacttcttctccggaacctttgaccacccttgctttgactggaactggagacaacatggtacctaacacgaacaaaatgaacactactcccgtgaacttcatgtcttgaaaatccttttcacagctttatttttttttttctttgaagtatatttgaaaatgtgttttgtgattttcaagatggtagaactattgttatatatagtagatgtagttgtaacggacaagcctttaggtcttgtcttattaattaacgttcatacatttggcaatcatgcataaagacgtgaaaataatcatgattcacaattgctcaaacacatgttaagtatgtggtacgtccgttatagtatatgtataattttttggacctagttgtataagctgtatttaagaataaatatcaagtgggtctataaaaaagttagaagaaagtttcatacgtgttaagtttgtttacgtccgttaaagtagataatttattgggcctaatatgggctgcgttaactaagataaagtgggcttcttaaaaaagtgacaaaaaattgtctgagcccgggttcgaaccggggacctctagtgtgtgagactagcgtgataaccgactacaccacccagacgatttgttaataatttgagaagcttatttatattgccaaagttacggatttgagtttctgtgattcttgccattattcatgctacttgactacttgagtcctcgtcctcagatttatattcccagaagaaacaaaacgtcttaaatattctcccaggaatatcaaaatgatgataacaacttatcaagcatcttcatcatcactctccggttgtttctttcttactcaccggtacgtttactattgtccatttataattcgattcttgtattgaaaaaatctctgggtttgttttctttatgtgttttgatggtttggtgataaaaaagattggatttttaattgccactttacattgttagaacaaatgttgaatcgagcaatggaaaattccgacatgaagaggaacagttctactttgttggatttaccagtcgttaaggtaaaccaaaaatcttcaaattggattgattctccttaaagctcaggatttgatgatgtttctttgttttctttgggataaatttctgtaattagtcgtctttagttgtggaggctatacatatgtcaagaaagaaacttggttggtacaatgagagtagaagagattcagagactgtaaaagctagagtagaagcgggattgtccgaggtaaagaagtcggtggaggagctcgcgttactgataaaaaggtcgaatcgttctgcggggtttcaggaaaaggatatggaagtgttgaagatggaggaaaagtatgcggaagttatgagagttttggaggttgtgaaagaagaagtgagtagagtgaagcttgatgtatcatctgttttgatagagagagttgcagcagaggaaaaagtcgaagaactgcggtttaaaacggaagggggtttgagattgttggagagtctgaagaaggaaatcgaggttgcgaatgaggaacatttgatggttgcattgggaaagattgaggcgttgaaaggatataaagagatagaaagacagagagaagggaaagctataaaggttttggatttgttggtggaaaggaataagagaatcaagaacatgttggaagaggcggaaagatcgaaggatattgaaattgagttgtttgagacgagtacggatgttgagatgttggaaacacagttaaagcttttcaagaaaatggagaggagagttcaggggagagatagtagtagtatgtcgagatcaaaccgttcttttggaagagggaagtatagtttatcggttttgaaagaagtgactgaagggaagaaggaggaacttgcttctgttaaagtagagatcttcagggtcatgacagtaatggatgcgttgaggaatgagattatccgagccagggatgaaacagcttgccttggaaaaatcttgagggaagatgatgttaagattgagaaactcaactcaaagattcttatcgaaaaatcgaagttggaagtggtatctatcgccgaagaaaggattagctctcttgctgagaatttcgttggttcgcttgagaagataaagaaaagtagaaatgctgcaaagaaagaggagttccttttcaaagaagagaagacggttacaaaggcggaaacacagaaaaccaaacttgatatagataaaaaggaaagcgaactgaattcaaagttggatgagcttgaaaaagtgaagcacactgaggctttagtgcttgagaagcttgaatctttagtagaagacatgatggagagtcgcgaaatggagtctgagcattgttcaacaatcactatctcgaggtttgagtacgagtatttgagtaaacatgcttcacaagcggaagaaaccgcagagaagaaagttgcagcagcagcggcgtgggtggaagcactcaaggctagcacaaaatcgtttctgatgaagacggaaactttgatgagagaaagtgaaatgacgaaagcggaagaagagagagaagtgtttaggatggaaaggtcattgtcgacgaagagattggtggagggtgagattcagaagattaagaggaactcggaagctgaaggctatatttctcccaaaccagttggaaaattcacaccggtccaacgtgggaagccaagaagatactcatctgttggaactccaactttctttgtaatcaagaagaaaaagaaagttccacgcttggccaagttcttcagtcgcagaagttaaaaactcaaatcattttgacttctgcgttcaataacaattgctagaatctctaagaaatctaaattctatgaaatgattcacattcacattcttgttcttgttcattgttgtgcatgatcatataatacatggagtagactcattctagcatacgattggtaaccattgttttcattggctttcaacatttatttgtatgttgctgatctttatgaatacactaggccagttagaggaagaatttttctcctgggtctgttctgtcatgaacttagagtttctgtatgtaattttggttatagttgtctgaaaatgttgatttctgggtaccatgtagtgcatatgtttggtactggtttgacaatgtgtgagcatagttatatgaattatttgttctatatcttttttgggttcatggtttgtggaatcttaaagagcaacaagatctagggtgttggtcactgttcgctatggtctgtttctgtgaaagttggtgtctaactgataccataatcaagaaataggatatatttatttttactaatgtaaatgtttgtaaaatcgtttgcttgtttttatgccattacatttctatcatttgtggaagttaagagttaccaaaatcagaactcaataaacttgatgtggctttgatctaatccaggtttacttgtgtgacaacttcattgatgagactggatcacatttagatgagttgtggcatattgatatctttgggttcttgaaattacatttagactatgtgctcttactatatagactgaattcggtcatcaggtttcttctacgcagcgcgtggctttcacggaaaaggtctgcgagtggttctttcgtatgtatgcctcacgagctccacgaggtatatccttactaacgtgtgagtattaaatgttttcctctttattccagaaaagtttgttcacaatctttaaaaggaatctcttagtcattggtacactcttaaatgactattattacgttatgattctagctccatatatagagaacccttgttcttgccaaactctacatcttcaaagatttttcatcatctgttgtgaaatataacatgaggaggccaaagtcatctcacgtcaggatggaacctgttgcgcctcgttcacataacacgatgccaatgcttgatcaatttcgatctaatcatcctgaaacaagcaaggtaaatttagtcagtcctagttctgtgtttttggcttaaagtctttttatgtatgtttctttaacattttggtcttaaacagatcgagggggtctcttcgttggacacagctctgaaggtgttttggaataatcaaagggagcagctaggaaactttgcaggtgactgatattaagagatgtttagagtacctaaataggaaaaaagagtgcattgacacctaaatgctaattcttcgacttgttttggttacctacaggccaaactcatttgccgctatctagggtcagaaagattttgaaatctgatcctgaagtcaaggtatgtgaggttaacttgaattatgttggctggtctagagtttctgaaattgccattatgatcaaatttgttagtctgttgagttttactgttagaatgttttagtgttgtttatttttactgttcctttgacatctttctaaggttgatatcaatacttatagacaagatatatgtgacatcaaagatttgaagaaatatgtttgttattacaattttttcctaagatatatgtgaattttcagaagataagctgtgatgttcctgctttgttttcgaaagcctgtgaatacttcattctagaggtaacattacgagcttggatgcatactcaatcatgcactcgtgagaccatccggcgttgtgatatcttccaggccgtaaagaactcaggaacttatgatttcctgattgatcgtgtcccttttggaccgcactgtgtcacccatcaggttagctccttttcgcaatcttactcgtgaaatcaaaaaaattatgttttcatgtgctaaatctttctgttcagggtgtgcaacctcctgctgaaatgattttgccggatatgaatgttccaatcgatatggaccagattgaggaggtgattattttacttaataattggtattatctgaaacaaagcattttaatgcgatgctaagttagaattcatgttcgtttattgcatttgcaccaaaaccaggagaatatgatggaagagcgctctgtcgggtttgacctcaactgtgatctccaggtagttttctttgagcttctattcatacaacaattgcattagtgtatagtttctgttttgcaaacattttagattgaggatgcactagtaaacatattgttagagaacccatttagaaaagaacttcatagtagcttcaatttgagagcaatcttgctagcatcattgttaggacttaacagatttgtgcatagagactaactagataggggataaatatataaaggtgtatccagagaaatccatgagacatttggcatttgcagtatttgattcattgaaggatttcaatttgatatcttgttgttttttgagtagttagttgatacttgttgatgaatgcgataccgagttaatttacttacggactgcgaatagaaaataagaaaccatttggttgtttgttccttaagatttatgttcttgctatggatttgtacttgtggcttcggatctgcagtgaacatgaagctgctctggaagacaaaaacttgaagaagagaagaaatctgaagaggaatcacccaacaactctatgttatgttcaccttataatagtttatcataaactcattcactaaactatgtgtattatttattgttcctgaataaaaatacaatgtttcggtgtttcctcctaaaccaaaaaagaataatacaatgtttgatatttttacttatgtaatttatttttttatttattttattttgttttttttgtcatttgcacgaaaaagttttctacacattttgatgaacacgttttaggtggatctattttggtttctctctttaataatgtccatgggtggggcacaactctgtacaacaccataacttttcgtatccttagttttgtatggccactcttttgccacttcggaatatttgccaaaactaatgttaaccaaaactaatgcttgtcaaatcatattgtaccgaaaaatgtaaagtatggtgccaaagtaaggtttaacatcaaaggacaccaaatgatgtcgaggaaggatgtaattaactaatggtatgacatgtaagcaagagatatatttttcttctatattctatgaaaattgtttaccaaaatatgtttgtttttaagtatggacggtgaagtaaacgacactccgtcatataaaatcaaaagttcaaatatttcacatgttcttgttctatagataatatttatatagctgcttaatgtcccattacaatttttaaaatacttcaggtcatccgtatgtttttttttgacatctatattagattagcttaaacaagtcaattctgaaaaatattatttacatagataattaaatgcttttgggtacgaatagttcatgccaaattatctgcatgtttttaagaacaaatactaattctttctactgtccacatccaatataacgaaaaaatactataaatataatatgcatcgttaaggtggaggtaccaagttttaaagatatggcttcgagtatttctatatgtgtctatgccatttgatttatttctatcttacaaagtttttcatcttcttttctatagacgcaaaatggtagaagtgaccgtgatatcttcaactatggtacgacccgaaaacataaaccaaacgggtcgtcaaaaaatccatctaactccacatgatcttgaccttctttatcttttttatcctcaaagaggtctactcttccacaaacccgacccggaaaacagtatcattcctcgattaatggcttctctttccactgccttagagatttatttcccgtttgctggtcgtctcgtcaaagtaaacaatcacgaagatgatacggtgtcgttttacatcgactgtgatggtttgggtgctaaattcgtccatgcgaaagccgaatctatcaccgtgaatgatgtccttcaatctcatgggtctgttccttatttcatatcgaaatttttccccgcgaacaatgtccaaagccgtgatgcccttgtctcggagcccttgcttgcgttgcaagtcaccgagatgaaagatggagtgttcattagttttggttacaatcacatggtggccgatggtacttgcttctggaagttctttcacacttggtccaagatttgtctgaatggttcggatcctagtattcagtctattgttctcaaagattggttttgtgacgggatcgattacccggtacatgttccggttttagagatggagacgctaccacgttgggaaccttcaactaaagagagagtttttcacttgtcaaagaagaacattttagatctcaaagcgaaagccaacaacgaaattgacaccaatgatctgaaaatctcgtctcttcaagcggttgtggcatatctatggctatcaatcatcagacacagtggtctaaaccgggaagaagaaacacaatgcaatgtagcggcggatatgagaccgaggctaaaccctcttctcaagaaagagtgttttgggaatgtaaccaatctcgcaacggctacaaccactgtgggagagctgttggatcatgggctaggctggactgctttgcaaataagtaaatccgtaaggtcagaaacaaatgagagttatgaagtttttgcaaagaattgggttagaaatgttaagagaccaaaaacatcgtttggaagtagattggctaacaattctttgatcatctcaagctctccacggtttgaagtgtacgaacatgatttcggttggggaaaaccaatcgcggctcgagctggaccggctgatggtgctggtggtatgcttgtaatgtttcgaggagttgaagaagggagtattgatgttcatgcgaccttaaattcttctttatggtctgatgtactagtgaacctgttgaccaatgatatggttggtcaataaataaaattcctgttaatcatatgtatcagagaacaagtgatagttggatcaactggagggtggaaatagttttggtttacaattaagttattgttgtgtaagaaaaataaaaagagtttttgttgtgtaaaggaccacatattgagtaaactactagataaaacatcttgacaagcatttgacgaagaaatattttcccacatcactttcttttcattgatgacaaaagaagaaagtgatgttggaaaatatttttttatcatgtttattcaaacagtagaaaaaaactcaaataaaaacgtgaatgaaaatgacaacaactaaagtttaattgatcaatacaattatcaagtgtattgaacattgaaaggattatattagttgataattcgaaggtatgttttgtatattgatagtaataagttgctaacatttttcctaaatttatttccgttaggcttggaatttggattgtgatataactaatcataaatacaagtgaagataatataaaacataatctacattatgcataatgactttaatagttcaattattagattttaaatgatggatacctttctatgatatcacgtctttgaaagtaacattagttagaggtggctggaaatgacttgtctcctctcctcaaagagtcacgtgaaagatataacaacatgtaggccatgcaagttttacttttgggattttgtttttgagtttcgaattttggattctgatgtatggatttgttataatgaaaaggtatatccaaaataaaattgtgaaaaaagagtctcagatgaagtatcacggagtctttttttttttttattatatacaaatcttggaccaagtgtgaaaaaataatatgaaggaaaaccatattggccatggccacaccatgtgattgtaactcaaactgagaagagtgttggttggtgaaagtgttaatatcaaaatgtatggaaacgtccttttaaattcaagtgtgttacaataattgtgtaattatcgattttcttgggataattaattctaattatattgtgtacaaataatcgaaacaataatttcttcaatcgctttgtttttttaaatccaaattctgatcctctttatttatcaccgataatctataatatttttaaataacaaatctaaacaatgtaaccggtaactaatttcaacatgtaattttttttttgtatttgttaatatcgattataatatttaagtcgtaatttattttttccgtatccaaattattctttttattcaattgattaagattacataatttagatttgttatattatttaataacgaatatatgttgaaattggctaacattacatagtttatgtttgttattagaaaatatggtggattcagataaatgcagggataagagttcgggttgaaaagaccacataaaaatagttgaagttacttttgatcgttttcctagataaccgtcatatataaaagggtaattgggtatatggacttcctctaaggccaaagttgctgaatctgaaatctctaactagtgtagatatctactaaaccactactcagctcacaacacatgctacacacttaagtgtctcacttcattttcgttcaatctgttttcctaagaattttcgttacaaataattatcatcttttaatagttaaccgcaaagattagtacaaacgagtcaaataaaaaactctagatatagattctaaccaagctcattaagcggatataacttctcttttattatgtcagaaattcatacaaataaaaatgacaaaatagtgattcttttaaatttttgaaatggcaaatttgattagatccttgcgaagtgttttgcccgatggagtctttggtatagagtctataaatgcgacttttcttattttcttatatggtgccacctgtttattacattaacaaaaattaataacctaaaattacaaaattttatataattgaacttagttatgcatggctttgatcattaaagcacctgtttagaaataaagtcgataacctttttctcacaaagattactctcaggctttcgtgctacgtaagccatcggaaattgtcctgcttctttatctggaaacctttgccatgcaacaaatcaaaaattcaaacaaaacaaaataaacttcttgtcgtttttatgtttaaaaggcaaaaatcttggaagtcttaacaaggaaaagaaaaatgatagtaaaactttacggaataacggctgcatcgagaatatctggatggtttagtaagagagcctctagttcagctggaggtacctgtacacaattcaaaacgttatacttttgcttgtgatttagtttaaaattgtcacaataagtgtatttcttcaagtgacatgattgagaaattttattttacctggtaacctttgtatttgataagctctttcaatcgatcaacgataaaaagaaatccatcgttgtctatatagcatagatctcctgttttaagccatccttctgaagttataatttcttcttcattcctgaaataacctttaaacacaaacaaatataaactatagtggttttgatagataactatattagtggtgataattggtaaaaaaacatacattaacattttttcaaatacttttttttaataatcggtgtattttattgcccatctttttaaataaaaatgtgatattatgtcaaatgatgtttaaataatataaatattaaaaaataagttatcttttaattcatgtgttgttgataaaaaaaaaagaatgataaattgtactttctatttaccaaaatgttatccgccagattttgaaatttattaactgtataaattgttttataagatctttggcttaacatatttttaatttaagtgttattttatttttgttgttggaataagtgtgtgtaatttacctttggcgatagaaggccctttaagccaaagttcgcccgtttggttcaaacccatgacctgacccgtattcggatccacaatcctcgcttctacaccacatgacaacaaccccaccgcaccgtacctccgactctcctccactgattctatcgaagctcctgcaccgttagattccgtcaatgcgtatccttgataaacatcaaccgttggatatttcttcataaacccttgagtaacttccttgctcaaaggtgctccaccgcaccgcaccgttctcaagaagctcacgtcgtacttcttcattatttgatccgctttgtttatcatagttactaaaactggcggcacgagaatcagagtcgtcgctctgtatttctcgacagccgccatcatctctccgaggtcaaacctcgggaggatgacaacggtcgtacctaacgctaaggtggccaaaacgaagtttagtaaaccaaaagtgtggaacaacggaacagtgcaaatgaaggtctgttgtggctgctcgaatggctccgcgatgtatctcgccacgtgtgctattaagttcccgtgagacgaattcactcctttgcttcgtcccgtcgtccccgaggagtaaagcaacatcgccgtgtcgtctttatgaacttggtttctgactgcttgtccacttggttctttcttcatcatttcagttagattcccaaccactttgagtcctctcggaacgcgtagagtgtcttctacgcgctcgaggacgatagagataccggaactggcgattttgggagccagttccggtgttgtgaaggcgagttttggattgctatccgcgatttgtcttaagatttcactagcggtgttgagaggattagcggtagttaagacagcgccaagagacatcacggagaggcagacaatggggatggagatggtgttgggagagaggactaggaccacgtcacctctccgtattcccacgtcgtggaggagacagtcggcgacacgatccacggccatccataaatcggagaagcttatgcggtggtccgtggctgcgtctatgaaggcggttttgccacggtacgtttgggaggagatgaatgttgtgatgtcgagtgattcttttgaaggaagtgccaatggtttgcgtttactgtaaaatgtggagtttgatgtgcagaaaccgttccttggatcgatcagagatgatgatctttgagaattcgccattattctttggttggattagattgatgcaagctctcatatagttgtacttaccttatggaaatatcagcatcttaataaggcatatgttaaacgttcactgaaactatctaaatatctttcactacttatttactataaatattcactataatacaaatattcgtaaaaagtggactgtcgaatcgaattaaacaaacaataaaagtttcattggacaattaactttttacgaatatttgtattttagtgaatatttagtgaaacatttttaaatgatttcagtgaaagtttaaaatgtgtaattaagatttgtatttcagtgagtagtgtttgtttgtttctgatttttgtttttttttgtaatgtatgtaatttaatttataatgtagaatatcaagcaatttaaacaaatttagtaaatgcaaaaaaaaactatataccgaaagattatccctttattattaaaagggaagtacaaattgaaattttgtctaatttaacctcaattttgatttcaattttggattttgttctttgctattcaaaatcattaagggtaatttggtcttaacaatctcctaaactttatatgattcagttcaatctaaaccgtttaataatattattttccttcaatctaaaccgttcaacaaaaataaggaatctatgtcgtttttgaaatcaaaagatgatcacattccatccctaaaaacactctattcaatcatgaaatcaataatcaataatatcaatattcttcactaatcactagaaatttatatttatatgtttaggatatcaaatttattcaaatatttagtataagaaccaaataaaccgattgcccgcggtaaaccgcgggttaaaacctagtaagcaccaaatgtgggcatattagcatatatatgaagatggcaagacctagtataatctaagtgtagttccagtttaactatattttcgtgttaaagacctacttgtacaaatccaagaatccaccgacttaggtgtaggcttcttctatccgtaaatggtgttaacaaattaggtgtagtgtacgtactatccaaattttagctttcgctaaatagatatgtcttaaatttggcaatgatctaacattttgtcatggacgtgtagaaaagaaaaaagaagatctaatagtttgacataaatagatatattagcctacaaccattcaaggggaaaaagaaaactgtcggcactataaaatttattttttctcttttctttttctaataaataatttgtttgcattgtcatgtcatttatatatgactttttcattttatatctatatctgcaactttcacataaataaaatgttatatgcgtaatgagattgatc

SEQ ID NO: 786 - DNA, 26624 bp, Arabidopsis thaliana
accttgccttagtccccgagttggggtaatctctccatggggagtaccatttatcagcacttggtatctaaccgatttgacacattccatgatcagctgaatccaactctctgcaaatcccagcctcctcattgcattctctagaaagggccattcaactctatcataagctttagagatgttagttttgattgcaatgaattcctcagagcacttattattggagcttaaggcatggagcaactcatgagctatcaggatattatcactaattagtctgcctttaacaaaagctgcctgagattcagaaattaaagatgggagaatctgctttaatctgtttgctaacaacttcccaataatcttgtaaataacattacagggacttataggcctaaagtcagtcattctttcagacaggctctgaattttatgggactaaaaacattttcaaattttatggtcaataatttatattccctctgtttcatattagttgtagtttaaggtttttacacacaaattaagaaatcataaaaatctcatttaattagctcttttatataaaaacatcatttattataaccaattcaaccaataaaaaaatagatgattaaatattattggttaaagaatattaaatacatttattatttgcatagaaagttgaaaacaacatttaaattaaaaaaaaaaaatcccttaaactacatttatatagaaacagagggagtataaaaataagttctataattttgggaccaaattatctatatttattagcacttaattttgtattaatttttgtgatttatattttcaataattctaactgaaatttgctcagattgactctaattttaacaaaaataactagaatgactcctcttggcaatgattaactaaaatgactctaattttaagtaaaaagaccaattaaccttaatcaaccttaataccatatttttagcaaaaaaaaacgaattataaatcaaataaattaaaaatataaatgaataagatcccgaaaaaaactggatcttattgatatgaaaaaatataaattaagaatataaattgaaaaatataaattaagattatattaaaaatataaattaaaaatataaattgataaaaagaaacgcaatcaaaagatcttattgaaatagttgatatgtgtagaataaggaaaaaaaccaaaaaatttgattttagaaagatatacactttattgtcaatttaatgcattaaacatcaaatatggaaataacataaacaaatctgccgtaagaaaaccctacgcgttacgagaatattccttgactcaaatatggtaatatttcggaaaaatctgtcagctaataaaagtctgtcgtaacgttttcaaaaaaaaaaaaaaaaaatctagtcaaaccggatttaacatacaatcagaccgggaaataatttaattgagggctagctaataaatctcatataacaaaaaatttcgaaattttaaaaataaatctgccaaaaaaagtctgttattactaaaaaggttattctagtcataaacaaatcggccataacattgacatgagtaaatctgttatgctttgacactgaaaaacaaaactgtcatcactaaaaacaaatctgttatcactatgtgactgtgtagtaatttttttttttaacaaaaatctgttgtaaaacaccagatttgttaacaagttaattaaatctgtgattacacaaaacaactctgtcatgcctatataacatttttcgaggttaacaaatctgttataacacaacagatttttgggtgcaaatagaaaatctgttgccaccataaagaaaaatctgtggtccggaaaacaaatcagtgacagatttggtttcaacattcttacttttgaaatttaaataaaatctgtggagactatatgaaacaaatcagtcacggttaaaaaatctgcgaaaaaaaaaaatctggcgtaacataacacagtaaagtctgtggtacaagacaagtctgttgtaaaaaatctgtggttgaccaacaaatctatgatcgataacaaatccgtcgcaacaagagccacagatttaccaaaaacgacgatggcattttcgtaaataaatgtggttttattgccttgctggaattaaatagtaatggcatttctgtaatattgtttttctctgcaaaggaaaacaaggataatttaggtataattattactcaaataactcatatttttagcattccttttgggtcattatgtataaaatatgggttactctagtaaatttccctaattctaaatcaattttatttgtcttaaaatgtatcttcctttgattcttttgaaacaattctttttcctaaaaaatccattacaataaaacctctataaattaatactcgataaattaataacctctataaattaatatattctttcgatcccgagttgggaccagtgtaaaaagtgaaacaaatcgataaattaataagatagtaactttttgaaaatcctatgtaaatatatggtcccatcaatatcataaattaataattgcataaatctatcaattatgtatgtatatgtaagaaatttctttgaaatatatttttaatatttttttgcttcaatttgtattttttcttatttgaaatttagttatactattttaatgtatcaaaaacttttggtgttgttttctaaacgtgatcttgtttttacttgtaattgattttagaaagatattttctataatgaaaaaaaaaattatagaaattttttagaaattaccaaattagaaaaatttctcaataaatattaatttatcgataaattaaaacctctctaaattaataaaattttgcagtggaataaatagagtaattatatatatatatatatatatatatatatatatattaatattacatttaaaaagttaattagttaaattcaatcctaatataatccaaaacctgatctctagacttagtaaaatctcagatatttttattttaacttctattctaaatgaaaatcaatgtcttaagagaggataagccaaattttctgagagtacttaaagatgataagtactgtactgtactgtctaatgtctatcctctcttaaggcttcgtttcaaattcttcaatcgtcctttagaaatcctcaaaatatccacaattttcctctctttacccagaagatttcatcagaacctcttcgccattaatgggttagtgttactttccccaaatgtagaattaagggtttagggtttttagttccaaattcaattcttaacgaagcaatttcaaatctttttttcatttcagttacagcgatgttttgtgcatcatcttctccaattacatctcctctctacccaaaagcttataaattttctcaaacaaaatcgaattcgaagagattttcctctctgcgtgcttcgttgcctgtttctgataacaagcttcttaaatttgaatacacaccatggcttattgttggacttggtaaccctggattaaagtattacggaacaaggcataatgtataaatttcactcttttacattcaattttgatgtttatgaatcaaagttctcttcttttttgtgattcttgatctgtttttgttatgtctagattggttttgagatgattgatcatatagctcgagcaacggatatttctatgaacacaattcagtccaaggctttagttgggataggttctcttctcaccagtttcttgcttttgtttcatttagtttcacctttttgtttgtttatttgggatgattcactatgtgaccagaacaggttctgttggagaagttccgattttgttggttaaacctcaaggatacatgaatttcagtggtgaatcggttagtctttcttcctttgttctcaagtgtcttctctacttgagatttttgacaagcaaggctttggctttatacttgaaatgggagtgtacttatatttgatttcttcgtctacttacgtgttttgaaggttgggccgttagctgcttactaccaaatacccttacgtcacattcttatggttagtactgtgtcttattgcttgctgtgtgatgatgatgataatggcattaatcaaaagattgtgtttgcctctatggtgtagatatatgatgacatgggtttgtctaatggtgtcttgagacttcaaccaaaaggtgggcatagccaacacaatgggtaagtaatatctctgaattgggaagtgatgtatataggttctattggtttagggagtaaacaaaaactgtgtctttgcttataaagttgcaaggaacagactcctgcaatcttatttccgagtgactgttgaatttgttcaacttctaaacttagtacttactcttgaggaagagagatgctattttgaaaggacacaaaacttcaagatccaaggtttatggataatgatgaatagaatcgaattcaaatagtataaagcattttttatatctaggaagcgcatcacactgtgacgaaagtaatacatcttcgtcatttatgatttctaatcagaactagaacaatataaccatttcttgtgctttttctgaaaaggattataacttcttttgctatgtaccagattgaagaatgtgacagaacatttaaatggttgtcgcggctatccccgcttatcaatcggtttgtgtcctgtttcaccttgaagtcctgttccgccaaatacccttttggcaatcgtagtaaaattgtctgttgcgctgcaggaattggaaatccaccaggtaacatggacatgaaagcgtttcttctccagaaattcagccccttggagcgcaaacaggtaatacccttgcattaacctaagttcaccagtctgtagtcatatgatctctgcaagtctaaaactttttggactaacgatattgtatgactattttcatcgaatttatgttggatttttaatggattcgttgtactgaattatgtttagatggatgagggactggaacaaggtgttgaaggtgtgaagacacttgttgaagaggggtttagtgactcaatatctcgattcaatttgggacagaaatacaagtttcataaagtttgattccttgacatttgcctcatcgtgatacctgtcacagtaacagtagcaacacccatagtccaacattgttcatttgttcttatccttgtggtctttgtttagctgataggtaatattgtaacatttgtattctctaagatcaattttattgatttatattttgttaatgtgtgttatgtgagtttattgatgaataagttccaattcaatcaacagttataaaataattaaatatgaaataaaaattagccaaattaatccatgttgaaatgatggaatttatttggcctaaacatggatgggtaaaaaataataaatcagatacgtataatggttgttaaaacaaaacaaaccaacgatcagatagattaatgatgattaaggaaattaatgaccgtcgatcaaagatttactgggtcccacactaccaaaataagaccgttagacgtaagcaaagaaaaaaagaagaagggtaaaatcgtcaacagaagaaaatctctaaagaatctctctaatttttctatgagaccgttgagaaaccctttttaccattaaataaagtctttttgcaaacaacaaaatctggttaaccaaaatagctctctcttttactgaagaagtgatcgaattttattcaacgatggcggatataatctcaaatccgaccatggaacaactcttcttctctgtagatccgatgtctcttatactctctcaaaactccgacacacatcaacttaaactcttgttagacggtttctccggattcgaaagaggtccaagatacgatgaatactcgagattacgtgaatcgaagcttcgcatgaaacgtgattttcagaaattcctcgaggaagaagacgaagtagaagagccgaggatcaaaaaacaagtcagattcgagggtaattctgtaaattcgcaagaaggtgataagttttctccggagaagaagaaacagagtcggttcgagggtatttcagtaatttcacaagaagataggttttcgccggagaaggtgaagaaacagagtcgatttgggttttctccgctgaaaaaagctgttccgtcttcgttggcacaatcagttcctgatttctctgctgtgatacgtaaagagaatcgtcgtccggttaatatcaacactattactccgccaccaccgacttcgaagagtagaaacggcggcgttttgacgggatcggcttcaagagggagcaagtcggcgagtgctggagagaagaagagtaaagggatgatgatgatgggaatggcacgtaagagttacgctaatgttgaagatcttaagaagatttcaatggcggctgcttctgctattaatggcggtggcggtggaggaggaggagggagaaaagttggtgactgtggtggtggtcgtcggactattcttggttacagacaaatttactgatttcgtttatcaaaagctttgatttttacacgattttattagttttttgtgggattttgattgatgagaaacaattcttggatttgattgttgatttgggtttttgtggctttttttggtgtgttggtgattttgatttgtttgtaaaaaataaagcataaattcttgatattatataactcgtgtgattctttcatatcattttgtcacattcgttcatgtacaatgtgatgtgaccatgaagattatagaccaaagagtcataatttgttatgtgtcatccgtttgtagatgacaccttgacaccaagtacacttactgaaaattcatttggagagaacaaattattttatttcgaaatattgttttgagaatttgtcaatgcatcatgaaacattaaatatgattttagaccaagaaaaagtccgtttaaagaattctctttttatttttaatgtaatgttaaattatatttaaaaagaaaaaataaacgtttgtccaattagtgtaacgtttggttaataaagaatggttgagacgaaaaaaattaaacttcctaaaactttctaaaccgtttaaagaattctcacaagtttaattaaaatagtggtcgtaattgttctaggttaatttaggttctgttgctgtcggatccgaacattgagtttggattcaaccgaaaattgtcatatcagcataaagttaataaaaagcaaggtcaactagaagttaacaccgaagcaaagtaaagcttcgtagtctataagtgaggagatccacaaaagatacaacagttcggaagcgggtaatgggccgaacattaagagcacgtccaacgtggatctctttatacaggctcatccacttaaaaataacaaaaatatttaaaaagtaaaaaagggatgaaagagagtttctgaaagtcctcatttaagggatgttcccacaaacatatttgcacgtgtaatcttattaatggtcaatttgtattaaaaaactagaatataattaaaataataaaatattattacttttttttttttaggaattttgaccgtcccaaccattgtacatgctctaataacctataaaaatgaataaaagaattcaaataggaaacgaaatcccaaccattgtacatgctctaataacctataaaaaagaataaaagaattcaaatagaaaacgaagacatttaagagaattcgttctatttaatagttagtgattgttaatcatatactacatagtttccaaatatatggaggaacattcattcttattcacaaagctaatattatactaattctactcattcttatttacatccactcacaactttacttatcgaatttgtattatatgttgatattgagaactttaattcctataaagcctaaataaatatttgagtgtgcaaatcatacatccacaagctatgagtttttttcatggttaatttttttttttggataagatcatggttaatgttttgaactatatcatagcagaaatatattagtttttattgtctttttttctttgcgcgcactgccaagaagaaaaatctagcctacacctcttcttcaactgcccttttgctggcaaaatttgggaggcagcactttttaaaacccctttcaacccttcacgaataacaagcttgaatgggcattgaacggtcgaaattgttggtgaatcttccaccatctagaattgggattgaactactgatcttgtggttcttatggactatttggacttgccgtaagaagaagatattcgataagaaccaggtctcacccacggaaattttgtccagctagttgtaaatcaacaagcctaaaaaacaaaatgcttatcaacacattctaataatttttttttttttttttccaattggtggttgtttggttattgatttctttagaaaaagttccaaaattatttatttttgtgtaataattatgttggactaaattctagaggaattcaatgttctttcaattatttggacgctggtttttggctttcaaaaatgggactagtccgactcttttgaccatggattagtatatatatttccttccaaataaaatcaaatgaaaaatccaaataccttgctatttgcctatctttatacatttacacaaaatatatgacaacaaatgaaaaatccacagctcattagctgcttgttcattctttacaagccagacctgctccttcttagtctatacctcgggcctactcacttaatagcacatggatgccaataacacatggaactttaaaatgttgtgtactgtgtacatgcattagcctctgggattcactgataagaccaaaaccaaacaatatgtcttttatgtcgagaccaaacaagcctctcggacataaaacatatataaggtctacacttcacgcaaatttaaaacacttcggtttcgttcaaagtagatgtgatctctccttccttataacgtttcaggaaaaatatgttgtctatcttctactcttcgtatatagctgacattactctcaaaatctcgactcaaatattatttgaagacgatcatttccagctagctctaggtatcatatgatggacctaaaaaaactacactcttccttggcatatatatgtaattattttcccgccaatgtaactatgttgcaaacgtttgcattacgcagaaatggctgactctaacccttgtctcatactagttgactcaaagaaaagtttggacgacaattcctgtctctaacccattttacatgtcttccttatataaagtggtctttattcgaccaccgagcttgtggtacttggcgttcaaatttagaattttgtgtcgtcttaattaccggcaaagtgcttccacaatcttagactttcaagcaacaatacacataagtggacgaagttttttgtttaactgtacaagaatgcattcattttagcaaactcttaaaatacatcaataaagagttcagtacgatgaagcgtgtacatggatcaatcgtacacggtaaggttggaaagattaggtcctcacattttattttatttttttgataaaaggttaaattagatcatcacatatttttatagaagagaaaagtccaactgaataaaaaaaaattaagagaaaaacaatattttcattaataaaccttaaaccgttcttaaaaccttctaaaaattactttaacaacagaacaagaccacctaaaaatgacgcatcattatttttttatttaactttctcattgactgttcatattacatatgtagaggatgcttaattttctaaacacaagttacgtcgttttatatcacatcgaacaatattaatatgtagcaaaaatccacgcctaaagtttttggaaaactaatacgacaatacaagtaaacagtcaactttattctttaatcacattatcagtcaacttggtcaatattattagtcaaaggttttaaattcacatgtttaatcaatatatgtgtaccgtttgactagtacttatactatttgatcatttgtcggtttgatggttttttgccggtatagtttaaccatttcacaaaatagtacagtctatttctttctatgaaatgtgaaaattacatttctatattacgtacaaccaacgtatatgttacatcaatgtacaaacaaatcaataacatgaaaaaactcgaattagattcttagttatgtttgagtatgacgatccgaattaagattctcatttttcctttctccaaatttctagcttagcttaaaccaatcatacacctaactcttcacatgttccagaaactaggtcaggatcatggttataagataagagcacacttcattttctacgatcacggctaccggaaaaaacagggcctaagcaaaatatatcagccaatgggacattcaacgccggactattcatggatcttgaagctctaatctctgtagaattcattttctgcaaactcttcttcttcttctttttatgtggatcactattgctccgttgatattccgaagaagaatttgttttcttgtttctcattgagtacccaacagatttgcttcttacaagccaaaaaccacacccaaaacttggatcatctgaatcagaatctcttgtgtcggatttcgcagctagggtttgaagattgcttctcggagaagtaatctcggtcttcttcgaaatagtgtcggtggccgtgtgggaaaggtttttccagtacgagaagagctcgtcggcgtgagaaaaccgttgttttgagttctgacggagacaaaagtcgaactctggacttgaattcagacatgactggtctgaatctgatcggagagggactctttcttccgaatgatgaagattgtgtgaagatgttgaggtaactctgcttttaagactcattgtgacgataattaaaaaaggctaccaaatagtatgtttttcacgaatgtcttaataaacaaattgtgaggtatagaaaagaagagcaacaaggtagatagatatatatacgactatacgaagaatgtctagacaacaattcacctaccattattgactatatgcaaaaagtaattttttgtttttcttacttttttacattcttttctttctttattctttggaaaaaaaaattctcatacatgaattttctgctagatcaaacgaaaacgtattattttttagtcatacaacatatcccggtttacaattttatgttttttttttgttggctttgttaaacacaattttatgcttttacatgagattacatatgcaaaaccgaaaaaaaaaagtagaaaagaaagatctaacttggcatttaagtttttttttgctttattgggtgtaggaaagactttgacttcagcactgatatttgttagactttgaagcattgattttttggtcgactttgaaaaaagttgtagggaagggagaagactccacatctcaatttgttgaacagagaattattcacctaatttacaaattatgaacatgtcactagtatttataataatcaattaatcattctttctctaatactaatagttgtattaatcactgagaataattctgcagtactttgttttttgttttgtcaactatcggccttggaggaacaatgaagtcatcctatgataaggtatatgaatatgtatgtatagtacttaaaaaagtttaggagggtttactagttcatgcatatttaaagcatctaacaatttaaattaatttacttaattttcaacacattttaatgtctatatgaatttattttattttatatgaaacccccaatatataggttatagcttttagatgtgtttctagaaaacgtcaaagatttgtgtctttagtttgctcagccgaacgtacaatcacattgacaacggtatcatttgattttattttcaaagtacgatttacaatatgtggaaaaaacggaatggaaaaaagcaccaacatccctataatacttcacaacagctctctcgaatcagaggttaagccataagctcattacgtcacgctccctgactcaaggaatggtggtatgttggatagatggattgccattcgccgatgatgttctgttctcgacttcgtctctgtttactattataaactttgtttactacttctgttttaagttgtttaatccattttttgatcttttgatgcatcacttagcttgttttttcttaggggcaaacacttagcttgttttttgctgtgaaatattcaaaagcaatatttatatacttagcttgtttacattttcacaaacactaaaatgcatggttaagtctaatatagcagaaccacaccaattgctatcttctaatgcttaggatactcactatttttgtaatggttttttggcatttcatagtaacatttggttactttcgataaattatctcgaatattaactaattaagaattatgatctgctctatcgatttttaaagtatttttgaaccatatccaaatattttggctcatatttcttagtagactatatggatcgaggattcgagtttggacatgaatttgggtatttgtgtatttaggaccaatatacttatacattggtttaaaattacatgtatttcgaatccagtccgatcaaatgaatattgaaacatccattaccgctttccaaccagacgacctccatactcattaatgttagagtagaatacgaacaccaaatgtttaacatgtgtattttctcagtcctaccaatttatatcatttcattttcaaggagaattagtcttaccaaattcaagaactcaaaaattctaactatattttttcgtttagctattaaattttctactggtatatggttcaccaaacccatgaagatgattttcttagcataaaagtctaaagttgtataatgttataatacttttggacgtaacttcaaatatcagtataccattaacaaacacagagaaataatttggttaacgaaacgcatgataaattttaaataagggataccaaactgtctgtcaaccgacaatatttttttggcgatgatccagtgaataatttcaaagaaccaattctaaaaactattccaagaattatttctttacacgtaatatatttatgttaataatctaagatatatggtatcgactcttgacaattcccttttcataaatacattacattttatacttttcaaatgtaaaagaaattaatggtactcatttaatataatcagatttcttacttcaattttgaaattctttttttaatgtaaatgtgaaaaaaagaacaagaatataaatccatacttgagtttcttctaaatatgtttagaggtattgttctgtataaatccaagaaaaagtggaaaataataatgaaatcttgcataaaatcttgcctaaaaaatagtatggaattgtttttattaattttgaatgatatagatttcatggagtgatgtaattattttattggtttagaatctaattttctctttacataacatctcttttaatacaaactcagattttgtaacccatgataagtattcatggatgagaaattaaagtccgtatcttctaattgttttcttcttagcttgtttctaaatacatgaactaacctaataacttacaatcaaatctcttacagagagacattaagaagaaaactaaaacaaagtgaaagtatttatatggagaggataacttcacttgtattctttgctagcttccttattatatttgtctcaggtatattatatattttgtatatctttcaattgttatggttctttactttattcgatttctttaaacgtttcaagtattttaaatataattatacgttcacaataatcaaattttgatattgccagtttatggacagttgacaaaaccacttctgcttgacattttctagtacaacgtagatgaattatcatatgtcccatggcaatggatgaacagaacataaacaaaatagtatgatatagtaatgtgattatttcatataaaagtattggttcttataatgataacataaataagacttactatgtctaatcataaatgtacaaatgcaagaacaaattaaagtgaattagatatatgccaacaaatttaagaaaatagcaatggcgtgacttattttcatcaaaacattaaattttgacattgtcaataatttaacattacgggaaacatgatttttgtgtaacgttattttcattatgtgaacgtctaatttatcaaaatgaagcaaaattaaaccgtaaaacccaaaattttaaactctaacctctgtttaataaattagatgtttacataagaataacatattttgggagatacatatagttgcatattccataaaacttacagaagagtaagattttttgaaaagtcttctcattgttattattgcttgtaccttatttctctatagagtgtaaatactcttaagtttgctatattaagagtactttatttctatattaagtttaataaggtatacgtatatatacaatgctctaggtgttaatcagacaagagcagattcatgcgatgaaagtctaggcctttgcgaaacatgtgacgaaagatgccaggccaaacacgggccatcgtgcataagcaaatgtgacggagaggttgggatgttgtcgtgcacgtgcacttacgagtgtggaccacctttaccccccaaaggtaacgtttgcagcggtgggactggtatgtgcagtggaaagtgtccatataaatgttgtgataccagttgcgcacaaaagtataatggtggacgtggattttgtaactcctttggtaattataatttttgccaatgcgaatacccttgctaaaacatgttagcataatttgtaaacctgtacttacttggctttcttttgttactaacaaggcttgaacttttatatgatttgatatcaagacatagaaggtttttataacgttctacaaggtattttttgtttcaaaataagtctcgtttttaaattacactgattatttaatcataaatacatattttaatcctactcaaaactaatttaacataaaataattttaaagtcaagtgtttttaaccctactcaaaatgagatatttattgaaacaatagtagtaaaatataaaagctccatacaaattaacagaaacatgaagtacatatataagctcattaccgaatgcaataaacgtccataatgttgaattgttgatatatcacaccttaggtattgacgagtaacgagtttgatgagtgatgactatacataacatgataagatcgacgataaaggtatgtttaatgttaatgccttgttttttcattttcctttatagcattaaatatctagacacaccatgtaagacaaagacttttgacaaaaaaaaagaaactaaaaatgatgggaaacatattcaaatgaataacggagtaggacaagcttgaaatggaattggttacttgtcacttgacttgtcgaactttctaattgtcttcaataacaaatttatcattatttgtgtaaacaaaatacaaccaaatttctttgtattgtcaacgaagctaggttttatttgcattccatgtggaagttctgctctaactcgagcaatggggattattaataaagaaacgatttatttagacgtttataaacaattctttatggattaattaagagaaatgatacttattctgaaatacaaaagttaaggaaacatagaagagaataaaacactaattcacttaactccacaaaaagtcattcttaccaatagaaaaacattgatcgtatcttgtttttgtttcttccaccatcaaaatttatcgaacctaacccaaacaaattccccgaaggtaccatatccagaaatgagctcaccctaatcacacctccatgtcccttgtagttataacctccatggttgttcttcaatatcggtttcggaaaactaccgttaaaagaagaagaagaagaagacgaaacctgactcttgatagaattcgaaccggtcgagttataaggaagtaatggcaactttacctcatattcttggtctccaatttcttctatttcaagaaccggttcaaaatcttcgattggaattatctcaggtctgggtaaaccggttttatatttatctgttttactacgatatatgggttccgggatctttttcatttctatagggaggattttgccgtcgttgaagaactcttccgcggaccaggagctctcgccggagattgcaccgcggggtattgaaaactccaaaggaaagccccaatagaagttggagatatcatacggagattgtgatgtacgctgctcgattggtatggactcgtggtggcaaaaatcgttagaaaatgagattcttggactttcattagcgttttcgggcattgttattaatgttctcgagaaaatattagagggtttgaagaaaatggtgatggtaaaactcttttttatacgtgaagattatgtataggggaattaaatgaaggagtggttattttcaaatgtttggtaaagtttggtttatatttgattttctatgtgagggaccattcttggttgtgttctgtcttcgcaaatgggcctaacgtctcttgggttaatgttttagttgattgagtttggccatcttctctgtttctgatgtcttcttgctcacatgacttttgaaatctcttcatgtcaatccatttgccaataatccaatctgctttgttatcattttttttctttgtttcaactttcaatgctaagttgattgttgtcatgtagtatgtttttaatagttgaaaactaattgttactttcaatatattttaatgtcaacaaccttttttttgggtccacaatcttttattttttaccttttttgcttaaatattaagaggaaaggatgtaaacccatactagaaaatattatctatcaaggtatttttttcttccgaattcaataagaaaactgaaataataatgaaatttttcaaaaaatcttgcaaaaagatagtatgccaattttcttattaattttgaaatattatagttttttttttagtgttgctaagcattttattggtttcgtacatcatataattctcttatagaacattatatttagtaaagaataagatttcattactcaatgcactttattggccgtaacaattttagccaaaaatttgtgtatatggaaaaaaatcatatgataatattaatggatagtccatttatatccttgtaacatttcaagttcgttgactgtgagtcctcgacttgcttttaaatagattaactaaatgccacaataacataaaaaccattatcttagagaaaagtttaaaagaaaacgtgaaagtatggagaggataccttcacttgcatcccttgttagcttgcttatcatatttgccacaggtattataattttttgtacacctttcaattttcatgttaaatatatttttttaaaaggttattttcttctattatgtgaacaaaaactaaacaaaaaatctcaaagtctaaccttagtttttataatttagacgtccacatagaagattaatgttatgagaattaagaaatacatattacagatatatatattttttttcttaagtcttcttgtagctattttcttgaattccttgtacttaatttctatagagtgaatatattcttatatatctgttaagtttaataaagtatatatacaatgctgtagttgttaatcagacaagagcaagtatctgtaacgacagactaggcctttgcgatggttgcgatcaaagatgtaaggccaaacacgggccatcgtgcgaaagtaaatgtgacgggccggttggaatgttgctgtgcacgtgcacttacgagtgtggtccaacaaagctttgcaatggtgggcttggcaattgcggtgaaagttgtaatgaacaatgttgtgataggaattgtgcacaaagatacaatggtggacatggatattgtaacacccttgatgattttagtttgtgcttatgcaagtacccttgctaaaacaagttgacagaatttggaaaccaattagctttctttgtaactgtaactgcgataatatggtaataaatttccttttgataaaaacattacgtttatttgcatgtaaggtaagtgagataagatagagacattcatgacttgataatatttttaattttttttacaatctatattcttgatttatgcagttggtgaataattcttcggtgaaccgtgcctacggttttagaggcctacgacaatatttaagaatgtgaaattttagattatcaaacaaagagtaaaatgtacataaacttaaaatctgaaaaacaaatctttaaaaagcattaaaaatagaaaagcttctaataaatgagttaagtatcagtattggtatgaataaaacctttggaatattgatcacaagaaaaaataattgagtagttagaaagataatttctatcaaatgtggcttatgaatgaattatatttagtgtagcctaaggcatttgccttttttctataaggggaggctcggctatgcgcgggcggtgattaaggcgtcgggaatttagaactccggagggaagccccaataaaagtagctgaaatcttggactgtcattgtcatgagaattttccggaattgttagaaaattaaggaggggatgaacaaaaaatggaatagtataagagaatttaattcatgtaatatcaaatgttcggtaagtttggtatatgtatttgattttcagagtttatgtaaattttatagaaattattttcggagtaatgtcgattcattttccaatgatcttatcacttgtctcttcatacaagccaagatgagtcgacaacttggttttatccttctttcttttctagttttcttctatgtaaacgaaaacaaatttcacatgtaacgattttttctaatattaagaaataaatacgtttagaacgtctaaaatatttatacaccaaacattaaagatcaaaactattaaagaaaaactgttagaaacaacacaattccaaaagatttagatcaacatctttattctcatttttatcagcttcatcatgcctccaaatctgattagtccagaaacaggttatcaaaattaagttttctaagattagttctcaaaaaattatggttttttgtgtttacaaaaatttgtgttttatggacaatagatttcggaaattcgcaaacctagattttcacaatttatctatattattatcatagctaaaaagaagctccatgaatgtgtttacgcaaaatcaaaataatatcttataagagctatacacctcattatgaattttcaattttgtttaaccttactgtgtctgtacttattgagagtctttcttaaactataagtttaagagcatcaaagtttaaaccagaatatttctatcaacgtattgggagaaggagacattcgactaaagaatgatctaaaacaaaacaattttttttttcttccgctgcaaaatagaaaatgttttagctaaaaatacacaatttaaaatttgaatataaattttacattctttcaaaaaaaatatatccactttcaaaagttcaatcaatacagaaatcattataaaatattaaatttatacattatttgcataaaaaaacttgtaaatacttaattgttatgcaacaaaaaatttgttcaaggagtagtaacacacacctaatcaataatagaatttagagatttgtctactttatgtaacaaagataggttttattacacctaatgatatttagcatttgtccttatttggacaagttgtaattttttaactgactttcttatttattgttgtttgacttttatgtgtcggtcattctttatcagtttttccaaaaacaatatgattaaaaattacaagtagatcgagagactgttgcagattgctcttaaatgacttatctcgataaaatcattttttcagatacaacaaacaaagagaaaaagccctttcaatttctttttacagattgctttctaaatagctttgagaaattgatcttctctttatcatactcaaatggattcttcttttctctctagtttttgtgctacagccataattttcttcacgcttttcggtacaatatatttcatgttttatagaaaagtcaaatcccatcaagaaaacaaaacaatagcttcttctttagctcttccaactattccatcttctttgtcccgaaaatacgatgtctttccgagtttccacggagcagatgttcgcaaaacctttctttctcacatgctaaaagagttcaaacgaaagggaatcgttccattcattgataatgatatcgacaggagcaagtctattggtcctgagctcgacgaagctatcagaggatcaaagatcgcaatcgtcatgctctcaaagaactatgcttcttcatcatggtgcctaaacgagttggtggagatcacgaaatgtagaaaagatttgaatcaaacagtgatgaccattttctatggcgttgacccaacagatgtaaagaagcagacaggagagtttgggaaggtcttcgaaagaacttgtgaaagtaaaacagaggagcaggttaagacatggagagaagttttggatggtgcggcaacaatcgctggagagcattggcacatctggtttgccttctttatttagtttttacttgctcttagtaatatttcactatatttattagtatcttttagaaaataacaagacaagcaccacatatttgttttggatgtgtatgagaaaaaatttatgaataattaggggatgtataaaatgatctctctatttttgctagggataatgaagcgagcatgattgaaaaaatttccattgacgtttcaaacattcttaatcgttcctcaccctcaagagattttgacgatttgattgggatggaagctcatatggaaaaaatgaaatcgttgttgagcctacactctaatgaagtgaagatgattgggatttggggtccttctgggattgggaagaccaccattgcaagagtcttatataaccgtttttctggcgattttggattgagtgtctttatggacaatattaaagagttgatgcatacaagaccagtgggttctgacgattacagtgcaaagttgcacttacagaaccagttaatgtccgagataaccaaccataaggagaccaagattactcatttaggagttgtacctgataggttgaaggacaataaagtgcttattgtccttgatagcattgatcaatcaatacaactagatgctatcgcaaaagaaactcaatggttcggtcctgggagtcggattatcatcacaacgcaagaccaaaaacttctggaggcacatgacatcaacaatatttacaaggtggagtttccatcaaaatatgaagcttttcaaatcttttgtacgtatgcttttggtcaaaatttccctaaagatggttttgagaagcttgcttgggaagttacagaccttttaggtgaactaccattgggactaagagttatgggctcccacttccgaagaatgtctaaggatgattgggtaattgcattaccaaggttaaagactcgccttgatgctaatattcaaagcattttgaagtttagttacgatgctttatctcctgaagataaagatttattccttcatatagcatgccttttcaacaatgaagaaatagtgaaagtcgaagattatcttgctttagatttcttggatgcgaggcatgggcttcacctcttagctgagaaatctctcattgatctcgaaggtgttaactacaaagtgctaaaaatgcataatctactagaacaattgggtaaagaaattgtccgttatcatccggcacaccactcaatccgtgagcctgaaaagcgtcagtttttggttgatactaaagatatttgtgaagtactcgccgatggcacggttagttatattattagttttatgttttcttgttccctaaaattaaaatcattttatagcttactatatatatctcattatcctccttttttggtctttttgcagggtagtaaaagtattaaaggtatatgtttcgacttagataacctatcagggagattaaatataagtgagagagcttttgaaggaatgactaaccttaaattcttaagagttctgagagaccgaagcgagaagttgtacttaccgcaaggtttaaattatctacctaagaaacttagattaatagaatgggactattttccgatgaaaagtttgccttcaaacttttgtacaacgtacctagtcaacctacatatgcggaaaagcaaacttgagaagttatgggaaggaaaacaggtacataattattttcaatatggttttttttttcatcaaaaggagtgctctaaatactagtaattgtgtttccttatgctgtctttatttgtttgtccagccacttggtaacctgaagtggatgaatttaagtaactcgagaaacctaaaggagctacctgatctctcaacagctactaaacttcaagatttgaatctcactagatgctccagcttggtggagattcctttctctattggaaacaccactaatcttgagaaactgaatcttgtaatgtgcactagcttggtggagctgccctcctctataggaagccttcataaattgcgggagttgagattacgaggatgctcaaagctagaggttcttcccaccaacatcagcttggaatctctcgataaccttgatatcactgattgctcactgttgaaaagttttcctgatatctccacaaacattaagcatctcagcctcgcgagaactgcaattaatgaagtgccgtcgaggatcaagtcatggtctcgtcttcgttactttgtagtgtcatacaatgaaaacctcaaggaatctccgcacgctcttgataccatcacaatgttgtcgtctaacgatacaaaaatgcaagaattacctcggtgggtcaagaaaatctctcgtcttgagacgcttatgctagagggatgcaaaaacctggtaacactcccagaacttccggattccttatcaaacataggggtaataaattgcgagtcactagagaggcttgattgttccttctacaaacatccaaatatgtttatcgggtttgttaactgcttgaagctgaataaagaagcgagagaactcatccagaccagtagtagcacttgttcgatcttacccggaagacgagtgccttcaaacttcacttaccgaaaaactggaggttccgtgcttgtcaatttgaatcaaagtcctctttctacaaccttggtgtttaaggcttgtgtcttgctggttaataaagatgataagaaaaaggaggccaatggtacgtcatttcaggtatattatcgtataatggacaaacgcaaattgggtgttattgttccatggagatctgcacacggctttgttgtgcctccaattttggcggagcatttgctaacctttgaacttgaagcggatgtgaaaaccaacgagtttttcttcgagttcgaagtcaaccgttacgaagtggtgataaaagaatgtggagtactccaactctaagtcctccatttttttggaagactggttgggacgcacttggttgagaacttgagagaagaacaagacagtgatctattgttattgtttcttccacttacctgaatcccacctccagttcctctataacatccatggcacggcacttcttcaatgcgtttttcctaacaaccaccgtttaaaggcggagaaggagacgaggtaaagttttttccatagtaatactgtttactaaaattatatccctagattgaggaagtttgttgcacaggaaacatataatgttaagcttttgtgccgcaagattccttgctcaaaccatataatgttactcaagctaactaaatgttttctttttcttatgatgtcgtagatttgaccagcacagtagtttgttaagcttttactccttcgattatccaaggtggagagtctacaagaggatgaatgttttaaggtctaggagcatcaaaaagagtttgcgacatcaggtacggttgcaggcatctagagtttggaccctagcctccttctaccatcttctttggccacattacagggtttatctttctttgtattttttaatcattgcgctttcagcgatattaattttattacaattttcttgagtttatttttggctttgtgattctctcgtcattgaattgttggctgcgtcttaagaaactcagaattgttaaagaaaataaggttagaaatagtttcttgggttacaagcaataccaatcctcaacactagacactttttaagttatagaaagctttcactcaaatatctaaattttttggcggagctaaaacataaatggatatagtaaaaatacctgcgaaacatgtaacttattgcaagatacttgactacttctcaaatggactggtaaatcgacttgcctacaaattggataagatttttacttttttttttataaatgtaatgttaaaaattatattcctgaataataacatttgttacatcaaatggaagttttctgaataatttgagaaggtaaaaaaattgataaaagaaaaacaaaattaaaatgcaaaccaagcttggaggcatggttcgtatctcttgtcgtccgtagcccgaatcattgagaattggtttcgaatttgtttgtctatccaagtgatgagttttgtggctggagttgatgtctcaccatgtctccttccattgtgctctctccattatgtgttcctcgtaatctctatatgtatttttaatgttttcagacttcaccttgacttataaaataacagaaatcagacgatccaaaaacttttaatagtattctctataatttacacctactctatataaaaaaggaaaaaaaaaagattggttttacacctaattgataccccttaagaagactgaccgctatttagcatttgtctttaagtgatcttttttatttatctttgtttgacttgtgtggctaagtaatatgcgtcttaccttcgtatttcattgtctaactaacgtctgcaattttggtttaagattgatgatcgctccattttcagcgttaaaatccttttctaagaaatatacgctacatcgtttcgttccatcttcggcattcattattcttttttcctagaaaattaacaggattagtttttttttcttacaagatttgcccattatacacagattattgaacagttgagttcggtttaagtcaatgaatctattattaattccaagtgggatatataatgttctttgaaggttcctttgtgcctatctcaaataaaagcattttccagactcaaccaacaaaaaagccttttcaatttctttttacagattgctttctgaatagctttgagatattgattttctcttcatcatactcagatggattcttcttttctctctggtttttgtgctgctgccataaccttcttcactcttttcggtacaatatatttcatgttttatagaaaaggcaaatcccatcaagaaaacaaaacaatagcttcttctttaatatctatttcatctactccatcttctttacctcgaaaacggaaacacgatgtcttccctagcttccacggggcagatgttcgcaaaacctttcttgctcacatcctaaaagagttcaaagggaaaggagtcgttccattcattgataatgatatcgagaggagcaagtctatcggtcctgagctcatagaagctattagaggatcgaagatcgcgatcgtcttgctctcaaggaactatgcttcttcttcgtggtgcttaaacgagttggtggagatcatgaagtgtagagaacagttgggtcaaacagtgatgaccattttctatgacgttgatccaacagacgtaaagaagcagacaggagattttgggaaggtcttcaagaaaacttgtaaaggtaaaccaaaagaggaaattaagagatggcaaaaagttttggaggatgtggcaacaatcgctggggagcattcccgtaactggttagctttctggatttatattttgctctgattcataattcattaacacatcaaactaaagagggataattaccgaaaaaacccgatttatttaaaatctcccagaaaactacttgaacttttgggttggaaataaaatcacgatctatttttttttttttcaattaccacccttcaccgtaacggaccgttaacaacgctaaccaaatcgtcgaacctaacgtatttaatatttgccaaaaaaaaacatgaacttatttgttgtaataaaaatacccaaactaacttaacttggagatagaaaacac

SEQ ID NO: 787 - DNA, 83646 bp, Arabidopsis thaliana
gatctattttttttccccaaccaaattgtcaaatgttattaattttatttataagatattcttaaaaatggactattgaagaaatcctctaaaagcttaagttcttgagtaatatcaaccaaaatcatgttattgatgggtaagttttatcctaaattactaatgttgttttcaccatctatcatatatctagatttgatgtaagcaacaataaattaaaaagaataccccttcagttaccgaatgttcttattaatttcttcaatttattgtggttagcttctgaaatggatagatgtagtatgttaaaactagaattcaaatttggtccaaaatcgattatgagtttaaagggataaatcggctttatatatagccattctcatttatcacgtgcaaagaaaatgaaaaaagtaattgtaattttatttggttaactcttttgataaccattacgacaaagtgggtgaaattgaaacaaaaaactaggtcattctttttatttcaattttaaactaatcaataaatttatggcagcgaataaaaagtttaggcattgttttggcaaatattaaataaatcgtgtttttcaggaattttctataataaaattaaaaatgtttgacgatttggtaaaacgccattaatggccattacatcaaagggaggtaatcggaaaaaaaaagtagatcgtgttttttatttccaacccaaatttgtttgtatatttttctgccagcgaaaaaagttcaagtaattttctggcagattttaataagggaaatttcccaaactatatttattggtagcttttaaaaaagggaaatttactatagtgacaaatattttgtgttttataactggcatgtcaaaaatacagattttttatatgtagtctatacaggtttttctaaaactttaatatcttgaatggttgtgtaacatatctgccacatatttattttgtaaccgtagatttttaattgtgttggcaacatattttttgatttaaataaaaaaatgtcgcttaataacagatttttaaccaaataataagaatatataatgaggacagatttattttatgtaatcacaaacttctaaaacttgttgataaatctatctgacattttacgagaagtttttttaaaaaaattactacacactcacatagtgataacatatttttttttagtcattacagttttgtttttcgggatctaaagcataacagattttttcatgtcctgttatacccgatttttttatgacttaaataacctttttagtaatgacagactttttgttggcagatttgtttttgaaattttgatacatctagttacatgagaattattatatagcctcacgtaaaactaaagttcgacgacacaactccaaatcttgcggtttgattgtatctttaaacaggttcatttttttcttcataaaaacgggtttgactgcatttggttacgaaatacttttaatagatccggaagatatgtttaatttttagaaatcaaaaatgtttttattttaggagaaattttattaaaaacgtgattaaagattaattagtctttttacacatatttgagttataatagtttttgacttggattgggagttatttatgctaaaatttgagtcaatttgggcaaatctaagttttaaaaatattaagacaaccaatacataatttttggatgtgtatgtgattttttttttatgaatattaattgatgtattaattgatcacttcatttgttagggataatgaagcaactatgaccgaaaagatcgctacagatgtttctaacatgctgaataattactcaccgtcaagagattttgatggtttgattgggatggatgctcatatgaaagaaatggaatcgttgttatgcctagactctgatgaagtaaggatgattgggatttggggtccgtctgggattgggaagaccaccattgccagagtcttatatagccaattttctgaaaattttgaattgagtatcttcatggggaatatcaaagagttgatgtatacaagaccagtgtgttctgatgagtatagtgcgaagattcagttacagaaacaatttttatcccaaataatcaaccacaaggatatggagcttcatcatttaggagttgcacaggataggttgaacgacaagaaagtgcttattgttctcgatagcattgatcagtcaatacaactagatgctattgcaaaagaaactcggtggtttggccatggaagtcggattatcatcacaacacaagaccaaaaacttttgaaggcacatggaatcaaccatatttacaaggtggagtttccatcagcatatgaagcttatcagatgttttgtatgtatgcttttggccaaaacttccctaatgatggtttcgaggagcttgcttgggaagttacaaaacttttaggtcatctacctttgggactaagagttatgggttcccacttccgaggaatgtctaggcatgagtgggtaaatgctttaccaaggttaaagattcgccttgatgctagtattcaaagcattttaaagttcagttacgatgccttatgtgaggaagataaagatttgttccttcatatagcttgccttttcaacaatcaagaaatggtggaagttgaagattatcttgctttaagtttcttggacgtgaggcaagggtttcacctcttagccgagaaatctctcataaatcttaagtttttatctactaactgtacacgtatagagatgcacaatctactagtgcaattaggtaaagacattgttcgtcataagcctgggcaccaatccatttgtgagcctgggaagcgtcaatttttgattgatgctagagatatttgtgaagtactcactgataacacggtaagttatattattagtctcttgtttccttgttctttacaaattaaatacgttcaatagctaattatctctcgttttctaactttttcttgtcattttacagggtaatagaaatgttgtaggtatatttttggaagtaagaaacctatcatgccaattaaatataagtgagagagcttttgacggaatgtcaaaccttaaattcttaagattccatgacccatatgacgacgaaagtgataaattgtacttgccacaagggttgaataatctacctcagaaacttagattaatagaatggagccggtttccgatgacttgtttgccttctaatttttgtacgaagtatctagtcgagatacgtatgaagaacagcaaacttcagaacttgtggcaaggaaatcaggtacataattgtggtgtttctctccaattttataatattgggtttttctttcttacatatttaggtgtcaaaaatgagagatctcccggtattatttcttagaaggctatctcttgtaatctttattatgcttggtgacttgtagtatccctccatgattattggttagtatcatactatcgttggtgaattgtagtatccctccattattatttgagtttaattttaatgtgtttctttatgttatctttatttttttgtgcagccccttggaaatctcaagaggatggatttgagtgagtcgaaacacctaaaagaactacctgatctctcaactgccactaaccttgaatatttgattatgtctggatgcataagtttggtggagctcccctcctctattggaaagcttcgtaaattgctaatgttgagtttacgaggctgctcaaagctagaggctcttccaaccaatatcaacttggaatctctcgattaccttgatctcactgattgcttattgatcaaaaaatttcctgagatctctacaaacattaaggatctcaagctcacgaaaactgcaataaaagaggtaccttcgacgatcaagtcatggtctcatcttcgtaaactggaaatgtcatacagtgaaaacctcaaggaactcccgcatgctcttgatatcatcacaacgctgtacattaacgatacagaaatgcaagaaattcctcagtgggttaagaaaatctctcatcttcagacacttgggctagagggatgcaagaggctggtaacaatcccacaactttcagattccctatcacaactagtggtaacaaactgtgagtcattggagagacttaatttctcctttcaaaatcatccagagagatttctctggtttctaaattgcttcaagctaaataatgaagcgagagaattcatccaaactagtagtacccatgcgatcttacctagtagagaagtgcctgcaaacttcacttaccgagctaatgggagttccataatggtaaatctgaatcataggcctctttctacaactttgagatttaaggcttgcgtcttgctagttaaaaaaattgacaatgataaggaggaggccgctgataggagaacaactgtaattcctagaatcagggagaacgataaaattggcgtcgatgttccatggagatatcgctttcacgtgcctaccattttagaagaccatttgctcaccttccaaattgaagctgatgtgacgtccaacaagcttttattttcgttcgacatcaaggacaacaaccaagcggtgattaaagaatgtggagtactccaactctaagttcatttgggtctctttcggatttttgtaaataggatttgttgacgttgaagaaaccttcgggaaatcacgagctctcacaaggagtccggaccgcctccaggaatggagaaatccaaatcgaagctgaaaatatggctactcaacggatatggcaaaaatcatgagacaatgagatttttggactgtgtttggcattttcttgcattgttattaattttctcgagaaaatgagactcttaatttctagatactagatcgacaatttgttttcttcaacactgatcatctttttagtatccgcaaactaaatcaacacttcacttttttcttccttttaactaaacaaaaaaaaaatagagaagcaactatctacacaaatagtccattaagcagataaactccccggtttagataaatcacatagccaactcaaaagaaccttagcacctttctcccatgaacaatcaagcatcatgtcatgagcaacacctttaatacaaaccggttcaacctcataaaacctcccggtttccttcagtccttcatcgtcctggaaatccataacccatttcggtttaatacaagtaccaagattgaaaaactttcatgtttggtgatgcgttcttagttcttaccactatgaagtcatctttggcacctaaaacaagaaccttggtcgaattctccattggttttggtactggaagtgatgcgtttagctttctcaaatcaaacaacggtattcgtgaactctcactcataagatcctggtaactaaatcgaaataagagagaaaacaatctctttagattattgaaacgtgatttagattcaagttgactatcgagctagattataccgcttcacaagttgatcatccatggcttgagagaagaatgtttctcgacaaagaggaatagatttctgaaaacctttagcagctaaactgagagtaacctactcaagaacaaacattgttgaaaacatgaccctagcaagatcaaaggcagaacaagagctttaccttaaaagcagccacaggtttagaaaagagataacgtaacactaagccgctgaacaaagaaagagaatcccaaacgttacatataagctagctaaaagaagaagaagttctctgatataggaaatagccaatggttgtgacaagttacctattaccggaaggtggaaccgagcaaaccattaccgcccctgaaagctctggaaacgcattttccgtacctgaatacgaaacaacaaactcatcggttatcgtataggcctgatcctaaaaacgcaactcatttcgatgtatctacaccttacctaatgaacgcttgtttacaatatttgccaagtaatattgaacaatgagtcctccaaaagaatgaccaacaagaacaggaggtgaagagccaagattcgattctataaaatctgcaatatcacttgcgtgcgtctactacacaaacaagtaatacaaatcttgctgaatcaagtaatgaaccaatgaagacaatgcacattgcaattttcaagtacctgaagtgttccagcaactgttcccaaaggttcatcactttcaccctaaaagattcaaagatgacaacatcacaattcacacacaaatcacataatttcaattcaaagtttgaaactttatgttcttgatagtctaaaaatcaaaattttggtcatttgagaatttacctgacctaataaactaacagcataagaatcaaacccagaagaagagaagaaaggtaaccaattttcagcccaacaccaagctgcgtgatagcttccatgtacaaacaccaatggtggattctctctttcggatttggattttctctgctcgattacctccatttttagaccagagggaagcttgtgcaaaaggcgggtttgcccctttttcaggttgtatggaatcgttgttctaggggaattggtgagagctgctatgggcattttgaagtaggataggcatgggaacgagggaagtgaagaagacgccatcatcgttattcgttaagctcagagctattctgatttctgaaaaggaaaagctctcaagaacttttttaatctgaagttttactgttttacgttaaataaatattgtaaggaaaaaactatagaatataaacactgttaatatgcttgaaaattattttgaaaatactctaaaatttcttaataaactcttgaaaattcgaaagtccaaaagatatgtatttcatatatcttactccgagttattcaattttacacataactaactaaaagtaaatatattttttagtatgaatctgaaatttaagagtttttttcagattttttggaatttttcaagaatttattctcatattagaaataaatttcttatttcaatattaatatttttgatcgatatttagaaaagttaacagaaattactttcgatcagcttttgggtgttaaatcaatactatttaaatttttgtgtattataacaaattaatttatggttttcttggacccaaaaggatttttcttgtccttttctctctcctgaagcgacttttctggcgattgtcttctttctgccctagcgccgccgttggtcggcctctcgccggcattcgtgcccgttccgatgccaaagaaaaagaagaaggcctctcgcctcttccctgttcattctacctccaaatttgagcgggtcctcgcttcctctgcgggctcgtcttcgcttccagcttcccgagatgctctcgtctctccgctgcctctcatctctgctccagcgtccgtcagttcgtttgtcgcagcggtgtcgtctccttcagtcgagattacgggatctcttctcggttctcctgagtcgcatttggcctctgtttcccccggatctgctttgggcgccgccacttgtcccttgaaggagggatctgtagccttgctcttagagtcgtttgtgcctgttatctccgttgtgaccccagcgtataagatctcctccgttgttgtcactggttctattttaggaggctcgtctttggctggagcggacctgcaatccattactcctttagtcgaggcagcgagttgtgtctccaagcttctgggttcttcaaagcccagtacctctatagtggtcccagcgtctgagatctcctccgccggggtccaagttccctttgttgtcgtcccagcgtctgagatctcctccgctggggttaacgttacctctgttgttgtcccagcgtttgagatttcctccgctcgggttaacgtcagtacttcgggctgcttgctttcagatggagctactcggcaaatcaacaattcctctggtcagaacaatgtgccttcttatgctgaagctgccaagtctcaaagctcagatcgtccttgggctgccaaattcaaggactctctaaggaatcttaaacagatggatctcccttccttcttggaggatggtacccccgtggttgtagctcctccgtcgattcttctaaagactgcggatatgtggaagggtcatctagttgcccaattccacggtctctgccctccatcgatgaagatcttcacggaccttaatccaatttggggtaagtttggtaatatcacagtgcggatcatctccgaaacagcggctcttatcttcattccctcgcaggctactcgtaattgggtggtggatattggcttttggcacgctgggaactgctcgtgtactgtgtatccttggtctcctgatgggcctctcgaattggaggagctccaatttgctcccacctgggcagtccttaaaaatgtcccccctcacctctattttttggaaggtatcagtgtcattgctagtggcataggagaaccccttcatactgagaagtcttggttggatccggttaatattgggactactaaagtaaaggttatcataaagttggattcagttctcccaaccactgtggttgtccgcgatatccaaggaaattctgctagggttaatgttgagtatcctcgccctcctcccaagtgtcttaactgcgagaggtatggccacttactgagtcgatgtcctaaacctctaatgaaaaaactccctttcaagacagttaaggccgcaggctccagggaagtgtctcatccttcccttgttttagctgcttcagggtctgattcaggagttgagacggctagtgtggctcctagggattcccgacccctaaagttaagagaaggtgctcccgttctaagagaagagctactagtctccctccaaaagtcaccggttccactgctgttgataaggggaagaacattatgtaatcttcttctgttctaagtaagaagtgggtggctaaggttatcgttgatcagggtattaagatgctgccacctttggtgccagtggctcctgtcagcttgcagaaggtttactcctcttcccccctgactgttgatgttcttgactcggatttagtcaagaggaaggtaggcattggggtcccggatatggcagagttgttgatcgatgattccctgtttccaacccctcctggttggggggctatgacaaagaagaagagaaagaaactaatgaaaatttggcacaacaagatgagatccggagctcaagctattgcaagaggagatccctcctcgagcaaggctggaattcattgagacctcgtttcagttaatatctttttggatagtatgactattttttgctggaatattagaggcttaaatagccattctcgtcagcgagtagtccgtagctggattgcttcgaataaattacttgtaggcggctttttggaaactcatgttgcaaaggagaatgctgcaactgttttggcgtccaccctaccgggttggaaaatggatagcaactattgttgctcagacttagggaggatctggattgtttgggacccttcggtgtctgttttgatctttaagaaatcagaacaaatgatcttatgcagtataaaggtgcctaatgtcgcaatttcttttgctgttgcttttgttaatggaaagaattctgagtttgagagacggatggtatgggaggaaattagcgttgtggcttcttcttctccgctgatttttacccattggttgctgatgggagactataatcagattgctgcatcgtctgaacactattctgtgagtcagtcaaccttttcccttagaggccttgatattttccaagagtgtttgagagataatgatctggctcatcttccaagccgtggagttttctatacctggtcaaatcatcaacaagctaatcctattctcagaaagttggatagagccttaggcaatggaatgtggtttaactcattctcaaccgccattgttgtctttgagcctccaggtgattctgaccattctccttgtgttattcatttggtaaatcaatctgttagttcaaagaagtccttaaagtatttctccttccttgcgactcatcattcttatctgtcttctattggagatgcttgggagaagaagactcttattggttcttgtatgttcatgttgagggagcggttaaagcattcaaagcttgcttgcagagccttgaacatgtcaggtttcggaaatctccaacagaaaacaaaaggcgccttaattcaacttgaagacattcagaggatgcttttctcaaacccctcgggttctctcttcagacaagagcatgttgccaggaaaaattgggacttcttttcattggccttggagtctttttacaggcaaaaatccagaattcgttggctgcttgagggtgatgcgaatacgagattctttcatagagcggtgattgctcatcaggctattaatctcatcaagtacctcagaggtgatgacaactctaagattgaaaatgtgaaccagataaaagacatgattgttgcttactactcttagctcttcgggagaacatcaatacggttcctttttctgttgacactatcatggctattcatccctttcgctgtgacactttactggcagccaagctttcggctatcccgtctgatgaggagattactctttccgtcttcttgatgcctaagaataaggctccggtcctgatgggttcctggctgaattcttttgggactcttggcctgtgattaagaaagaggttatttctgcggtgaaagagtttttttccacaggttatcttcgtaagaagttcaatatcacagcgattactcttactccaaaggtgataggggctgataagttatctcagttccgtcccatagcttgctgcaacaccatctacaaggtcattacccgaatcatatccacacggctcaagcttttcatctctcaggcagttcaaaataatcaggttgggtttattaaaggtagattgctctgtgagaatgttctgttagcttcggaattggttgaagggtttcacttggagggggaggttactaggggctgtcttcagatagatctctccaaagcttatgataatgtgaattgggattttcttctcaatattctagtggcaatggaccttcctcatattttcgtcaattggatcaaagtttgtatctctactccgtcttatagtgtggccttcaatggggagctcatcgggttcttctcgggaaagaagggtattcgtcagggagatcccatgtcttcccatctttttgtcctcgtgatggatattctggctaagttcttagaccggggcgcggtaaattctgtgtttcagctccatccaaagtgcttggttcctatggtatctcacctcagtttcgctaatgatgtccttgtgttctgcaatggttctgaatcttctatagctggtattctttcgatcttggctgactttgaaacttgttctggtctaggagtcaacaagcagaaaacggcgcttctcattgatggtggtgacatgactggtttgagaaatctttctgaaagatttggcatctcgcatgggtctctaccggttaagtatcttggagtcccgttaatgactcagaaaatgcatccgcatgattatcaacctcttattgatagaataaacctgaaattctcttcttggactgtgaggcatatgtcttttgcaggtagactgcaactcctgaaatctgtaatttattcgacgatcaacttctggacctctatgtttattcttcccaatcaatgtctccacaagttagagcaaatgtgcaactccttcctttggaaaggagccccgaactcggcccgcgacgttaagattgcatgggatgtcgtttgtacttctaaggaaagtggagggctcggtctcaagcggttggtttgttggaataaagtgtttgctttgaagttaatttggctgctctttactaaggctgggtcactgtgggtgtcttgggttagaatgaacctaattggtactaggaaattttgggatttaaatccttcaaactctggcagctggatctggaagaagttatgcaagttgagaagcgtggctagacccttcatagtctgtgaaattggttctggtgatacagctagcttttggatggacaattggaccgaacttggtcctttgctgaatctaacgggccaaactgggcctcaagtggttggccttcctctttattctgtagtgagggatgctcttcgtggtaactgttggtggatttcctcaagtcagagtaggaatcccattatcaccctcctcaaaagtgttttacctgatgtgagtagtgtgtttgagtgtgtggaggatgatgtttatttgtggaagccagatcatcaacctccagcaaactctttctcttctcctaagacttggctggctcttaatccgccttctccacctgtcttttggcataagtcagtgtggttcaaggatcatatcccaaagcatgcattcatttgttgggttatggcttggaacaggcaacattctcgtgacagacttcgactctggggtctttcgatctctccgatgtgtttgctttgcaacgcccaccatgagtcaagagaccatctcttctttaactgtgcattcagccgtgaagtttggtcttcctttactacaagagtgaacttgtctcctcctctgctcttcatggattgccttggttgggttaattctgctactagggatccaaatctttccttgattatcaaacttattttccaggcctcggtttacctcctttggaaggagaggaacgaccgtattcactctctccagcacaggtcgccggcggctatcattaggagtatcagcttgatcctgcggtctcgtctagaccccctgtctaggaagcagctgaatgcccctccaggtttttctctgctctcctcgtgattcaggttcttcagttagtgggccggttgtttttggttagggcctgctttctctctttctagctttctgtctttttctttttcggtttagggcatgtgtgccttttggaccattggtcttgtaagtttaagaacagaggcctgcgtgccgtttgggctttagggccttgtaatgtttatttggaaatttatgaattaaaaaaaaaaaaaaaaaaaaagaagttatttttgttgtttagtgaatagatggtaaatttatatgaattttactcttaataaaattataagttaaaacattattaaacaaaattttggaaattgactagagaaaaatatgtttagacaacaaagttttaaacaaaatcataattttgggttcccgctaagcaataagggaatccagccgcgctcatacgacatagttggtggtggcaccaaattcgtttcttacatgaacttgtcgaataacattcgcacagttccatcattaacattcttcaactcaaacaccggaagatgatgagtgtatctatgtaaggaagttgatgatgtacaacttcagcgatatgcggaatctcagttgcactcatgaggtcaacgtattcgacatgtctcttcatttgttcacacctccactggctctgtggatcgaccattagtaggacgagaccgtcatgctcatttttcaagtgtttatcaagttgaaaataagtctccgaggaattgcaatcatcgagaggacaagacctcagtttagtcattttgatcaaagaataaattactaaaatcacatctttcatcttactttaaatttagatattactgcgccaacactagtcaaaattagattgaaaattgctaaaaaaactcatagattttgcttagtttaaatttagggattctgtcgctgccactagtcaatataaagttaataaattacttaggagtttacaaaatttcaattttgttttactttaaagataaattattcattaataatactttaacataacttgtttgtttcttttctaactgatcacatatatatattttaatttgccttaatttacatatcacggcgccaacactagtaagctttatcaagtaagaatttactaatgacacataatcaactaaacttaaatttagatattacggcgccggaattaatcaagataaaaatttgctaaagaaacttttatgtttctcttaatttgaatactacttatgacacatatatttacttgaatttagataatatgccatatttggtggtaacttactaaataaacatacatattacttagctttattgtagactagatcataacccgtgctatacagcacgggcattaatattttgtataaattaaattgtatattttgttatgtttgctatgtcaaaattatttgttatatttgtcaaaatttagtaaaatatattcaaatataattaaatttattaaaacttaataaatttaaaagttttttttgtttggagacgcactatctacatacaaaatacccgtttctattttttttagtatttttagggcctaaaactttttatccaaaccaacccaaacccaactggacccgacccgaaccgaatatttagaattattctattaggtagtaaatcatatacccattaatcccaaacccgaactcgaatgggttactcatatgcccagccctattctctgatttaattatctaaaaaatcccaataaaacatatgttttgctgactactttttattcaaaaaaatttacatcctcttctgccaaaatcatttcataagacatcccaaaacccatggaataatgattccatgaatgaagaatcctaatttgaatataccaagaggttttgaaaggttttaagtttttgataggtgtgtatgtgagaaggtacatccacatcgtgatggtaatctgcttatttataattttaacttgcattatacagcaggtaggcttatattttagttaaactaaaaacttttattgtaaagttgattataaatatatgatattattttatttgattttaaatgtatagtaaactgcgagttgtatatgttttgttgatattatttatattgtttagtgtttaaaattatatacttgtattttgattgttatttttagagtttcacctgtagtatatcatcttgtattaatattgatttaaacccgtcaattctaggattttccagcttgtattaaaaattgaatcacattatacacattaaaaaatctaatatgttattaattattgtagtatatatgattataaattttaaaataatatgtatgaaattaaatataaatattcaaattatgacacagtactcagtaattttttttcttaaatctacttttgacccgttatagtattttttcatgtattgaacagtttatattcgtttttaaaaattcaaattgtggcatatgcgaaaaaaactctaattatttttttataacgatggtattatttttcgcaaaaatagaatcatataaagatgagaggtgaactataataattaataaaaaattaatatgataatttagatatcaaatctaatttgttgattttaattggttacttttttggaaattaataatgtatttcgtttttgagttaaaattaattaaattagtatttgactttttaatttttaaagaaatgaattaatttactctttaaaattttatttctaatggcatacctatgtaattacttaaaaaaaaataaggttatatttaaaatgtacttcccaaataatatagtaggataatatgtctttgacactactccaaaattaagaaacatatttctaaacaataaaatcataagttttagttaacttaaatttagataatgcgtccctaccactagttataagataagcaatacaatgcttaggttgacaaagaaaatgttatgcttatgatttttctagacaaaaaattgttgggcttaggtcgaccaaagaaaaaaaaaattgggcttcttattttcatgtagaacgaaaaaatagaggagggtggttatggttattgatattgtgaagaagatgaaagtaataagacaagtataagaaacacagacgatttttaaggagataaggaagagaaggtgtgtgaaggggaaaaagggttttgatgaaaggttcgttgtggattatatagaaaccaaatctgaagcatccaagatttgcaaaaacataaaatgaaggagtgcggtggcggattctcgaagcccatcatcggagccgtgtcagattgttgagttgttgctagctctggtttttaggtttaagtgtgtttctgatttagataggtttgaagaagtggttaattctgttggaatgttagctctgttccaacttacgtgagattttgtctagccttagaagcgagtgtaaatacgttcacagtgagcaagagctccagatgaaaccgaataatacttgagatccgatttctgagcaaggcaagaaagtgaaaggatatgaagatgtctgagcaagaagagggagtgagagaagacggtgaggttttgttcactgagcatatgagggaatcaattgatgatgaatgatgtggtggtagtggtgttaatttgtcgttaagtaaatgtttggatcatttacacagaaaaaggctatcatatgatctgaattacgttttaggagagcctgttaagttttgatcttttagggttttagatctaaaattaacagagctctttgatttaacattttggaaattgaatcccatgttaatgtagatgaagaatctacccaagtgtgttgaaatatgtttgtgaatttaaaaactgatttattcatttttggaggaatattgatagttggttttgttacatttgagaacgtagaacaattgtagagcggcgtgtaattgattttgttagtttgtgttgaacttatttattttgagatataacaaagaaatgaaagacgtcaacaacaaattggtcttatagttccggttatttattctattctagaatagattatgttggcttaagaagacatttagacttaagagttatttcctctgttaaaatatatgtccttcattcttccaaacgattaagtgattttaagttttgtttttgaaatgattaaatgactctgagttttgttcttccaaattaaatcaaaaatattaacaacataatctgttcttaagaaactgattagcgaatctcaagaaatacatatttgtaaacaagaagaatttggaacgagaataatatatttataggtttcttaacaacaagaatttggaacgatagattgtttggctaccaacaacataaacaaaaaaacaagcaaacggatatagttccaaaataaataattttatatggtcaaaactactgttgctatataaagcacaaaaactatagaaacccaactcaacaataattatcctgttactttttttgtttttttgctatataaactaagcaaaattttcataagtttgaacactcataaactcatctcttcaaaataatggcaactcaaacaataaaaaagatatacagtgttttgatgattgtagttttatttacgatgatggtttcaaccaacgcgagtacggtggaagtgtgtgttaagcattgtgtcccgaaccaatgcatgaaagtttctcagaaggcaactcttccattatgtgagactgcttgcacaaaactctgcaatgaaaacaaacatgaggaatatgtcgtgcctcggagttactgtgagggattattttggtttctatgtgataattgaaatttaataaatatgcaaagtaatatatatgtattttttatctgtaaaaaaataatctataatgtaaaaatgtacctttaatcaatatactaatttcatgtaattattttatttatactaatcaaattgacacatcaaaatgctgagaagttatctaatcacccaactaataaaaatcttataaatgcaatattgttctcatcatctctccacatcaatatttagatcgttttgtaatctcttgctaaaactaatccaatcggttctctatcgaaccattaagttatgagttttctctttacaattttgtatgaatgactagaatgattgtgaaagaggagagcaatctcgagttatctaaattttgttttgtcacttgttcataacaataacatttttgtgctacgaatgtcaaaatttcaggatttgttaagtattagagaggatgaatttaatagttttttttgtttttgtgttttatttttgggtttttaatagaatttaatagttcatgtattgtttaatacaatgtcaaaattgtgtatatatttaagaaagatattatttaattagtgtacaaatatatatttgtaaacttatggtcaatgatgtaaaaatttcaattagtaattttgaggcttgttttttttttagattcaagccacttctttagtgggcttatcgaaggcccaataccaaatttacgtctcctctctctctctccgatctcaatagatcgctggagttgagagagcttcgggacttcgcgttccttgacgaagaagacgatacttcttctccttccatcacagcttcacgcaaatctttctgcagttacatcttcttaagattctgagttccgacttatttcgtggaaggattttgatatttcaacagtgattttaattttatactggaacttaagcatcacttaatcttccggctaaaatgatgtcgccgaagcaaatctccgacgatcgaggatcttcacatttcaggtaccttcatacccaatttttccattaaaacctctctgctattgtgtgtggtttcttcttttgctagttttgatttgcgtagaaatcaaatgagaaaaatcaaaaatcaagaacgaagtttcttcttcttgctccaatggagtttcattgaaattacaacaaaatgtgttctgttgcttcattttcctgaagataatgcagtaacataattaggtagaatcactgatttgagtcataattaggttaagattttagttcattgggttttgatacaatactatgttgaagcagtgctgtgagtcctgaaaattgtcattggcttagaattgagtaatctgctacctaattttttgtattgttgactctctttatttgcaggcatacaccattccagataatccaccttattgggaacttttttaggatatggtcagtatattcgatgtaccgatacttgaatcagacgggagcgcctgttgttctctttctcttctgctgtctggtgccttcatcaatcatcttcttgataattcaaaagccatggaaaggaagggctctttctaatcaacaggtttactttagtcatatctaatttcttgcatgtatatttatgtggatagtttggacataaattatatcttgactgtttcagattgtaccttctcttatcaatggagtcatcacggctctatacttcatcttatggggaaaaggtctcaagtcttgtggacctcttaggtatttgattagttattaagcattcatactaccgtaaaattctcctctggtcttatctgtattaggagttcccgtagatattggcttttgaaaggtagagaagttgaaagtttacctatgagcaatttggtcccagtttagcagtttggttcaatactagacttacaatcctctccttgtccttcatttctgcaatcttcgtatttaagctacagtttctgtcatttggtcaaaaaaaatatcttcagtgatatttgattatccttgcttatgattctttgtatattattttcagagctatcttgtcagagtattctggtgctgttcttggagtactttctggagtattatatggacggagaggccatgtgtggaaaaaggtattcatcttacatagcatctcaagtcaatgtaaccagttaactagcacgatttacatagttttacccatagtgttattttgtttagtacccttggcatgcatcagctcacttgtctcactgaccaactatagagctgtgcaatagtatctagcatttagtgatgtttcttctggctagtccatatacttatattgcttgcagtataattattgatatgaattttaatatggaaatatcaaaatttatgtttatatatcaacaaggatacttattcaaagagtaggaaaatatttctctcatattttgcaaatcatgataggtaggtggcctcattgcaatgctggtagctctttttttcttgtctcaaggatgggcgacatcatctctctcccctttttatatcctttttcgcaagttccttcttcttatctcgatcttgatctctatgtatatatatcttgctcgtttttaatggtgtggatagtttaacttaacaacaagctaccaacaaaagatagtactgaaaccaaagaggaagaagtacaaacagaacaagcactaggtatgatgggaatgatgataccagtttttgctggaatcttatcagcattaaggcgggttatcgcacgccgtgtttctctaaaggtaatgctctcagattccttcgatttctccagtcatttcttttcttatttctgcttcctttgtgaacaatcaattttcttgttttgcagaaccagcagaagaaacgactacatgcgataaccattacttctgcaacctgtttcttgttccctgtggccatgtgggaccttatcatagtaagtgttgctactcttttgcaatgagaaggattaatgtatcaaagatggtgttttctcaatcacccaaggccggtttggttcactataataacaaaatttcacttcaggggtcatcttctgggaaaacatccgagttaccattttctgcgtgggctttccttagcaccattattttcgggatcatcctaatattctacgttgataatatcgcagaagagaggtttcgtaaagctttacccttaaatcatctttacattgcattttaacacacaaacatatgctttaaacgaatatgttctgtttgtcgcagattgcatatggtgttttcttcgccgaggcatttaatggtagcaggtgtatgcataatagtcatggagttagcttatgagatggatttttctcttcccggtttcatcgtttgttgcttagtattagggtttggaatattcgaggcaacatctctagaacggaacaagaaagactcttcgttgaaatcagaagatccatcaaacggaatccttggtaataatgactttgatacttctccaattcttcccatatagctcaccaatctttccctacactaacgacgatgtactgttgaatgtacttgtccttgacgatgtaaatctgtctggttttattcgtttctcaatctttgtaccttcatttttcagctttttttgttttcttggtgaagcatatgcaaatattttggtctaacgtagacaaagatgataacccatgatgatgaatatacttacggttatacgaagataactctgtagaatgatcgaattgaaatttcttcgatatcaaaacatgtcacggtttgacaataatacgaagaaaaccaaaccgatcaggaccaagagaatttaaaccaaaccaaatttcttatggtttgagttagcaacgtgtagtaaccaaaccagtcaagcgtgaaacgcttcgtttccttctcttttggtctctgtcaattttgatgtttcgccgagaaaaaaaaaaaacaattattgatgtttcagcttcttctccgatgcatttgcttgccttcgttgaagctctttcacgttggtcgtagtagtgttgttgtagttaagacttaagaagatggatctctctttgacatcaatgactcttgtctttctacatcccgaagagggtaaatgcattgaattctggagaacttcgtcaacagagtatttgctttcctaggtgttgatttagattgcatgaatcgttggatatgaaatattgaaatgtaacgcgcagcagcgttggtgtttcttaaaactctagtagtttactcagtttggttttctagtgttaagtttcaggtgctactttctggttgatgaggtaaatgatgaaatcaattctttgaactctttcttgtgtttgtaggagatggatatatacactaaagagaataatttatagacctcaaagtctctggaatgtttaacgttgtagcaacaagtttcatagttttgatatttaacaagtggactagtgcacactaatgagtctcagtgtttcttcagaagctaaagttttagttacatattttgctcttctttggtcaacttttgctttccttctctgagttctcttctctttaagcaatacttgtaaatttttgcctaaatctgtttaatcccaaatatcaagccgttccggtttatcgaaactaaaccggtgattttatagaacaggaagaaacaaaaccctatacagtattttgtttgcttgctggtagagccatcgaattcaagggactaagtaaatcccaactctctttttcactgaaacccctaaatattaggtcttggataaagcttttgtaacaaggtaggtttcgaggttttactgattatttttttgggggttccttagtccataagattcctatttgcgttgtgaactccaagtttccctctatgcaaagttcataagattcctgttttaccaatttaacgtgtttcatttgcacttgcttggattttacatgaattgaaactttaaaactaattgaatttttgtcgcccgcggttgttggcggaccggaccaccgcagagtgaacagaagcaaggtccgtcgcgaagtgcccgtttggtcgcgggctcgcctgtctgccacccctattcatctctattacttttatatttagactttacagaatcaattattttggaatttctttatatttccatattttttcttataattttgtagactataaattaattaatattaattactactaattcaagttttcgaaaaatagactacttttttatcagaataatcagaagaaatttaaattaatattttgagaagattttgtttccatataaatgtatataattatatttaaaataagtaatttaacaaaaacatgtagagtatatgtaagaaataaccattgacttgaaaagaatacacaaaataaccttggaccaaatagtatttgtcggctacagaaattttggtaatatttagtctattttagcctttctctttcttattccttcttttgttttttttccatgttctttacgagactttagtcatagagttctctttctctcttcatttttaacacaattcatcttcttcagattcaccatgtcattttctttttctatttctctcttcctctcctaaaataatcttcaccacctttcataaaatatatcatcatatctttttattttgttcacccacatgttctctctttctttttccatagaaatctctctatctctcattctttattttattttttacctgaattctccgtcaatgtcgttgtgatataagagattagatttgattttaaaacaaatgtctgattttaaaatgcatgtattttaagaacaaaacatgttattaacactgatatattaatatttgtcatgctatcccacaaaaactcatgaaataaataaatatttgtcatgttatccaataaaaacccatgtaatattgtaacaattctatatgtttttttaaacttcgcgatcgataagagaattgtatgctttttataaatattttgtgctatttcagaaaaacacattatttcagagaaacatatatatcgttttgtatgtattttaaagaattgcatgcttttttgtaaatatatcatgttattttagacaaatatataaaaactttataactacaaccaccgatatttttgtaaaaacaagaaaatctaaagatattttagtattttatccaccatagaaaatgttatttacctaagtttcctgacacaaggctattgtctcaattcttttcaattccatggttactctctaatattacctttagaatggttttccctacccttaaccttaaaacctttctttcaagcctatgtactatttgtgagtgaggcctcttgtatgaaaatgctatagattttgaaatcttcaaagtattgagaacgacaaggttttagctcttgtttttagctagcttttggaacatctttggactagctactaggttgggaatgaaagatttaagtggttagattgaatacttgggattgggtttgaaaaaaaaaaaaaaaaaaaaaaaaaaaacctctttttctcttagtttttgttgctttgcattcatattttggcatatagtattgcatttgcatttgcatttgttttttttaggtacatgagtggagtttaaagttttggaagtaaaatggagcaaatggagcaaacaaaggagctaaaagattgcaaagtggccaaagaagagaagctagtaggaatctaccaaactggtcgattgcgtggtcgattggtcaggaccagagctacggaggaatatgaatctaccaaagtggtcgatttcgtggtctactggtcaaggattaatgttgcggacgatattgaatctaccaagtgatctattgcttggtcgatttccttccttaaccggatcaaaacccggtttgttccgggttaatccggtttattttctcgttactataaatactcttaacctagttttagagagagggagcttttgtttagggataaaaacttctcttgaaggttctttatctaaggtttttgtatgaatgttgagttcttaagtttctatatcaagtatttcttttaaatttctcatctattctctaatgattatggctttacaaagatcaaaccaattcctttgtatgatcatgatcatgagtgagtagtctcctagagttctttggttagggtagattaggatggtttagatgttgggttatggagtttagggctagattacttaagattcttacttattggttgcttttaaggctagatcaaccttgatcatgatgatttagacattaggaatttcatgcccggaaggtgttcgatgaaattcccaaaccaaaatctttaagtgcttttcataccttacctttggaaattgttgattagggtgattagtggctagatagacttgttatttatgcttattgatcatttgattgcctttggaaattgttgatgattgattgattagtaaagggattaatatcatggaaatgtattagtcttgtttagtgttctatggcctaaggatcattgcttgttagaagttgtttgttgctccataatccatctctttatcatttctaatcgattaccttaacccgagaattcgtctttagttttcgcttagtaatttgttaatttcccgctttgtttactttcgaaacttgttggtcttttgtttcttgctttctcttatcttgttttgcattgtttgtttaataatgcattgttactaagatttagaatactcaaaatcatcttgttagcttagattaagcaagtgtgtgtattcttggtgagttgattaaattgcaaattgtggttcgataattaattgaaagaaatgctacatcaatttggcgccgttgccggtttgcaatagttattagccattaggatttcatatttgtttgagactaagccttttactttagttactaatcctttatacttgatctttgctcttgttttaaaggtgtatgaacctacgaagtcacggtcgagcaaacttagtagaagagattagtgacatccgccggtttgaaagagaaaacgctagagcaagaagagaacgagaacgacttgaacaccttgctcggttaggcgtcatgaatgaacccggaattgagggccataatggaaatggccaagctaatggggatggtcatatgccacaacatcaaccaagagctcatcaaccaattggagcctttgatgagccaaacatccgtggaaatagaaacggtattcaagctcctccggttgagaacaacaactttgagattaaatcaagcctcatcaacatggttcaaagctctaagtttcatggtttatcaatggaggaccctttggatcatctagaccaatttgatatgttgtgtagcacggtgaaaatcaatgggatctcggaagatgcattcaaacttagactcttcccgttttctcttggagatcgagctcgtatttgggagaagaatctacctcaaggctccatcacctcttgggaccaatgcaaaagagccttcctctcaaagttcttctccacaacaagaacggcaaggttgagaaatgagatatctagcttcactcaaaggagtaatgaaagtttttgtgaagcttgggaaaggttcaagggatacaaaatgcaatgccctcatcatggtttctctaaagaatctatactaagtaccttgtataaaggagttctccctaaatttcgcatgttgttggacacggcaagcaatggaaacttcttgggctaagatattgatgatgatttgtctttggtagagaatctagctcaaagtgatggtaactatggtgaagattatgaccgcactccaagagaaagtaatgagatgagcgatctacaccgcaaagagatcaaagcattgaatgaaaagatggataagatgattcttgctaatcaaaaaccgatccattttgtatccgagagtgatgtctaccaaggttatcaagagaatatggaaggttgtgtagagggacaagaagaggtcaactatgttagtggacaaggctacaacaaattcaaccctaactataggaatcaccccaacctttcatataggagcaataatgtggagaacccacaagatcaaagctacccacctttaaagcctcccggtttcacacaacaacctaactatcaacctaaaccccaagggaacttccaaccaaagcctcaagcctaccaccacaaccaacaccaagggagttcatcaaatcctccacctcaagcgaatgatacaaacgctcttcttaaacaaattttagaagggcaaggaagaggagcaatcgatctcgccacacaaatgaaaggaatgcacaccaaagtcgatgacctttatggtgagctcaatgccaaaatagagcgtttgaatgcccatgtttatagccaatcctcatccacttccaagcggccaatgggaactttaccgggtaaaccggaaccaaatccgaaagagtatataaatgctataacccttagaagtggtaaagagttgccgagtggagagctcaatagagacattgagcctaaacaaaaggagggtgtgattgagattgatgaagaggaggtattgaatgagaaagtttgtcaagatgagattgatgttgaaaaatgtattgttgacaaagggaagggtaaaatagttgaagagtctaaagaagacaaaacccaagaagaaatctccaagaaggataaaagttttgctaagaaagagactctatttgtacctccaccttatgaaccaaagttaccattcccgggtcgtttcaagaagcaacaactagagaagtatagagcaatgtttgatgagcaaatgaaagaagttactatcaccatgcctatcatagatgcgttcttgttaaacccgacttacaacaagtttcttaaagatgcggttgtagaaaagaagaaaacattacaaggtatggtccttttgactcatgaatgtagcgctatcttccaaaacaagattgtagcaaagaagcttgatgatccgggtagctttacacttccatgtgctcttggtcctttatcctttgaccattgcttgtgtgatcttggtgctagtgttagcttgatgcctctttcggttgccaaacgcttaggtttcacaagatttaaggattgtagaatttcacttgtccttgcggaccgttctattagaaccccggttggtttgcttgaggatcttccggtcatgattggtcattttgagataccaacggactttgtggtccttgagatggatgaggaaccgaaagacccacttatcttaggacgcccatttttgagaaccgcgggagcaatgattgatgtgcgaagaggaatgattaaattgaacttgggtaaggaggtattaacctttgatataaaaaaaacgatgaagaaacctaccattgaaaaccaagaattttatatcgaagagatagaagctttagcggatgagcttttggaagagctagcaatggaggatccacttcatagtactttgactataaaacaaggagagtttggattacttgaaagtgatagtgaggggtatgagaagatacttgattctcacaagccttctaatgaagatggaaccttccttgagttgaaagaagttagtcatgaggttaatgttgttgagattgaagaggtgacaaacaaggagggagctagcaatggtaagtctagcatagatggagattggagtgaactcaaggctccaaaggtggaactaaaacctcttcccaaggggctaaggtacgcatttcttggaacaaactctacttatccggttataattaatgacgaacttagtgatttagaggtctccaccctaatagaggaattgaaaaagtatagaaaagctattggttattctcttagtgatattaaaggaatttcggaaactctttgtgtgcataggattcatcttgagaatgagtcaatgacttccgtcgaacatcaaaggcggttaaatcctaaccttagaaatgtagtacgggaagagatcctcaaactcttggatgcgggaataatttacccgatctcggatagcacatgggtttctccggttcatgtggtcccaaagaagggtggagtcacggttgtaaagaatgataatgatgagttgatcccaactagaacaataacggggcataggatgtgtatagattatcgaaaattgaatgccgcttctaggaaagatcattttcctttaccgtttattgatcaaatgctagagaggttagccaatcacacccactattgttttctagatggatattcgggattctttcaaattccgattcatccaaatgaccaagagaaaacaactttcacatgcccttatggtacatttgcatataggagaatgccatttggtttgtgtaatgctcccgctacatttcaaagatgcatgatgtctatattctcggatctaattgaaaatgtggttgaagtttttatggatgacttctccgtctatggagactcttttgcctcttgtctttctaatttgtgtagggtcttgaaacgttgtgaggagactaaccttgtgttaaattgggagaagtgccactgcatggttagagatgggatagtattgggtcacaagatctccgagaagggtatagaggttgatagagctaagattgatgtgatgaccaatctagcaccgccaaattcggttaagggaataagaagttttttgggccatgccgggttttatcgaaggttcatcaaggacttctccaaaatagcaagaccacttacaagactattgtgtaaagaagttgcttttgtgtttgatgaggaatgtctagatgctttcaaaaagataaagaaagctttggttagtgccccaatagtgcaagcaccggattggaatctaccatttgagatcatgtgcgatgctagtgactatgcggttggagcggttcttggtcaaagaaaagataagaagcttcatgtcatctactatgcaagtaggactcttgatgatgcacaagttaagtatgccaccaccgaaaaagagctccttgctatagtgtttgcatttgagaagtttcgatcatacttggttggttctaaggtgatagttcatacggatcatgcggcattaagacatctattagccaagaaggatgcgaaaccaaggcttttgagatgggttttgcttctacaagaatttgacttggaaattaaagacaagaaagggattgagaatggtgttgcggatcatctctctcggttgaggattgataatgatataccaatcgatgactctcttcccgaggagcaactattggcaattaggctttaggatgcaagtcatgagacctataaaaaacttgaggaggtgaagacattgaatgaaaatggcccatggtatgcggattatgttaactatttggcatgtggaaaagaacctccaaatttgagtagctatgaaaagaagaagttcttgaaagatataaaccacttctattgggatgaaccatttctttatactctatgtaaagataagatctatagaagatgtgtctcgaaagaagaagtagaagaaattttgctccattgccacggttcaagctatggaggtcattttgcaactttcaagacggttaccaaggttctacaagcgggtttatggtggccaacgatgtttaaagacgcacaagagttcatttcgaagtgcgattcatgtcaaagaaaaggaaacattagtagacgaaatgagatgccccaaaatccaattttagaggttgagatctttgatgtatggggaatagattttatgggaccatttccttcttcatatggaaatagctacatacttgtggcggttgattatgtgtcaaaatgggttgaggcgattgctagtccaactaacgatgcaaaagttgtgttgaagctattcaacactataatatttccaagatttggtgttcctagagtggtcataagtgatggagggaagcatttcatcaacaaggtctttgagagtctactcaagaagcacggagtgaagcacaaggtcgccacgccttatcatccgcaaacaagtggtcaagttgagatttctaaccgggaaatcaaagctattctagagaagacggttgggactacaagaaaagattggtcggtaaaacttgatgatgcattgtgggcatatagaaccgcctttaagactccgataggtactactccgttcaatcttctctatggaaaatcatgccatttgccggttgagctcgaatataaggctttgtgggcagtaaagcttttgaattttgatatcaaaaccgccgaggagaagcggttgattcaattgaatgaccttgatgaaatccgccttgaagcttatgagaacgccaaaatttacaaagagaggactaaggcatttcacgacaagaagatcgttccaagagactttaaagtaggtgatcaagtgttgttgttcaattctcgtttgagattatttccgggaaagctcaaatctcgttggtcgggtccattcaagatcaaagaagtgagaccctatggagccttggtattgtggaacaaaacgggaggagaatttgttgtgaatgctcaacgcttgaagccttacttcgcgaatcaacacattggggagggaaccaaagtttctctcttggagcctcaatccgcctaatttgtgtggaaacgtcaagcttagtgactttaaacaagcgcacttgggaggcaatcccatggtatccttgtacatattttgattctatttatgtgcttttggtttgattaagtttcagggaagtatttggaaaatttcatatcaagacgggcaagcaaaaccatttctgggcaagcgaatcgaccgcatggtcgattggacggtcgactcatccatgtccgcaaatccgtcagatttctaatcgagcactcaatagagcagtcaatagacgagttggtcgattggacggtctactgattcatgtccgcaaatccgtaaattttcgaatcgaccaatcaattgatcgattggttttgaaagcccaggtaagtcatctcttgacttcgtcggttcactagaaattttccggtttagtcccttaaccaaccaaaaccgaaaaaaaaaataataataataataataataattccttctttttccttctctcacgacctcttcctctcacttttctctcttttttcaaactcactctctcttttgttttcaaacacacttgcttgtttttagtgattcaaatctcttgttcacttttttttctccatagaacccgaatttagcatctccactctcagattgacaaggcacaatggtagaaggcacaaagagaacaaaccccaaacgttctaagacaatgacctccactgaaccgcaaagtgaacccgttgctcattggactaaggaagataagaaagctctcaaagtcatctctccacttccttcatttccaacgcgttttgcaaatcgcgagatcctagagaagatgggtttgctcgagactattgacgagttcttcacaaagatgggacttggcgccttcacctccatggatcaccctacattcagtgagcctacagttgatttctttagcaccatggagtacacatttacgaacccaaagataccactagctaaagaaggaatcatcaacttcaaggtcaaaacaaaggctttctccatatcaattcccgacctttgtgaagcctatggatttgagaacaaaagcgagatgagcttcccgaagtttaaaggaatccacttcttttggggcgagctagcaagcgggaaattcagttgtaacgcaagtatcaagagcgtccgccatccggtaattcgttacgccttgaagcttctcgcgcatgctctttttgggagaggtgaaacgagttctactacggtttccgagatgtgctttctttttcaaggagtcaaagaattgttggtagaagacgcggacgagaatggcgatggaaggttggtacatgatgatcttggaaatgatgtgaactatgggtgcatctttgcttcttatctagaggattataagaaccggctaatcaagggcaagacgaaatccatctacattggtggtactctcacaccactttttgttaaagcgggagtagatctttctccattcaatgctctcccaaagcgtgaatacattgactatgagaacttggtgcgttcttgctctttaaaacgtagcgatgatgctttcatctacttgtacacggatcgagaggataacaagttggaatgcatactaccctcaaaggagatcacaaatgtagagagtcatgaagacattatgtttttgccaagtaaggaatatcaagtaccaaatttggagcaatttatggagattgaagaagaagacttgccaccatctccacgagatgacccttacaacctcaacaagtgtgatcttcccgaattcacatttgtgccaaagaccaagatggagaagtttcttcaatccgtcatcaagtctcaaaggaagataaacaagtggaaatcttatgcaataggaaagctacttaagaaggtgaagaagctccaaccaccggattatgtctcttccgaggatgaacttgtttttccttcaaatgaggaggaagatagagacaatattttggagagtgatgagaataatgaaacgcccgccacttcatcacactcgtctaggaggaagaacgcctcgagagaccactcctacatgccttagccactccacggtatcacttgtatatacgactttatttcttttagttctatttatttattttcgttagtcttttcctcatatttttctctcacaccgagacggtgtgaaataagtttgggggagagactaaccatctaacgttgtgttttgttttgattttatttctttgagtcttgcattgtcaatatctatgttttgagaaaaaataaaaaaaaaatctgaaaattttgaaaaatccaaaaaaatcatgtaggtttgcatattaattttctcttttagaattgagtctagaagcatctagtgtgcatttgcatttgcataggggataatgatttaattaccttgtagaaattcaagcttaggattgaacttaaagcccttgatcacagttaatcgttgcttgatcatcttggaaaaaatggaaaatccatgcttagacttttgcgtttctcgaaagcaatttctacttgtgtgaagcttacatgacttttgaaatatctctatgaatttggacttaatttgatattgatttctcgcttatggatcctaaatgcattctcatggtagtctaaaagactcattcgggttatcttattcgttttgccaatcttttgttaacccgaatggccattctcacctttagaatggttttccctacccttaaccttaaaacctttctttcaagcctatgtactatttgtgagtgaggcctcttgtatgaaaatgctatagattttgaaatcttcaaagtattgagaacgacaaggttttagctcttgtttttagctagcttttggaacatctttggactagctactaggttgggaatgaaagatttaagtggttagattgaatacttgggattgggtttgaaaaaaaaaaaaaaaaaaaaaaaaaaaaaacctctttttctcttagtttttgttgctttgcattcatattttggcatatagtattgcatttgcatttgcatttgttttttttaggtacatgagtggagtttaaagttttggaagtaaaatggagcaaatggagcaaacaaaggagctaaaagattgcaaagtggccaaagaagagaagctagtaggaatctaccaaactggtcgattgcgtggtcgattggtcaggaccagagctacggaggaatatgaatctaccaaagtggtcgatttcgtggtctactggtcaaggattaatgttgcggacgatattgaatctaccaagtgatctattgcttggtcgatttccttccttaaccggatcaaaacccggtttgttccgggttgatccggtttattttctcattactataaatactcttaacctagttttagagagagggagcttttgtttagggataaaaacttctcttgaaggttctttatctaaggtttttgtatgaatgttgagttcttaagtttctatatcaagtatttcttttaaatttctcatctattctctaatgattatggctttacaaagatcaaaccaattcctttgtatgatcatgatcatgagtgagtagtctcctagagttctttggttagggtagattaggatggtttagatgttgggttatggagtttagggctagattacttaagattcttacttattggttgcttttaaggctagatcaaccttgatcatgatgatttagacattaggaatttcatgcccggaaggtgttcgatgaaattcccaaaccaaaatctttaagtgcttttcataccttacctttggaaattgttgattagggtgattagtggctagatagacttgttatttatgcttattgatcatttgattgcctttggaaattgttgatgattgattgattagtaaagggattaatatcatggaaatgtattagtcttgtttagtgttctatggcctaaggatcattgcttgttagaagttgtttgttgctccataatccatctctttatcatttctaatcgattaccttaacccgagaattcgtctttagttttcgcttagtaatttgttaatttcccgctttgtttactttcgaaacttgttggtcttttgtttcttgctttctcttatcttgttttgcattgtttgtttgataatgcattgttactaagatttagaatactcaaaatcatcttgttagcttagattaagcaagtgtgtgtattcttggtgagttgattaaattgcaaattgtggttcgataattaattgaaagaaatgctacatcagtaggtttcgaagttaactcatcctgtatttggggtttcttagtttacacgtttcctttggggcagatccctatttgctctggtttatcgaaattaaaccggtgatttttaagaactggatgaaataaaacatgaaaacttaaaaattgaatttttcgattcctttgcatgtcttgtcgaaacctgaaagcttgagtattttctttatatttttcgtttgagagccaaaaacacaagcaattaagcaaatcccaactctctttttcattgaaatcccgaaacaattaggtcgtggattaagcttttgtaacaaggtaggtttggaggtttactcattatatttttttagggttccataagattcctatttgcgttgtgagctctaattttccctgtattgaagttagaagttcctgttctcagtttaccagtttatactctctttgtttcgtgcagagcagatggatcacttaagcaatttaccagacgagcttctttgccatattatgtccttccttaccaccaaggaggctgctttgatatcggttctctccaaaaggtggcgcaatttgattgcatttgtccctaatcttgatatttttgactgtgatattctgcattgggaggtgcgtaaagaggaaagggacgatattcgacagctcttcatggattttgtggatagagttttggcattgcaaggtaactctcccttaaagaaattctccctctgttgtggcggcggttcttattcggatagagtggattgttggatacagaatgtgatggtgcgtggtgtttcggagcttgatctatcaatgatttttgatacctcttatcatatgtatccacaagttttcgagaacaagaaactagttaagctccattatctggatttgatattcgttgcttggatgggagcattttcttaccaatgcttaaaactctccttcttgaatcagttttgttatctgttgagaattttgagatttttcttcgtgctttgcctgcgcttgaggaattagtcatgaatcatatatactggaaagaattggatgtgaatgtgcatgtatctgtatcaagtgcaagcctcaagaccctaacaataaaatgcatcgtttgtttacatactaagtcatttgatacacctagtcttgcttacttatcttactctgattatgccatgggagattatcccgtagctaaaatggaaaacttgtttgaggctcgaatcagcctttttgtacctgaagacgatatcagccgagtaagagcgccaaacaatgatttgttagaggatgatgagtacaatcatgcatgttctccgatatgaaaatgtggggaagcttatgaatagcattcgaaatgttcggtatctctatttctctcgtgatactcttgaggttagtgtttttgttcttttctctattagctggtcttggtaaaataaatgaaagataaccagcacttcgtctcaatttatggagcatggcagtcatgtttgttcaagtcctatttttaacaaataagcaaaagtctaattatggtttgtcttgttatcaggtgctttctctatgctgtgaatcgatgccagtgttcaaaaacctcaaatctttatctatcaagagtgttgagagtcgaggatggcaagcaatgccagttcttctaaggaactgtccacatttagaaactctagtccttgaggtatagaaataactaatttaccaaacatgtacaaagatagagttcacacattgaaaccttaaatgtctcctttatgccttcaggctctcttgcaccatgtaactgataaatgcggggatgcttgtgcctgcgtctctcgggaggagaaaggtcgttcgctcaaatcttgtccagtaaaagtgttagagattaaagagtttcaaggaacaatgaaagagatgcacatgataaaacatttcctggactatcttccgtgtttgaaggagatgaaaatctcctatatgaaaaagaatgatcatactacacagttcagagtcatccctcaagttattgcagagatggtggaacactacaacaagttatctaattgcaatgtccagcttgtagtgagtggttaattttataaaaagttgacagcacattgattcagccatttatgatctcgcttgtggtataatctttcacttccctagcattttgctttgagttctctttacgttttagattttgtggacgaatcgttaagagtgaattattttagagcagaacaccgatgtttaatatttttttccttggacatagtgctcaattgttttgttttatcgcaaaatcacggatgcaatacatacatgtttgacactaagcgatgtgatatacttctaagaactcaaaactcaagcattcccggtttaccaaaattaaacctgtaaaagaaccggataaaattgaaccagactccaattttgttcaactcttaaaattggatgccttttcgttgtcgaactcgaacctgaaagcttgggtctctcttttcactgaaatcctaatgatcctgcaaagctcagtgtcactgatgtttctgaagttatcacgggggtcgggggacatgatggaacactacgaaaagtcatcgacttgccatgtccagctcctagtggatgcttacttgtataagaagtggactgcacaatgaagtctctaaagagcaaaagtcgctctccttgaaacttgactcagtttggttttctagtggtgagtttcagatgctattttttggtttccctgcccttccggaattagacatagcagaggtatacttccgtctaaaatgaagaaagcatttctctggaccttttcttgtgtttgtaggagagcagggatatacatatatataccaaagagaatgattttatagacttcaaagtctctggaatgtttaaactcgtcgcaacaagtttcatagttttgatatttaaaaagtgtatggattagtgcacactgatgagtctctcatagtctattctttggttaactttgctttcgttctctgagtttcttttttactttaagcaatacttctacatttgggcctaaatctgtttaagcaatgtagcccaaagatcaacccgttccggtttatcgaaactacaccggcgattttaaagaacaaaaccctcaatttccatatatttatttaattggtttttacctctcttttttggcaagtttctattacttttggtaatcaaaatgtaaatccaaaactatcttcatttatataatagtaacattttatcaaaaaaaaaaaaaaaactcacgtcttcctcttaaaaattggatgcttctctgatgcctttgcatgtctatgtcgaacctgaaagcttgggtatttgcttcatatctcctcctttttaaagaaccggatgaaataaaaccctaaattaagaaaatcccaactctctttttcactaaaatccctacaaaataggtcttggataaaacttttgtagcaaggtaggtttcgaggtttactcattaattatgttttgggggttcttagtccataagatttgtatttgtgttgttagctctaactttccctctatgaaagttcatgttcgaatccataagattcctactttaccagtttaacgtgtttctttgcacttgcttggattttacatgaataacctttcttgtttggtaagattcctcttcgtttcgtgcagagaaaatggatctattaagcaatctaccatacgagcttctttgccatatattgtccttccttacaacaaaagaggctgctttgacatcggttctgtcaaagaggtggcgcaatctaattgcatttgtccctaatgttgatattgtggaccatgatattcgagagcttttcatggattttgttgatagagtattggcattgcagggtaactctcccattaacaaattttccctcgattgttccggtgttgattcggatagagtggattgttggatacagaatgtgatggtgcgtggtgtttccgagcttaatttatcaatctttgtggattcggttttcgaagatgactataatctctttccaaaagtgtttgagaacaaaaaactagttaagctcggattaagttatatttcttggttggatgggagcattttcttaccaatgcttaaaacactcgttcttgaatcagttttgttatctgttgagaagtttgagattcttcttcatgctttgcctgcgcttgaggaattagtcatgaataatatatactggaaagagcgggatgttgtcgatttgattgtttcaagtgaaagcctcaagaccctaacaataaacttcatcgtttgtacacatactttgtcatttgatacacctattcttgcttacctatcttactctggttatgtcgtggacgattatgccgaagctaaaatggaaaacttgtttgaggctcgaatcagccttcttgtagttgaaggcgatatcagccgagtaagagcgctaataaacaatgatttgttagaggatgatgagtacgatgttctccaatttgaaaatgtgtggaagctaatgaatggtattcgaaatattcggtgtctctatttgtctcctaatactcttgaggttagttttttttgttcttttctctatttagctggtcttggtaaaataaatgaaagataaccagtacttcgtctcaatttacggagcatggcagtcatgtttcttcggtcccatttttaacaaatataataagcaaaggtctaattatggtttctcttgttatgaggtgctttctctatgctgtgaatcgatgccagtgttcaaaaacctcaaatctttgtctatcaagagtgccgagaatcgaggatggcaagcaatgccagttcttctaaggaactgtccgcatttagaaactctagtccttgaggtacgtataacacaattcattaatttgccaaacatgtacaaaatatcatactttgaatttctcattgtcacttttatgctttcagggtctattgcaccatgtaacagataaatgtggggatgcttgtgactgtgtttcccgagaagacaaaggtcgttcactcacatcgtgtccagtaaaagtgttggagattaaagggttccaaggaacaaccaaagagatgaacatgataaaacatttcttggaatattttccgtgtttgaaagagctaaaaatgtatatggaagagaatgatcctgcacagctcagagtccctgaagttatcacgggggagatgatggaacgctacaaaaagtcatcaagttgcaatgtccagctcctagtaggtggtaagttgtataagaagtggactccatgatgaagcctctaaagaagaaaagttttggaatttgattttggtttaaattggcttgaaaaactgtttcaaaccaagacaatcggaaagccgtgggtaaaggggattctcccattaagaaatgggtaaaggggatagggatagggattcttgcttttgtccctaatcttgatatcgatgacaatacttttctgcatccggaaatgggtaaaggggatagggaagatattcgagagctcttcatggattttgttgatagagtattggcattgcagggtgattctcccattaagaaagtctccatcaactgtgtcggtgttgattcagttagagtggatgcttggatacgtaatgtgatgttacgtggtgtttcagagcttgttcttttaatcgttttggatgtccagtcgattggtaagaagttttgggtgcctccaaaatgtttcgagagcaagaaactagttaagctagagataggttatggagttgatattggttggttagatggaagctttttcttactgatgcttaaaactcttgttcttaggttagttcagttatctgctgataagtttaagattcttcttcatgatttgcctgcgcttgaggaattagccatgggttatgtaacctggagtgaagatgatgctgttgtgtcagatgcaagtctaaaagagactaacaataacttccaaccattatgtctgctattcttattattatttagacactttttcggttgatacgccgagtctcacttacttctcttactctgacttgttgctaaagactaccctgtaattaagatggaaaactaatacacttctcttacttcacttacttcggaatttgatttttgtgtaattggtgtatatatatatctataaaccaataaacccctcctaaatattctgaaattcttagttatattaatcaaaataatacctttttttgcaaaatttaaccaattttttaagttttttattttattttccaaaaccgatccaaatccaacacttatcaatagtcttaaagctgtcccggattatacatgtttgacctcgtcacggggctaatgttgtgatgtccaattcatgatctgcgattctttgcgcgatcaaatctttaacgtgaaaaagcttgctctatgtttttaccaaagtcctgcccttcaacgtgaaaaagtttgctttcttctgcagcctaactcaagctgtcccggtttaccgaaattaaaccagtgatttttaagaaccggattaaataaaaccctaattttgttttcttaaaatttggatgtttcggcttctccgatgcctttttcttcataaaatcaaagaaaccagcgataaagcaactcccaaatctctcttttcttgaaatctccaatatttgtttcttggtaagtatcgaagtttactcaattcgctttttaaggtttcgtagttcacaagcttcctttcggatgtattcctagttgcgttgttaacttagcgtttctctcttttagggtttaccagttataattaattgcttccttctacatgctcgaatttttacatgaatctaaagaccaaacctttctctgtttgtagttgaactgtttggtaatatacgaagcttttctagagaaaatggatctcttaagcaatctaccagacgagcttctttgtcatatattgtccttctttaccacaaaggaggctgctttgacttctgttctctcaaagaggtggcgacatctgtttgcacttgtccctaatcttgacattgatgactctatgtttctataccctgaagagggtaagcgtgataggaacgaaattcaacagagcttcgttgaatttgtcgatagattattgttattgcagggtaaatctcccactagaaaagtctccctcaagtgtataagtatgtctgatccagaccgcctagatgattggataagtaatgtgttggctcgtggtgtttccgaacttgatctgtcaatcgatttgtgtatggatgaatacattctcttgtcttcaaaacgtttcgagagcaagaatctagttaggttgaaattacaccgtatttgtattggccaaccggaaaaccctattggttggttggctgggggaatattattaccaatgcttaaaactgtcctacttgagtcagttgggttttatgttgatgaggtttttcttagagctttgcctgttcttgaggaattagtcatggttgatgtattctgttctggagcgttaaggatgtcatcgtgtcaaatgcaagcctcaagaccctaacaatgagttccaaccattatacgggaactatgtcattcgatacacctagtctagtttacttttgttactctgactatgttgctaaagactaccccttagttaacatggaaaacttacttgaggctagaatcaaacttttgttaactgacgatcaagtcgaaagagcaagagagccaaataacgatggcgtggaggctgatgaggacgatgttgttctacaatttgcaaatgtggggaagctcatgaatggcatacgaaatgttcagtatctagtgttttctgctaatactctcgaggtcagttttctcttcttcttttcttgaaacatctatggcaaaatgtctaattgacgtgtgtcttgtgttcaggtgctttctctatgctttgaatcaatgccagtgttcaacaacctaaaatcgttaactattgagggtaaaaagaggcgaggatggcaagcactgccagttcttctaagcaactgtccatatttagaaactctagtccttgaggtataaaaaaataactaatttgccaaaacatgaaccaagatagctttcatatatactttgaattgaatctcttattgtgtcctttatggtatcactctttcagggtctcttgcactatgtcacagataaatgcggggatgcttgtggctgcatttctcgagaggataagggtcgttcactcacatcttgcccagtaaaagttatagagattaaagggtttcaaggaaaaaagaaagagatgcacatgataaagcatttcttggtttattttccgtgtttgaaagagataaaaatctatattgaagagaatgcacttgaagtgtctaaagttatcgcaaagaggataaatcgctacaacaaggtatcgaattgcaacgtgcagctcctggtaagtggttgcttgtataaggagtggagtgcacaatgaagtcttggaagaacgaaagttgttttggtttgatttcatttaattggcttgaaaacattttttaccctaaaccaaaccaatcgcaaaactgttgttctttcttctcttgcattcttgttgaactcatacaaagcaccagtgcaccactatcacgcaaaggttagctctcacatctctcactctcatatgctctgtttctctttctctgttttaacagaagcatatagttactctctctaatctctgcctcttttgtctaacattttaacaaatacataaacgttttcaaagagaagagaaacattgaatgtctacatgttggtaaaacttggatacactcttacaagacacactcacacatacttatactacttgtacttggcacacttacacatacaaacatgccttaatcacataattaactctagactctactaccttgaaactctaaccacaacacttgcacactgctttactttaattaaacttcaacctcaagctaacccaaaaaacacactttactcttgtttgggccttaacgaaagctgcagccacacaagcccaacatatctttatgttgacttagcttcttctcctttggctcgatttcgtcttctttcttcatcgtctttctcttttacaggtttaatcaaaggctcaaatcttctttcgtgcagagaagatggatcatgttagcagtctaccagacggtgttctttgtcatatattgtccttcctcaccacaaaggaagctacgttgacttccattctctccaagagatggcgcaatctgtttgcgtttgtccctaatctcgatattgatgactctatctttctccataatgaagattttaaggaggataggtacgacatttatcacttatcagagcttcatcgattttgttgatagagtattggcaatgcagggtgattctcccattaagaaactctccctcaagtttagaactggctttgactcacaccgagcagatggttggataagtaacacgttggttcgtggtgtttccgaacttgatgtgctaatcagtttgcatggaacagattaccattttctgtctccaaaatgtttcaagaccaagaatctggttactctgaaattaaacagtcttgctattgactgggacatattcttaccaatgcttaaaactctccttcttcactctgttacgttatgtgttgataagatgttttcttagtgctttgcctgcgcttgaggaattagtcttgtttgttgtgccctggggaggtaagtctaacgatttcctcttaaaacattcgatgtttcagcttctccgatgtctttgcctgtcttctccaacctgaaacctttgtatcctttcttcgaatcttcgctagtagctccctaggaacaaggtaggtgtcgaactttactaaattctcctttatttgagatttcttagttcagaagtttccttttggctatttacgttgttaactaattagggtttctctctgttttaccaactcatcttcgcgtcaatttaataatcaaaactttctctaaaaggatttcagagtctaaagagattcgtgttattcatcacaatgagcaacatacaacatatatagagtagatgtacaaccgaaagcgtaaatctagggaaatctatctagttcagaagatctagttacacagaatatatgaatctgttagagtatattcgtagatgattatgccaagaataactgaagataaccgagccaaaacaaacccctaatattctctgtttgtatcgctgatttctcacaagagcttgtcttctttcgtgtagagaagatggatctcttaagaaatataccagacgagcttatttgccatatattgtccttccttacaacaaaggaggctgctttgacatcggttctctccaagaggtggcgcaatctgcttgcttttgtctctaatcttcacattgatgactctatctttctgcatcccgaagagggtaagcgtgacaggaacgaaattcgacagagcttcctagattttgtgggtagaatattggcattgcaaggtaattgtccggttaagaaagtctccatcaagtttctatttaagcttgattcagaccgagttgatggttggataagtaatgtgttggcacgtggtgtttccgaacttgatctgtcaatcgatttgtgtatggatgaatactttctgttgtcttcaaaacgtttcgagagcaagaatctagttaggttgaaattacacagactttgtattggccaacgggaaaaaactgttggttggttggctggggagattttcttaccaatgcttaaaactctcgaacttgattatgttgggttttatggtgatttgttgtttcttagagctttacctgcgctagaggaattagtcattgttgatgcattctggttcacgacctttacggatgtcaccgtgtcaaatccaagcctcaagaccctaacaatgagttccaatatttattcaggcagtatttcatttgatacacctagtcttgtttactttagtcactttaagtatgttgctaaagactaccccttagttaacatggaaaacttacttgaggctaggatcaaccttggggtaactgagggtcaaatcagacgagcaagagagccaaataacaatgacgaggttgttctccggtttccaaatgtggggaagctcatgaatggcatacgaaatgttcagtgtctagacttgtctgccaatactcttgaggtcagtttttcttttttcttttctctcgaggtgataaaatagagaaatccacgacggttatgtttatttagtcccattttaacgaactagcgagagtcttgtttagagacatgtaatggcaaaatatctaattgtgggttgtcttattatcagatgctttctctaagctgtgaatcaatgccagtgttcaaaaacctcaaatctttatctatcaagagtgccgagaatcgaggatggcaagcaatgccagttcttctgaggaactgtccacatctagaaactctagtccttgaggtatagaaataactcatttatcaaacatgtacaaagatatagttcatactttgatttgaatctcttattcatgtcttctttatgctctcagggtctcttgcactttgtcacagataaatgcggggatgcttgtgactgcgtttctcgagaggaaaaaggtcgttcgctcacatcttgtccagtaaaaacgttagagattaaagagtttcatggaacaatggaagagatgtacatgataacgcatttcttggactattttccgtgtttgaaggagctaaagatctatattgaagggaatgatcatgcacagcgcgaagtgtctgaagttatcgcggagaagataaaactctacaacaaatcatcgagtagcaatgtccagcttatggttagtggttaccatgaataagaatacgactgcactgcacaatgaagcctctgaagaacaaaactaaagcataggtttttactaccatgagaaataagcctattattggtcccgtgaaatctagcaggtagaacagaataatagaaaacaacgcaatcccaaacaatgcattcgaaagcagtctgttaccattttttctccttcaactcaattatgtttataagccaacaagatttcacgcgttatttaactcaggccataaactgatgtttaacatttgtatgaatgctatacatcatgaacatcgaacatagaagactttcctttgtttctatattcatatatatatagactgtagtaaatatttcccaagtaaagcacgagacaattttattaagatatagtaattgagtttcacaagtaattagcttaagaccttgaatgtttgtaaatttctacaatggttttttttttttatcattcaagataaagtaatgggaatctagctagatttttaaagtttctacaaattatcaaacaaaagaccagaaaccaattctattattcaaattagattcgtttttcgagttgataaatttaggttcggttcacacctcaacaaggagcaaattttggccttttcggaacttcctatgtagtgtaaaccttgaagaaaagtcaatcagaagttttacgtaacgcatgcatatatgtcctcgtactcaaaagaaaagcatacacaagatacattgcatttacacaaacgaaacgctcgagcaccattaattaatgatggatttacactcgacaactttcattatataaccaagacttcacgttataatcctcttttcatctaaaactttttgtgttattacgaatcttgttcttttgaatattgtgttcgattctttcctcaaatttattgtttccccttttttgtgttcgattcgttgctcttaccattatagtttttggagctcttttgacttaaaaaagaaagaaagagagaaagcaatcaaagccgttggagactcatacctgtacccataacaacaatacacgttttataaatgggagatattaagtctgaccatattattccaagttataaaacatgttgatgtaaaaaatgtgtgaatgcacgtggattctatgaagagagctcgtgtaagcgcggtgtatgaaggtaaagagagaaatagatcaagcaacggagaggaaactcgaagggaacagtctaaacacgcgagaatgacggcaaaagctcggatgaacgtttacaaagagagcatgaaacctctgccgcctaaacgtaagaaatcgttgatgatcataagtttgatgagaaagaaggaagatacgcaagatgatcaaaataatgttactgttgtcgaaaaggaaaaggaggagaaagagaaaggcacggtgcagaacatcagggaaaatgcggaaatgctctcatcaaaatgtgttgaggagtggccgcacatgttaacatatgaagaggaatggacgtggtttgcgtttgcgtttgggtggggatggtggcagcgttatgacgcggtgatgagcggtaagagttggtttaactaaatattaaagattaaggtgtttgttacaaatcattttgggttggtgaaactatatacatagatgatagttgatacttgataggatttcttaagataaaagaagatattgagaaatcagtgtatgtatatcgaccgaaacgaaaatatatctttaaagggttcactttcgtttatgtttatatacagagatttctcataatagattttcagtatttttttttgttttatttggtgtttcaatatttcgaacaaaatccaaaagcgtatatacagacttagacgctggtgaaacatgcatgacttgcattattagagcatccacaacggtgggatccaaaaatcaagattatagtttgtttttttctattccgcaagattcaaactaattggattttcggtagatctaccaacacataaactacctatattgggttaaccattttagaatcaattttaggagataaaccctaatttaaatacattttagttaatattaaagtttaaactacacgcatgtaagtctacacaaattatataaaaaacacttcaaagaactttccgttcacacatttgatgatttcttgtagtttcattaagtcaatgaacacacaagtttcaaattgatatttcaggtcattaagacaatgttgacacacaagtttcagattgatatgtgagatcattaagaaaagggtcttaatcataaatttaaaagtggactcttatccgcaagcctatcttatgtatatggcactggcaccgtccacaaatgtgtctatcatcctttcaagtggaccatccttttcctttaaggtaataactctgtgtgactgagatctacaaacacatgttacacacttcacagtccttataaagtaaatttacttattattaagaaaataagattttgtaacttttttcctcttaaaacaatggacaaatatgaatacaaatccatatgtcactattatctatatttacacaatttattcgattttttgtatgttgtcttatctcatcggaaattttcaaactagttaaccatcggaaaaaatcaagacgcacggatatataaattacatattcataaatcagacatttgacaatccgatagaaattgtctcataaagagaaaaagaacacagacaataggaaatgaaatgagcagagataattcataagaatgttttagaaaagaaattaagcttcggtgaagcttgggggcttgtaggcaatgaaactgatgcattggacttgacgggtgttgtcgaatccgatgatcctaatgaaggcgcccgggtactccttcttgcattcttcaacttccttcaacacttgagcggagtcggtgcatccgaacaatggaagcttccacattgtccagtaccgtccatcgtagtatccgggagtgtttccgtgctcacggtacacaaatccgtgctataaacacataagaaaaccattcaatacaattgatattggaggatatgcacaaggtgatatagtctatttcggttctacaaaatccggttataggctaatatttctagcaatgaaaacgaataaataataatgattagtagacaaaagaaaacttttgtgtttattacctctaactcgaattcaacacaaggaatccacttgttgcggagaaggtagtcaacttccttagccaattcgacgtcactaaggtcagggaggtaagatagagtctcaaacttcttctttccaattggtggccacacctataatccccaaatccaattccaaattaatatatcctatgttttgttttattgcacatgacaaaagacagtttttattgatgatattaccttcatgcagctaactcttcccccgttgcttgcgatggaagtgatgtccttgttggtcttgcgggtgaccgggaatgcagcggatgacttcaagccggtgaatggagcgaccatggtggcctgagccggggatgtaaccacagcggcggaggagagcatagaggaagccattactacttcttgttgtttctcttcttcttttgctcgtttacttactgacttgttttcctactggtgttgtcatctttatataatgagaaccccctaaaggcgaaaagccctcatgatcaaagggtccatgattcatgataacgtcgtttactgccacaggattaaggaaaggtgttgacacccttatcggtacgcaccactaggataaggccacgtggcagaaaactccattatcttatcttttctcttgtgggggaaatgaagtgaatgtgcggttactggtctccacttgatcggttgcttttggctcctttcgtttgggagaaaagaaaccagacgcattaccttaaatttaatgcttttggtcttttggacctcttatttaccatgtatgatttaatttggcttaacactttctttggaaataaggtcgcattaaaaaatagttataacaaaattatttaaatttgatatttacataaatatattgtatgatatttatccggacaaaaaaaaaagctttaaccatctccaatatttgtttctattattttctttctgaatatagaggaaaaaatataatagagatttatattttaacttcaatggttcctcaaaaattcgttagaaaaaataaataagagaaaaaataaaaatctctattttttgctttagaaaaaaaattagaaatttctattttacaaatgaaaatagagatgagttagagttaaataaatacaaaaatagagtatataaataaaaatagagatagattcgagatgctcttaaaaatattcattactctttccgttttattaatatcaattgttaagatttttcaggcagacttataaataagattccatttcagactaatggaagtaaacctatcaaaagaattctaacgtgctgtagagagactccttcgtcatcgtcccttttgtgaaagagtaaattaaagaatccataatgagcatagtgtaagaagaaccatttatctattagatatattctagtactggtagactgtcgattctggatacatcctgaaaatcatttaccacaataaattgtcgataatctttttgttggaaaagttatatattatcttcaaatgataatatattagtcgacaaaagaaaagcgagacaaaatttgaatacattgatttcggttaattcaatactttcacttcatttttagcaaatagtacttttatttctgatttttatgtggctaggataaaagcaaaaccttactggttggagagagtaaatatttgagtcgatactaacaacaactacatcatgcaagatatgtttgtgggacaaagagaccgagcgaacaaacgaaacggcaaaaccatcatctacatgtatcaagtgcgcggtaaacccctcatggaagaatttccaagaaaacctcccaaagtccatggtatcttctatatgaggtaatgcacgctgcctctagatcaacaagtaatatcagctcacgattatcttgcgactctgatcacatcacaataacaatggggaacccacatacgcaaccgttctccttggagtaccatgccattgcacttacggccccctcaagcacaaatatggcacctcaagctgatttccaccatgcaaacttgagtatgtaatcaaaggtgtagaacggagtcaagaactcatcttaaagtcacataaaactatggtcatgcactcatggatcacgactactaccttcaggctcacaaattaatgcccccttttcaatcatatatatgagaagaaacgtgtacaaagtacacattaactggtcacgaaaaaactttcgtgtagggaaaaggatcacaaggtccactccactccgcacctcagctaaataaatcatttttcgaaagtgagatagtcttaactcttaagtcttaacccatccatctaagttactagtttctgtcttttataagtcattttgtttctttttcttggattttaattgaagccaaaatgtgtgaattaaatccgggagatggaaaaaatgttcgataatttgaattattatttttatatgtattttgtatttgaatcatgaattttttatatttcgtttgcatagaagaatccaaaaacatatgattttttgtcaaaacaaaaacttaaaaccaaacatatagtagatgcgacgttttcattatcatttggaatctagttttatttagaactttttgggaacgttaactacttttccttctaaataactgtttcagcttttaatgcataaccaatgatcaaatttaacgtaaacaaaatttccaaaatttagtaacttcatgcttgacaaatttcagtctttgtcgatccttgctttatgtaatgctatttcttgacttaatatcccacttaggggtttggaatacatgttttatgtttataattttaaaagatgcatttgaattttctgtatatactaccttttccaaatctccaatggctatgtcatctgaaaaatggttacactcccttacataaacttttctctaaatatcgaggtttgattgattgctttcatgtgcaaaatttcttaaaacaatgtagcaagtttttctttttttattagagtttattggttagtctagggagtcaaaagcaagaattatgaggataatttaaaggagccacaatgttgtttaaaggagctaaacgaaaaataagatttcaaagatttaagggcaaaaatgaaatgaaatgataactataattatagagaaactgataggaataacattttcactttcaaacaatagttcctcaactgttaagtcggcaaataatttcttaaatttgcattgaccacatagaaatgggttccagaataatcaacgctgaatattccagaaaggggattaagcttcggtgaagcttgggggcttgtaggcaatgaaactgatgcattggacttgacgggtgttgtcgaatccgatgatcctaatgaaggcgccagggtactccttcttgcattcttcaacttccttcaacacttgagcggagtcggtgcatccgaacaatggaagcttccacattgtccagtatcgtccatcatagtatccgggagtgtttccgtgctcacggtacacaaatccgtgctatatataaagaaaaccattcaatacaattgatatatatattggtgatagtctatttcggttatccacttaagtttctagcaatgaagaagaagaataaaggatgcttagagacaaaggaaaagttcagtgtatattacctccaactcgaattcaacacaaggaatccacttgttgcggagaaggtagtcaacttccttagccaattcaacgtcactaaggtcagggaggtaagatagagtctcaaacttcttctttccgattggtggccacacctataaattcgaattcccaattattctaaagtattgttcagttgcactaattgcacatgacaaaagacagttttcattaatgacatttaccttcatgcagctaactcttcctccgttgcttgtgatggaagtaatgtcgttgttggccttgcgggtgaccgggaaagaagcggatgacttcaagccggtgaatggagcgaccatggtggcttgagccggggaggtaaccacagcggtggaggagaacatagaggaagccattacttcttcttgttgtttctcttcttcttttggtttttctcttacttacttgtttgtctgttggttttgtcatctttatatagtgggaaccgctagaggcaactagccctaatgatcaaaggggccataattcatgataacgtcgttaattgccacaggattaaggaaaggtgttgacacccttatcgatttggaccactaggataagatcacgtggcagaaaactccataatcttatctttctcatgtaagggtaggagtgaatgtgtatggctactggtctccacttgatcggttgcttttggctcctttcaattgggaggcgtcaaattgtagatatcggttaaatactttttacatatagattaaaaaaatgattaaatttctattaccttatattaacacattcatatttttatttttccacttgataatcttaaataataagaatataagtataatctttgaattcatcccacattttaaaagtataattaaatcagacagagttcattcaaaatggtttttaattgggaaatgtaaactagtattttgtgttattattttctatgtagtatgtacgatcactagaacttttagtcacataatggatattaaattagaaaacaatccaaatgcttgtgaattttcaggttttacggctaattaatatatttctgatgaacaagaggaacccacggcaccgttccttttggagcacaacgcaattgcacttacggcccacttaagcacgaatgtggcacctcaagataattcccaccatgacaacttaagcacaaaagccatgacggatcatggggaaattttataacacacttcaatggatggtgtggatccgagggaagaatccacactctaaggccacatgaagaagctcatatggtcatgggtccacgaataccacgtaaaagctcatatatgccccggtccaaccatatgagaagaagtagccaaacccattcaagaaacattgattacttttcattgtaaataagtgttttagctttgaatgtatcgtaaactatctaatttaatgtaaaacagtttccaaattataaatattcatgctttgttatctccattataaatttcattaattcttgcgtgtccttgcttgctatgatgtcatctctaaatttttggacttgcggctctagaattcatgtttatggatttaaaatatacagttggatttttctatgtcattttaaaaaagaaaatttttagattagattttaaaaagagaaataaacgtgtttacaacttaatgcatacttttttgaaaaacaaatctaaaacagaggatttggtcttaagcttgtcttgtaccaaaccaaacttgaagacctccttcatacttcaaagctccccccactccgtattgtgctcagccggttccaaacatttttgtcaattaacttgacaagtttctccattggtgatggttgttcaccatgctttcaagcatttctttctccccaaatcgaatgaaccgtgttttggaagacataccgtagaatgaagatttttgttttgtcatagtttttgtcacaaatggttttaaagacttccctccaatatgtcgagtacttatcaagtagtattccccttatcagcttctcccataccttctgcgagtaagagcacccaaaaaaaagatggtgtcttgtttccataggttcgtgacagaacatgcagtttgtgttcacttgttgattccatttaaacattctgtctcccgtggcaactctgttttttgaagctagccaactgagaaaggagtagttagggtaaagtaaaagaaacagatccctttgtatccgtccatcgtaggcttagtgttgcgaatttttgagcatgtatctcttgtgacaaacttttgacggtagtgatcattttttcctttccaaagggctatgtaactttcatcttctctgagacgacatctctattttctacgtatttttactacctttactggctgtttttcatctttaaattaaaatgttctaaatcaaccctcaaaatttgattgatggacgcatctttgctatgctttcaagtgcgaaatgtacctaaaaagggtactctttcattagagaaccaaaggcaagaattaggagagaaatttaaaggaactaaaatgttagttaaaagagataaaacgaataaaaagagttaaaagtgataagagcagaaatgaagtgatatgaatagagatttttatagaggaaacgatagaaaaacaaaccttcagttttttcactttggcaaaataattacttaaatttacattgaccatacaaaattgggttccggatagtcaacattgaatattccagaaaaggatttaagcatcagtgaagcttgggggcttgtaggcaatgaaactgatgcattggacttgacgggtgttgtcgaatccgatgatcctaatgaaggcgcccgggtactccttcttgcattcttcaacttccttcaacacttgagcggagtcggtgcatccgaacaatggaagcttccacattgtccagtaccgtccatcgtagtatccgggagtgtttccgtgctcacggtacacaaatccgtgctataaacacataagaaaaccattcaatacaattgatattggaggatatgcacaaggtgatatagtctatttcggttctaaaaaatccggttataggctaatatttctagcaatgaaaacgaaaaaaataataatgattagtagacaaaggaaaagttttgtgtatattacctccaactcgaattcaacacaaggaatccatttgttgcggagaaggtagtcaacttccttagccaattcgacgtcagtaaggtcagggaggtaagatagagtctcaaacttcttctttccgattggtggccacacctataattcccaattcccaattattcttaagtattgttcagttgcactaattgcacatgacaaaagacagttttcattaatgacattaccttcatgcagctaactcttcccccattgcttgtgatggaagtaatgtcgttgttggccttgcgggtgaccgggaaagaagcggatgacttcaaaccagtgaatggagcgaccatggtggcttgagccggggaggtaaccacagcggcagaggagagcatagaggaagccattacttcttcttcttcttcttttgcttaattgtttttctattggttttgtcatctttatatagtgagaaccgtaagaggcaaaaagccctaatgatcaaagggtccgggattcatgataactcgttcactaccacatgattaaggaaaggtgttgacacccttatcttatctttcttttgtgaggaaatgagtgattgtgtatggtttactagtctccacttgatcggttgctttggctccttccttttggaagaaaagaaatcagatgcatgaccgtaaatataatgttttggaccttttatttatcttgtatgtatttttaaaatttggtttacattacttcggttaataaatactataacaggaatatctataaacagagtcatgactcataatgcatttcacaatgtcaaagctgaacgttgagataaatttatcaatagcactaaatattaatccgcggtataccgcgggtctatattttcattaaataaaaaataattgaatatttcttaggatgacttaataaatttctgctattgtttgatttaaatgtataattcaccgcgagacaaaattttataactcaaattttaaagttttaagttgtatttgtttattttgttaaatgtttaatattgtataattgtattttgattgttgtttctcggatttcacccgtagtacaccatcccatattaatatcgaatcaaacccgtcaattctaggatttcacctgtggtagtatttaattgtataataataacttgattgtcattctaggatttcactcctagttctatcgcaaattattatcaactcaaaccagtcaattctaaaatttcacccgttgtacaccatcccatattaatatcgaatcaagcccgtcaattctaggatttcacccgtggtagtatttaattgtataattatattttaattgtcattctagaattttactcctaattctatcgcaaattattatcaacctaaaccagtcaattctaaaatatcacccgtagtacaccatcccatattaatatcgattcaaactcgtcaattctaggatttcacccgtggtagtattgcgagagaaatcttataaaagaatcgaaatgtgttttaaaaaaattaaagttttaagtatttttttttaatattgttaattttgtttagtgcttaatattatataattatattatgattgttaattataggtttttttcgtagcatatcatccaatgttataattcactcaaagccgtcacaccatataaccccgtcccgttaaattaaacacaaatttgtcattttattataaatttcaaatatttataaaattagaaacttcaaaaaagattaatattgacccaaacttcatcattgaattttgagtgttatatctaagatttctctcgcagtatatcgtcccgtattaatatcttttatattgtttaaatttcttgtaaaatttgatttataattttttgaaactttttaaagtttcaattctttaaaataaataaccctagtaaacaaaccattttaattttggacacctcataaatcaagtttcatgctcattcgtaatcgaaattattttggtcctttttatagtatggctctgaaccattgtccaatttttttaagcgatgtgggacattgtacaatcgtaattattatccacccaaacccgtcctaccatataacccagtcccgtgaaattaaacataattttgtcattttcttataaatttcaatattataaaatttgaaacttacaaaaaataaaatatcgaccttgattatatttaagatttttcctgtaatatatcgtcttgtattaatatattttatatatatatttataatgtttaaatttcttgtaaaattcaatttataatttttaaaactttatcagttttaaaattataaatatttaaagtattttttaaagataaactttataaaaagtttttaaaattataatatttaacttttgataaagttataatatttataatttcttgaaacattttaaagtttcaattctttaaaataaaaaacccaagtaaatcggataactattttaattttggacgactgataaatcaagcttcctgctcattcgtaatcagaatcattttggtccttttataatatgggtctgaaacattgtccaatttttctaagcgatgtgagacattgtatacatattatttcttcatactttgaataatatatgtccgtttaaaaaaatttgaattacatcatatgcagaaaaaaatataatattttattaactatatatattttatataaattcaaaataaataaagtataagatcaaataaaagtgaaagaagaattatatatttatgtttaaattaggtaaaaatattttaggaaattagttaaggtaaataacaaatatggttcgtttagagatattgtttatattaaatttggtaattaaatcattaatttttgtttttaattattagtttttaggtaacttttccaaaaattaatgttatcgaagatcagaacataattaaacatgttatccaagatccgaacagagttaaaccgggttatacccacccatttgaattaattgttgaattatggctcaaatcttcaatattatcttctaaaaacgtctacaaaaatgtatatatagaagattactctttttaactaaatgcaaaaaaggaaaaccgataagaataagaaaaaaatagcaaaattgataaatggattagtcaagaaaaccatgtttaaatataggaaataccaaaaatgaaaggatagccatgtgatacgcttgtataaaaagaaattgtccctattgattacttcaaaaaaaaaaaaaaaaaataaataaataaataaataaagaggccaattcgacaataaaggcaatgcatagtctctcgtggtttctcctcgtcattggattatccgtagggttgagtagcggaaagtggaatgagaaaaactctgtcatctttacgaattctcttggtcggaacaaagtcttgaaagtaaattgcatatcaaatgatgacaatctaggcttccactttttgcgccatggacaaacctacgattttagtttccacgatagtcttttcaaatcagaattctattgtgacctatggcaaggccctaatttcaagttgcatgcagcatttacggcatatgaaggtggtggtttgatagttcattatggtaaaaagaacttttgggatgttagagatgatgggatctatttcacccatggccaaaaaatgcccaagttagagtatacgtggaagtaataattaatcactcaaagggaaaagatggaatttaactcatctttttgttttaaagtttgacagaaacttcattttcttgtgtattatagtggacgtgaaacattgtaataaatcatcaaattaaggcaccttaatatgtaaatgtatctttagtgtattaaagagaaactttataagtatgtgagtttttcaatacgcaaacatatccaaggcttacgtcctaaccaaaactaatattaatttgcacatatatacatgattaatgaataatgtaagtagacagagtgagagatcacccaccagctctccctctccccaagtcagctttcatttcaaatcctgaaaggtatcgtcgcttggtagggcgacttagctacttaattagctgacacctgagttagcctattcagttcacaaattagcacagttcatgcaacatccactttaagaacactgggatgctgtgatatgggtggttccgatatctaaaatccaatccgcgccaaggccttttgcttcccagctcatcgactttgcagcgtcatggttggtgtgatagtgattgggccgcctgtcctcttactagacgctctctcacaggttattttgtacaacttggtgacacaaaaatctcatggaaaatgaagaaacaactgactatcactcgctcttccgcagaagtcgaatatcgagccatgacatttcttactcaagaacttatttggcttaaaaaggtgatgcatgatcttggtgtctctcaagatcgacctatgcgcatattctctaacaataagtccgctattgctctaagtgccaatccggttcaacataaacgtacaaaacatattgaggtggatggtcactatatccatgatatccatgctggtattatgactactacccatgtgtcctctcaacaacaattagcagacattctcactaaggcgttgggacaaagagagaactccatttctttctctgcaagctgggcattcttgatgtatatgctccaacttgagggagggtgttaaatatatttgctacttatattcttattattagagtgcatcttagtcaatagctactagtcaagcttagtcaactctactttgccccttttggtttttccatggtaaccacattatgtactttaggttatatcatctttttgtataattatggcttttaacgcctaatcaagataacacaaattaaaaccaatctctgtctcttgccttaaatctgacactcttttggataagtttcttttaaaagcgtttaagaaaaatttcaacattgctaattatgagatatatgtcaacaaactcaaggcattgttttataagaatactagatatttcgccaaaccactcatgctataatgggagtgaaagtcttaaattggaatattaagaataagatcttttatcatgactcgtaattcatatcacaaatgtcaaagctgaacgtttcaataaatctatcgaaagcattaatcctttaaatagatgtgaaacagcgaaatagataagggcacaaagaaaacagtaaaagcgatcaacaagttcgtatgagtcaaaactcaaaaaaaaaaacatgtttaaaaataggaaagaccaaaaactaacgactaaccatgtaatacacttgtataaaaagacactatccgtctgtcccttttcattatctacagattaattacttctgaatttaaaagaaggaaggccaattcaaacagtcaacaatgaatcggctctcgtgttttctgctcgttattggattgtgcataggattgagtaacgcaaatttaatatggaatgagaaaaacactgtattcttcaagagttcccttggtcgaaacaatgttttgaagattcattgcacatcagaagacaatctaggtttccattttttgcgtcctggagaaacctatgattttagtttccatgatagtattgtgagatcagacttttactgtgaattatggcaagggcctaatttcaagtttcatgcatcatttatggcatatcaaggtggtggtctcatagttcattatggtaaaaagaacttttgggatgctagagaagatggaatctatttcactcatggcaaagaaacgcccaagttagagtataagtggaaataataattaaccactcaatgtatgatggaattgagatcatctttttttacttttaacaaaagcttattgttcttgtgtactattgtggaagggaaacctttgaaataaatttatcgaaagtatgtgaacttttgaagacgaaaactttcaatacttaagtcctcatctaaactaatatttgtagttaaatgattaatgaataattaatgtgagaaaatccctaaaagaatggtggaaaaaaaggaagatgtgtcaaatgatttttgactcaaattagttaatcggtaaactaaatacctgagttatgtatgctttggcaaaacacacttaattgggctcactaattgaatttacagattaagatttcgtcaaagcccaacaaataacgatatcctaatatttttgtagtatatgcagcccatcactttaaaaattcccgaaccagaatgctacatcaaaattatagcattcacaacatgtttctttttgtccaagtgagtttggatgtagaaatttggatacaaaacaagttgcatattatgatgcaatcgaaactagagtttaaatgcatcaattccatctataactaattaacgtaaacgactaaaaatcaactaatattgtctatgtcgacccaagttaattcgggtccgcttttgcgatacttccagggatttgttctattttaccttgcttgtaggacatgttctatgttctaagcttttacaattcaggttgtaagtgaagcgtatttttgtttcattgcttgtaaatgaaacaacacatagtttgttaacggagttgatggtttctaaccgctatatctcgtagaaaaactcttgctcccaagcttcactatataaggaagaggttgcacacatgacatcactactaactttcgatgttgtcttttaattttacgttcactccagaaacacaaggataaaaacaacacacacacacacaaacaaaacaaaacaaaacaaaacttgcttggaaaatcttagtttttcactttctctaaaactcttttttcttttttcgtcttgtatcacttattacatttatatctgagcctttgttatgtatatatagctgtatgcatttggggcaaagcccttccgagaacatgtctcccttctatgtcaaacttcgtcttgtgactcttgaccatgaaagcccattttttgggtgtgttagagcatctccaacaagccttctaaccttcaatttattttgaaccctctaacccttatatttttaggatgtaaatagtgcacctcgaattttatggtgcattttttacaccctcaggcctcaacaaccaaaactgattattgttaatattgcacataacaagagaacggaaaaataccttggtagtttcatatctgtaacatagtcagacgtatcattagtttatttaaaacagttgtaccacgattgtctacgaatacagaaaaggaaaaaaaaaacgaatatgaaattttttccaaggaaaaataactagtactacgatttaatgtacaaagatataacttaaaaacctctgtcaaaaatatcatataataaatatttcttatattaaatataggaaacacaattcaatatgtataagaaaaacaatagtattttcacatttccaccaaatcttctatgatttcaaagatttttaatcttttgatagtggaaggatctttgtttataatcgtcaaagaagatacagtatcacaattagatttagatacacatgcgtgtgcatgtattttctaaaaacaagaaaaattatactctcatataatatgcattctcacttacgaataactaatttgcatagggtgttgattgcgatactgaattgatcaaaagattatttctttgctatgttctttattggggcgtatctaaaattatgacgatatgtttttgacttgtcaattcagaagattgtaccactgaattattctatacatattataaaaattatacatttcaaatatgtttttttccacattttgtacgattttcagacttgaactttcagaagaaaaaaaaaacatttgcctttaaaaatacaaactatattcaaaatctaattgaaaacaaagaatgacagaagacaacacaaatgcgcaaaaaaaaataaaaaaatcatgatcgtacatatgaaagagtttcttttaaatttatcaaaaaaaaaaaatcgtgaaggattttcttttaaaactttttttaactttctgcaatgtggtatttttatacatatgccacataacacaaatgtttttttttcttttccatttaatccgactaagacctaataattaaaagatatacctatcataagttaccagttttatttatttctgatcaatttcaaaggttactgaccacatatcaaaaaatattataagatataaagaagcaagaatcaaccttagtcattgtaagtgcaaaggctgccaccaaacttaaccaagaaaaattaaatatgaactccttttcccccatcactaatcattctttttgtttctttgattattaaatttcatgttttatgtttgtttattattttaaggcttatctagattgaacccatcttaatattacattatgacttattattattgaatttcaactcactttctaagccaataaaggtgatcgatggacatatgcttttggccttatgccagagagttattgatttataccagttgcagtctcaaagcacataatatgaccttacacatagacaacagtcacaacttttcatatctttgtgtctttaaattagaactaagaagatttatttatatatgtacaactagtcttttttgaataaactaaaacaaaagctttaatttggcctaaagaaaacacaatcatttggaagatgtggtaattatataatacatttattcgaaatctccttctcagccttcttacttcgaataacatatctactatatttttggcatatcaatagtttttttggagttttaaaagtatgtgtataaaagaagtttaagaataacaattcaaagatatatgtcatccataaacatatttcttctactaccatagatcatattaaattcatttactacacaagtttatgtttcaaatactatattttaaaacatgttacataaaccaatcatgcgggtttttgagtttgttctcgtcacactttacacaaaacaatagaaaatgtctttttgaggaaaaagaattaacataatttgatgtcatagtaacatttattccgatttgtatccctcatgaaattcaaaatctccctcaatctcaaaatcttccttctagccgtgctttaccaaggcattccaaatcaaactatttaaaccgcgaaaatcctcatgaaaccaatggcttcaatatcacttgaactccatacttaggttttatagtaagcacaacgattggggcatgcctataattctttgatattgtgaagttaaactttgaaattaacgtggctaatattattttagcttccatcaacgcaaactgttgtccgatgcagttccgtggaccggctgcaaatgggatgaaatggcgaccagacgcgaatggtctgcctccaaaacgttcgggattgaattggttcgcgtctttaccccataattcttcactgtgatggatagcaagaaccggtatccatattgataaacctttaggaatggttagatcacctagttttagatcttcaaatgccatccttggtagaagagtagctggagggtaaagtcttagtgactcgttaatcactttgcttaactgttccaaagacaaagaaaaagaagttagaagactattctattaattcattttggaatcatatctttgtgatcatgcgaagtgcttcttgactctttctcaaacatcttttagtttgggaattgacttttccttttgaaaaaaatatcaatgaagctgtcaagatctaatcattagttaatacatgtttagatttcttagataatattttatgcaaagcatgccttagtgctaatcactaaacaaatggaagatgtcttatttaaccatttatttatgcctgaaagatctatttaccaatatctatatcgtatcaaatttcaaacctggcttaaccaatgctaatcatatctaaatagtatcactataaaactaatcagaaagtatgattctatgtaaatcggttataataaacatgtaacgatttaacccaatatgaatatatctttaaagctcaataaacatacacattgttaaaaaacaatatttgtgttctaactaggattgaagataaaggaataaagacaaaattaaatgatatctactcattagggttcttctgtgccgactatgactatgttataagcttagttatggaagaagcactacgatgctagtggcattgtctatactgtgttaaatgttaataccccacacgcacccatccatccatcataaagctaattctactagtcaaataaattaataggttactataatatatagttatatgattattatttggagcaaacaacaaatattatctttttatatctatgagttaatggagttcgagtcactgatgcgtggtcagacaaaaacttaaggttgaaaagttgaaacggtcactgatggattagtactaaaccgtattttcatgattttttaacaacaccaaactcatgaatggtgagccgacgtaaccgcaagtagactaatatgtctcgtctgctagctatttacgttccaaacttaggtaaaacttaattcctatgttaacaatctcaccaaaagataagactttgcaagagaaggactaattttatgtctagattttagaagttattgtataatatgtattgaaaagtgaatgtacgtaccgaggttagcttagatagttgatcgactgagggaaggccattgcggccaaagacctccctgacctcctcacggactttttcctgccatgtgggattatcggcgaggagcattgttgtccatgtgaggagcaaagccgtggtttcatggccagcaaagaagaatgtcttgcattcatccattatcaactgaagattgttgttgttattgttattgttcttgtcaatatccatttcgttcaagagaagcccgagaaggtcgtcaccgtgagtgctactcctacccatttcagcgcagtctcgcctgctttgtatgatctcaatcaacaaacgctcaacttcttttttcagagacttgatctctctgttgtatttgcttggaagaaacctacatatacaaaagatttgttattaagtcaatgttagaccacagttaaagtttaatcctaaaacaatatacgttttaaagcttcaccgaggatcacaacaaataaatagaaaaactaaattttgttatgtataacttaatgtttaagaatttgtatggtggcagccgcggtctgtctgctgccaccattactgaaaatatagagattaattacgatttctagggtgaggaagaaaaccaaccggctgccgggaaagcagaggtggcgggtggcttgagcgcaacggcgctggaggacagtgaggtggttgaaaagctctttgcctttctcaaagctgcttccgaactttgtcctcgatataatatcagccgtgagtttatgcatctcctctcctatctccacctcatttgctccttccccaacttccttcctcaacctctcaactagcttgcttgtgcactccaccatatgccttgcgtatccctacatcataagggtacttcagtcattcaacgtcaagtaactaagcattgttttttgcatgaggctagtttattgacgtgccttgagtctttctccggtaaatgccggtgcagcaaggtggcgttggtggtgccaatcttggccattagccattaggagaccgcgaccgataaaattcttagtcccttgttgttgtagccacgatcttccactaacaccgttgtgtttcatcagcaactcctttatcaattccgtttccgttaagcaaagccgaggatccgtcccgttccacacaataaacctcttccctgtttcatcaaaacgtaaatttatctaaggattactcattttattacatgtaaccctcctttaatcaaaggccaaacattcttcagtatgttttacggagaaaaaacaaaaaatacatggagggtatttccgtcattttatctggctccattgatagatgtcacttacaattaacagaccaacttaataacgaaatctatgtatagacttcacgaccaagaaaacacaaacttgttacaattcaagaccataccgtattgtttggaccaagcaacgtaatgcgggagaaggcggccgacgatgtcatggtgaatagagtcacaatccttggaagcggattgcgaaaccatggccgagatttcaaggatatttccggttaacggacgcggtttaggacccgttacgccttgctgttccatgatcttcttgattcgtctaggtgttagccagtagcacgatatggtgtcgtataaaactctcaatatcgtagtcacgaatatcacgaggagtgattttaatatagtaagcaacatttttgggttttttcttttcttcttccagcaacaaagattcgaaaagaaaaacaagagatattaagagggtgagataaagagtaatggtgtatttatagtgtcgagatacaatataaattcatgtagggtactaaatctgggagaactaattatggtataactttgttgcatattctcacttaaagaaatggaagatattgagactaattaaattagtaaatctcgttattttttaccttgcttggctaaacgtttccatttaattcttatacttttaagagagacactccaaattattattacagaaacaagttgtgacatttcacaaatgccaactttgggaagtttccagaactacaaaaaaaaaaacatttatgttcacgaagggttcctaaaagtttaagaaataaagtatccctaaatttttaagaactcttcttaaattataagaaatgtttcaatcatttagtattacttcctgaatttttaaaacattttataagattaaaatttgtggccttttcttagaaaatgttgtataccaaatatgattaaaaaaaaaaaaaaaaaaactcatttcctgagaatcaaaagagaacatctcagctcaattatgatcgaatcttgaccataattatgtactaaaacttatatagcgtattactgagagggtcgagagagaaaaggacttgaaaataaaattaagtctcctgaaacagtaagaactaccaagaattgttctcgtatttgtcccagtcccagtcccagtcccacacaaagctggatcacataaaccattcaaaatcactgcttaggtataagtgtttgatttctcttttaattcgcctatgatccaatcttaaccataattaatctatgagatgtaaagtttcaagaatttgtttctaaagacaacacaaaaaaaaaaggtcgtgttaaatacaatgtgcttgatatataaaaagttcgatcctggccgtctcattaaggggacaacatattaatctgatagctatgacctgtgtcgctgtaacattcgggacatgattgcacaacacaaaatttcattaaaaccttacgtttcctttcataaaggtaaaatctctaccccaatttttgaaaccaccccaaattttgaaacctacgtcatcaacaatttatacgcattggaatatagaccaacatttagtaaaacctggaccaaatacaacaagtctgatgttaaaccaccgtttctgtctagctcgattctactgtgatgatcggagttggttcggtaaagaccctaagctacattaaatctataggcaaaaagacagagaaaacaaaaatggaaccgagttaaacaaccttgctcttcagatttgcttcttttctttatcagaggatccgaaatgacttgacaaagtccactgcgtatagttggtgtaaaaggcaaacattataaagtatgagaaacagagaatcatgatcagtgcttcgaataggaaagggtacttctgaggaggtttaatggtaagatagaggacatgaagaactacggagatgaagaaatgggttcgtagtaagaaaacataacccgggaagtttttaaaggagaaaaatgaaacgtcggttttctgtatcgcatggtgattcccgggtgaatgatagatgacggtgaagagaaaagatagtgttaagtaagggatcaagagtttgtcacggcaaagaagagggaacatcgagaagagagcgtaataggttaaatgactgaaatggtcaggtagtttgagagctaatagtgttgcggagagaaaaggcatcaggattgatttctcatgcactgcagattcaaacacaatgaaagaaaaaaagggactgttagatattaattgatggcaaccgtgatcgaagatcaaagtgaaatatttataccttggaaggaaaacaagtagaaagccattgaactgttgagcaagccatataggaaaccttcattgcttggtgacaagatttgctgaaccattgaaggaagagaagccaatatagttgcagctaagctgatagacttgagggattgtgttgtgaacagatttttccattttatgagtatggaagtagtgcaccagaaatttgccacgtaatcctcgtatattcccctctcaaatggagcaagacgggagagaacctgcatcatcagccatttacttcatattaatgagcacgaaaacgaatgagacctattgggtgtatgcaatttacatcagaggaggaagcaaagagtacaatctcttagttctaccagagacaaacaattagttttctcgagaaattatcaaatacgtatttaccattaagaagtcgtccaaagaatgcacatatggccaccaaaaaataacaaatgtcactatgactgcaattccaagcttaatcacagaaagtatagggctcttccgtcttaggcatttacccagtagatggctgaaaaaggcaggagcaaagtatgcactcatctgcaacatcgacacaatggaaaaagtgtgaccagcatgttataaacgggaacagaacagaaatgaggtacatacataaacaaaggggtatatcaagcaccacataagattaacaatattgtatgtatagaacattttacataaatgcaacgatgtgaaatatgtatggccataaacactacactacagtctcaacaaattagacattttgacataacggtagtaactactcatattttccagggaactaaaaccatctagtttttcagtctatgagattgataaaagccattacgtgtcagatcatctacaagtataccaactttctacaagggaaacataagaatacagaaatgaaatcccaaagtcacctgtttatggctgagggctagactgaacaagacacaagtgagaacctcgctctcacatagtaccgcagcaatagcaccaactgtaagtcccaagctgatacaattgtactataacaaataaaaattctaatgagaatcatcttacaaccatagaaaaaggatacataatcacaacaccaatagaggtaacggtcaatacaaacctgaaaatgaccgtgatcaatgaggatcaagcaagggtttaagagaatcatagcaatatgccaagccacttcactcttaccacccctagttcgattcctatggtacaccaacacgaaaaacagagcagctgggaaaaatatgaaagcatcagacgataaaactgtccatctcatcaacaattttctgcataacaaaactcgaattagtaaaccctaattacacaacaagcaaccaattgaagaatcagatcatttacccaagataagattcgtgaccacgagagcttagaagagcaacagattcaggattgaagaatcggaggaagattccatggatgtaactttgataagcagttaaaggaggataatctaatccccagtaagtgagatcgttgtaagtgccatttctataccaatcgataactggaagatttgtggttatctccatccaatgtctctgagcttcgaaatcgccgaatttaggaggaattccggcgccggagtatggatacattgttacagcagatcggatcagtaatgcgaagagggagatgcagagaaatgaagttgtggttcctttatgtgttagccaccaccaagtatcaatcgaagatccggtttgtggtgataccggaatggtgatgtcatcttcgccggaatgtttcgccggcttcttcttcggcatcctttgttttgtttgtcttctccgtttagtttttttctcacctaagctaagctgatgcaaaatcgatttacggggatcggtctcagtttgggtttaggaaatattaataaaaggcccttgtatttttatgtttctataaatttatccttgaaaaatacaaaaacaccattcgactcactttttattttatgttaacaacttggctaaagacacatcactaacaccattcgactcactaaaactatgaaatataactttcacattataggttatagactcgttttgaatatttttaaaaagactatatgaatatttttaaaaagactataatacaatatatattaaatttttgagatgaaaatagtaaagatggttggtttgagatgaaaataataaggatggttgctatgagaaaatgttattcttcaaagggaaatattttttcttaaaacagggattagcgattcgcatcctcttctgtctttcttagtacgtttgtgttatagcttcatttcgaatgactggattgtccgaattactcatgtgtatagggaagctaatcgtctcgcagatgaattagcgaatcatgcttttttgttacttttggggtttcatagtattcttcttaggcttgattttgctacttcgattatttttgaggatgatagtgttgttacgcgcccacggaatattcgtgtgtaattttttttttttatttttttttaataatatgggagactaatctccctcattctaccaaaaaattaagggaaatattttttcttaaatttgttgatatgataattatggtctacataatatcgtgttttaaatcaatatataataaatgttggttaaaacaagagcaataacataattttggtgaaatttcttgggaaggtaagaggaaaacttccttgatagcatggaagtatgtaaattaggaaatttcaacaaagccttacttgtgaaacaattcggccggatcgtacatttatcgaagctagttacttccttgtaaaaagttttttatgtagtgatggtggttgtagacctttgtatacttggaatagtgttctctattgatgagatctcttgaaaagtggcataataagcaatattggacaaatctactagggtttggcttgataaatggcttatggatgaacaaccaaggagacccactaagaaataaattttatttattattaaacttaaggttgctaatttgttgaatgagagaggtgttaatttctcccaaatgatgttaatcaagtcttattgatttatcttaattcaaacaagaaagatttttcgttttggcgattcaataaaactggagctgaaatcaaaattctttctagggatataaagagtttgttggattcatctcttgaaaaattctttaaaagcaaatcagggaactagacgaagattttagcggaagtagctcaaaaagcaaaagcatccatgaaaattgctatggtagatgaatcacgaaaagctgaaaaagctctgatcgctagtaaatagtaataatagattgagtctagttgatcagaagaaacttgcacaagttatcaaggtggtggtcgaaatggaggatgaactcgaggagaaggttcaaaaagtcgagaagataaacagaaaggtagatgagaagatgaagaagaaggcaaagaagagacatttttcgtttttggtttgttgaatgttgattcgtcttcagctatcatatcatgtcggtgttagacttaaaataagtgtttaccaataacttatacaagagaggttctacaccgtttaccaagagaatcaaagaatgcaaagtttgtaacttttgtttgtggtttaaaagaacaccacaatcattgttgaatgcataacatatttcaaccagataaggagttaaagaacttttatatggatctaatacttaaccactaatactaaaaattgatcttgaagcaacataggagatttgagtagttagaacatatctagcaaattctgatctattgtgaaaagaataactagagacggatgacttaatttctatatagcatttggagggtcataatgacttgtttttatttacgtgttttacgttattttgtttttgtcaaaaggctttcataaattagtaatactctataaataaataaacacaataaaatactctttcttatcgatttaggtatggccaatgtaaaaaactaaaaattaacaaaattttgaaacttctatacatttttatggttctagtaatattataaatttatacatatatagctaagataatattctaaatatgactataatattgtttgtaatttgaattattgttagcgttattctctaatgttacttattattcaaaaactcttcggtgttttcgatttgtatccaaattttatgataaattctaaacacgataattaatttacaaaaataaagtacttatttgagtacccttaaatttatgtttacttgacttcccagttcccagccagtataaatctttttcttatatttaaattaattaattaactttggatatagaattgaattattaggaaaatatatacatatcaatcaaaaatataatatttataagcttaatacaaacatagaaatatctatatctatatatatctagcttaattaattggatagtaaaagcttatctttgcatttttattattttaattaattacttgtatatatatattattttaaatacttattagcatattgacatttaagatacaaggtttaaatttcttttgttattttgaacagaagttttgttaatcagtaaaataaaattattgtaaataaaagaaaagattttgtgcaaaacaaactccaaagtcgtttatttttgtaactttatctttcacgtttaaaaatacaaaacaaaattatgaagtaaaaataatacgtaatgtagtcgattttacaactttacatctattgtaaacgttttcacgatcacatatatttgtttttaaaagttttaaagatatagttgaactcctcatctcaagggctttgatttgataaattatctatctaaattttaaaattatttatcaaaattttaaaatttgacaatagcaaaaaatttgacatatgtataatttttgatttagtattattattctgcattgttaagatgtaaaatgtaaagttgtaaaaagtaaatgattccgaggattttgtgtaaaaaaccttaaaatgttttagagtttcttgcactaaaaggataacttttactttttttccaaaccccaaagtctgatttacctgtgagttaacaacaattactactctctttgagtaaaaatcgcatgccaaaaagattatagaaaatataataccgaagaaaattccaaatatacaagcagtaaattaagttgattttgggaatagtctacaatcccatgtacacatctccactacattccatacaccttttttaatctaacggctcacaaacaataaaactctccgaataagtaatcaccacgtgatttatcttgacacaccaaagtttgtatagacgtgcatgtatgtaattaattaaccttttatgtactatgaattaactgtgttgatatataaagggtgactcaataccccaaaagcggtctctctctatactttgcttctctctctaaacttctctctttctttttttctcaaagcttttttccttctccctaaacgatgaagattttcgtgaagactctcagtggttcgaacttcgagatcgaagtaaaacctgcagataaggtatagtgatttcttgaattcgaatcgtcttctctgtttctttaactgtttattaggtctgatttggttccgtaattcgattttgccttggggaaaaattccggtgaattagcgaatctcgtagtatctgatttaaaattctaggtttcgtttgcatcgtactcttgtttcgggttgggaattgtttgtgacgatgcgtgtttctgtttctgtgattggattcgaattcgaattagggtttttcgtgagtatgtaagtatagtgattgtatgtgttgggaatttaattatatactgtgtaaattgtatatagttatggcttcttgttttcccatcaacattcgttgctttagtgatcatgctggaatctgattttgcttctttaagattatgttagagctaatcatacttagattcacaatattagtcattatatttgctaaaccttgaggcacctatggattatcatacgtaatgatatagtatttgtgaagttttctttggtgtgacttatttgtttcattgctagtcttatatcttcttgatagcctttagcttaatgatgtctgtatgatttggtatctgagtttatttttggctttttctaggctaagttatatgtgtgattgagatgcttattaacattgttgttgatcgcaggtttctgatgttaaaacggctatagaaactgttaaaggtgcagaataccctgctgctaagcagatgctgatccaccaaggaaaggttctaaaggatgagaccacattggaagagaacaatgttgttgagaacagtttcattgttatcatgttgtccaaggtgatgtactaggtccacagtttcgcattagtattagtaacaggattttagtagttagtggatgctaacaagttttaacgtttgtatatagaccaaggcttctccaagtggggcatcaaccgcatctgcaccagcacctagtgctacacaggtgaataaaagttcttatgtaatatggttatggtttctatttgtaagtgacaacaaaatagtatatctagataacagttttgtctaatagaattgcttggattttctgtaacagccacagacagtagctacacctcaggtttctgctcctactgcctcagtgtaagttgccttcctctggcattgatttacctccttttgaaagagaaattgtcagcttcttatgtagttgccggtttgctgattctctgttctttttacttgcgttctcagtccagttcctacaagtggaactgcaaccgctgcagctccagctactgctgcttcgtaagaacttttcagaagtatactatattcattttcgaatatctgttcattgattgtgtaaatgttgcccactttcttggttgaaacagggttcagacagatgtgtatggtcaagcagcatcaaaccttgttgctggaactactttagagtccactgttcagcaaattcttgatatgggtggaggtagttgggaccgtgacactgttgttcgtgctctgagagctgcgttcaacaatcctgaaagagctgttgaatacctgtactcggtatgattcattccacttcttgattttacgtttttctttgatatattgtatctacctttgatttgcggtttgccagaatttaagcaacatttgctcttgaacttttggttgatacatttcagggtatccctgctcaagctgaaatcccaccagttgctcaagccccagctactggggaacaggcagccaatcctctagcacagccccaacaagcagcagctccagcagctgcaactggtggtccaaacgcaaatccattaaacctgttcccccaggtagggtttttaaactggtgaaccgatttcatttgctcgttttcccttgtgaatttgttttattgacatccactcttatctgtctctatccagggcatgcccgctgcagatgctggtgctggagctggtaatcttgatttcctgcgtaacagtcaacaggtattttcaatttcttttccattcgagaacggaaatcttcatttctctcctcttatgtcatttgcaattcttttgccttttcatagttccaagccttgcgagctatggtacaagcaaacccacaaattctacaggtaaaatttttaacctcttattctttatttggtaggttatatgatattgatttcccacttatactgtttcgttttgcagcctatgcttcaggagctcggtaaacaaaacccccagcttgtgcgactaattcaagagcaccaggctgacttcctacgcttgataaacgaacctgtcgagggagaagagtgggtttaatatcatgattctcctttacgttttcattttattcttttttctcaataaagcatgtaatctgacatttcattcgatgccaccaggaatgttatggaacagttggaagcagcaatgccacaagctgttaccgttacacctgaagagcgtgaagccattgaacgggtttgttcctatgatctttacatttgtacctttactagatgctctggttcctcaaaatatatggcttgtattgaaatttgattttgctgttgtttgttttggtttagcttgaagggatggggtttgatcgtgcgatggtcttggaagtgttctttgcgtgtaacaagaatgaagaacttgcagctaattaccttctagatcacatgcatgagtttgaagatcaataaacagagcaaatccattcctccctctaaactcagaccatctttctgtttctttttcttcttctttttaatatgataatctcttctccaatgccatttgacagtttcatgtttatgttcatgggagttgatgtgtttatgttactattaaaactatcatagtttatctggtttgaagatgctcctcttttatcatattattagcctttgaatccttcctctctttaggtctcagatgcaccaatattagctaagattaaaagtggatattttggttctatatgactcatctcgagttaggaatggtatgtcgaatctggtttaacagatctggcctaaaacgaaaccgctattcagatccaattattggcgcttacattgttttctcatagcctcaagctatgcaatatcaattattgcacatttgaattaacacaaacccatcaattaatatatcaacaaaaacccatcatcaattaacacatcaacacaaacataaagacatataagttgctcatgaagaacttataatggtggaaccagtgagcctttgagatctgtcataatcgtctctgaaattgtctcaaatcgagagagaaatgagaaatcttaaaattttaccctaaataattaaaccctagcttttaattattactgcacaaattatgtctaaataattttgcccatttactagcgagcttatatggtttgtaatccattttaaacactttaattttgggcttcaccaaaacccaaccattattatttggacgtggacatcccatggtcagaaaactcattcgataaccctacatttgatgatcaaagtggcacggaagctcgttcgatctacaagttttgtggtgaggagacttctcagtttttcttctagtgtggttgtacttcaggtaaattcttttcaatacttagtggaatttttcgctaactgttttgtgtaaataaggacgaggcctccatagcgttcagtgctttaacaatgccgtatccactctgctaatcttggatttcaagaggtatgacagtttgtgttgtgataggagccttcattaaattaaataatttcaacaatttatttatttttagaaccaaaagatttttcaaaaattttgattatcaaaaaaaaatccaacagattttctgttaaaatgaaaatatatattagattgtttttaaaaaaaatcatctgccggaatttgaatctggacatgcttattttcaaaaaaacattttagctaatgtgctagtgcatatgtttttgctaaggtatgaatttaaattggatatatagatcaatttatttattttaaaaccaaaaaaaatttaaaaagaaacttagcgggatataaaataaatatatattaaatttaaaaaaaaaagattttccgctacgggaatttgaacctgaaaatgctgatttttaaagaaaatttagctaatgtgctacatgagatgttttttttgctaaagtatgagtttaaattggatatatacatcattcaatttatttttctaatctagaatttgctttcctaggacaaatataggtactgaattattaaagaacatattttttggtaagatataagtgagtttttatataattttgatgattttaggtaagttgatgtgatttactgtaaagtcttttcaaattctatctaaaactatgagatttagatttctgtatttttaactaaagaagtcttttcaaatcctttcaaatccttcaaaattaataagaatcaaatccactaactattttcagtaacagtaaaaaggttgatttttaaatttttaatttaataacactcaatttcatttaaaaatttaaaatccataattaaataacataaaatttataaattttacataaattattagattgaatacaccgctctaaatatacacaatgtaaaaagtctgtttaagatcaattatagatttaacttaaatctaaaggcccataataccgtcctgtacatcatatagttatctcaagttgtaatactgtaatacccgttgggcccagtggcccatttatcagatttcaaataacagatctcaacactagcatggctacacacgtgtcagattcaatgcatcagtcatatcttcagcatccaacacttgtcaaccttccattggatctcttaactctacgcctcgaaaacagtttttatttatttatcattccatttctcattgtatcttcatcagtctcttcttattccattttttcaaaccacttgcaaaattcgaatcagatcttctcttcaatcgaaaaaaaagaaaggtaaatctctctctctctaatcatcgttcgtttcgtagtttcttcttctacgtgtagatctgatctttgattgtatgtttctggagatctcgatctcatcgattctctgttcttatcactgattcagtgtgtttgatatctaaatccgatttgtgtgtaggatgttaaaatttaggtttcggttttgtttctgcttttgaacgattttgctctagattcgttatccgtgaagaacatagacgagtatgtagatcttacttcggattcgcgttgaagaattttctctagattcgtcacctatgaagaagattcattgtgttcttaatctagatgattaggttattgtttcgactcatttgtttatgcctattttctctatgttcttaatcggtgaagaaatgtatcaatgtgtgtatgttttgggttctgattttgtaggatttgctctagattgttgaatcgaagatgtcgacaagggaagagaatgtttacatggcgaaattagccgaacaagctgaacgttacgaagaaatggttgaattcatggagaaagttgcgaaaactgttgatgttgaggaactttcagttgaagagaggaatcttctctctgttgcttacaagaacgtgattggagcgagaagagcttcgtggagaatcatttcttcgattgagcagaaagaagagagcaaagggaacgaagatc

SEQ ID NO: 788 - DNA, 82766 bp, Arabidopsis thaliana
gatctttacatttgtacctttactagatgctctggttcctcaaaatatatggcttgtattgaaatttgattttgctgttgtttgttttggtttagcttgaagggatggggtttgatcgtgcgatggtcttggaagtgttctttgcgtgtaacaagaatgaagaacttgcagctaattaccttctagatcacatgcatgagtttgaagatcaataaacagagcaaatccattcctccctctaaactcagaccatctttctgtttctttttcttcttctttttaatatgataatctcttctccaatgccatttgacagtttcatgtttatgttcatgggagttgatgtgtttatgttactattaaaactatcatagtttatctggtttgaagatgctcctcttttatcatattattagcctttgaatccttcctctctttaggtctcagatgcaccaatattagctaagattaaaagtggatattttggttctatatgactcatctcgagttaggaatggtatgtcgaatctggtttaacagatctggcctaaaacgaaaccgctattcagatccaattattggcgcttacattgttttctcatagcctcaagctatgcaatatcaattattgcacatttgaattaacacaaacccatcaattaatatatcaacaaaaacccatcatcaattaacacatcaacacaaacataaagacatataagttgctcatgaagaacttataatggtggaaccagtgagcctttgagatctgtcataatcgtctctgaaattgtctcaaatcgagagagaaatgagaaatcttaaaattttaccctaaataattaaaccctagcttttaattattactgcacaaattatgtctaaataattttgcccatttactagcgagcttatatggtttgtaatccattttaaacactttaattttgggcttcaccaaaacccaaccattattatttggacgtggacatcccatggtcagaaaactcattcgataaccctacatttgatgatcaaagtggcacggaagctcgttcgatctacaagttttgtggtgaggagacttctcagtttttcttctagtgtggttgtacttcaggtaaattcttttcaatacttagtggaatttttcgctaactgttttgtgtaaataaggacgaggcctccatagcgttcagtgctttaacaatgccgtatccactctgctaatcttggatttcaagaggtatgacagtttgtgttgtgataggagccttcattaaattaaataatttcaacaatttatttatttttagaaccaaaagatttttcaaaaattttgattatcaaaaaaaaatccaacagattttctgttaaaatgaaaatatatattagattgtttttaaaaaaaatcatctgccggaatttgaatctggacatgcttattttcaaaaaaacattttagctaatgtgctagtgcatatgtttttgctaaggtatgaatttaaattggatatatagatcaatttatttattttaaaaccaaaaaaaatttaaaaagaaacttagcgggatataaaataaatatatattaaatttaaaaaaaaaagattttccgctacgggaatttgaacctgaaaatgctgatttttaaagaaaatttagctaatgtgctacatgagatgttttttttgctaaagtatgagtttaaattggatatatacatcattcaatttatttttctaatctagaatttgctttcctaggacaaatataggtactgaattattaaagaacatattttttggtaagatataagtgagtttttatataattttgatgattttaggtaagttgatgtgatttactgtaaagtcttttcaaattctatctaaaactatgagatttagatttctgtatttttaactaaagaagtcttttcaaatcctttcaaatccttcaaaattaataagaatcaaatccactaactattttcagtaacagtaaaaaggttgatttttaaatttttaatttaataacactcaatttcatttaaaaatttaaaatccataattaaataacataaaatttataaattttacataaattattagattgaatacaccgctctaaatatacacaatgtaaaaagtctgtttaagatcaattatagatttaacttaaatctaaaggcccataataccgtcctgtacatcatatagttatctcaagttgtaatactgtaatacccgttgggcccagtggcccatttatcagatttcaaataacagatctcaacactagcatggctacacacgtgtcagattcaatgcatcagtcatatcttcagcatccaacacttgtcaaccttccattggatctcttaactctacgcctcgaaaacagtttttatttatttatcattccatttctcattgtatcttcatcagtctcttcttattccattttttcaaaccacttgcaaaattcgaatcagatcttctcttcaatcgaaaaaaaagaaaggtaaatctctctctctctaatcatcgttcgtttcgtagtttcttcttctacgtgtagatctgatctttgattgtatgtttctggagatctcgatctcatcgattctctgttcttatcactgattcagtgtgtttgatatctaaatccgatttgtgtgtaggatgttaaaatttaggtttcggttttgtttctgcttttgaacgattttgctctagattcgttatccgtgaagaacatagacgagtatgtagatcttacttcggattcgcgttgaagaattttctctagattcgtcacctatgaagaagattcattgtgttcttaatctagatgattaggttattgtttcgactcatttgtttatgcctattttctctatgttcttaatcggtgaagaaatgtatcaatgtgtgtatgttttgggttctgattttgtaggatttgctctagattgttgaatcgaagatgtcgacaagggaagagaatgtttacatggcgaaattagccgaacaagctgaacgttacgaagaaatggttgaattcatggagaaagttgcgaaaactgttgatgttgaggaactttcagttgaagagaggaatcttctctctgttgcttacaagaacgtgattggagcgagaagagcttcgtggagaatcatttcttcgattgagcagaaagaagagagcaaagggaacgaagatcatgttgctattatcaaggattacagaggaaagattgaatccgagcttagcaaaatctgtgatgggattttgaatgttcttgaagctcatcttattccttctgcttcaccagctgaatctaaagtgttttatcttaagatgaagggtgattatcataggtatcttgctgagtttaaggctggtgctgaaaggaaagaagctgctgaaagcactttggttgcttacaagtctgcttccgtaagtcattctttacaacgtttttgaatgttgttttcttttgtgggtatgattgattttgttgttgtgataatgcaggacattgccactgctgagttagctcctactcacccgataaggcttggtcttgcactcaacttctctgtgttttactatgaaatcctcaactcgcctgatcgtgcttgcagcctcgcaaagcaggtttgtgtagtacacctgattttcactttttgcttcgtgtgttattattatctcagtgaatgaaacagctattttgggtttgtgcaggcgtttgatgatgcaatcgctgagttagatacattgggtgaggaatcatacaaggacagtacactgattatgcagcttcttagagacaatctcactctctggacttcagatatgactgtaagtattaacaacacaatatacgttgatcactaagttatgttgttgacatgatggtttcttttttggtgaataggacgaagcaggagatgagattaaggaggcatcaaagcccgatggtgccgagtaaacccgaagaagaggaagagtcattttataatggtagaaaactttcatgtgataatctgagtgagggatagctcaggattcttataagagacacagttttattgttgtttgtttgttttgaaactacttgcgatttatcattcctcctttagcttcctcaatatttcctattctcctttctaatgaaatcaaaacttggttatttctgatatggtagttgtctttattttctatttttttggttattgatttgatcaactaaaaaagtgtgataactttctcaaattgattaattaatgtacgaaaacacttgctgcaaatggatcacttccatgacattatactttgatataatatattacaagaaataaaaggtaactaaagtagagaaaacaagaaaccatatttataacaaaatatttcatttcaaacaatggtaaaagatctcagataacataggagacagacaagttactactaataaaggagagaaccacaccaaaatcctaatcttgttaattaacacttccaataagttactgaaactcaaaatcactgaataagctagtgaacaagtgaagagctactctgtgtcaagtgcaaagcagaggactccacggcacctgaaagtccaaaggctgatcttgtcgccgacttttaagctgctacttttgacgacatcattccaaccccaattcaaagtgtaattcaatgttccatgtccagagtccttctccatcgcccatatcttgaaacgcaaaccccacttttgaaatctttggttcacaagaaccgttcccacaccaatattctcgtcgtcttcttcatcattgtcttcgtctttctgcatagctctacactccgcaggagtcaggaaatcgtttctgattagcttctggaaaggcattaagagacgactaaggtttgagttgacatcactcttaaacagagtcctctcaaatatcagcctcggggtttcagcatcagcgttcatgtatctcatcacttggaaaatccactcaggcatctctgtacacaaccttggcaaaggagaaaccttaactttcttgactttaccactcttcctctgctccacggcacgcctcttgcggtttgtcttccctgttaggcatgaagacggagacgaagattggtaattagggtttggtacgtcttttgtctctgtcgaaggttcaagacaaggaaggttcaggagcgatgaagaagaagtagaagctccattaagattatcaaagagtttcttttcactctcgtcatcataatcttcatcgtagacaatcttggatttacctttctttaaacgttgttcttcatcacacaccataggttcatcaaaacaagggttttgtaggttgtctgtctcaaaatcagtagggattaggttaagatcgggaagcgatgacgaacaagtagaagccccattagggttttgttgtgtgtatcttctcttcgccaaagacgatttgattttcctcgggaaaagatagaagaaactcatcttgcacttggattcttctcgtttctctgcaagaagacgactacgttgttcttcttcctccgcaaccataaccgtcacatacgccagtaaacttaaacccgacgacatattcttccccgaatccgtgagatgattatcgtgatacataatactactcatcgtgattgaatcgaaagactggaaagtttctgagagcgacgacgtgaggaacaagaaacttgtatatagagagacgagaaactgatcgacgattagaaaagaagtaccttctcttgccttatatatactttacaatagggtttcaggtttctttgttttcctatttctccattgagtttagttgtttaattactgtcattagtaactaattatagccgttgtgatcaagtgtttcctttttcacaagtgtgagagatagtgaatttttaggaagtttcctttcctttcaaatttcaatagctttgcttcacttttttgtatttgatgtattattatattttttgggcacttgccgactttgatataaattaaataaaatgcagaaaacagtggagtctcaaaaaaattcagatctttagaaaaacaaaaccaatattgttgtcgattgaatcgaaaatagtttcgagtatccatttatcatcaaaaaaaaaaaaaaaacaattccttgaataatttttatgttttttgaattttattggatgtacgtacataatcatttcaacaaaattgcataaaaatagttgatgcaaaaccaaatatggggagaaaattcaaatagttttctcaatttgaggtaactacgaaattgccccacatcctttagtaattacgaattggacctaaaactatagataattacgattttttccctcgaataataacgaaattgcctcagttatttcgttatttgttaatgcaccccacatctctcggtaattacaaaatttctgcaaatcttccaaaatgaaatttctggtaatttcttatttggtaaactacgaatgaacaacaaagaacaatgaattggtaaaatacacattttggaatactcaatctctcatattattgcttatccacaatcaaatcacacaattgtaacaatgaacaacaaagaacaatgaatcaacaagaacaaatgaaattagaatcttcgctcacatccctcagattataatcgcacccttcacagtctcatagcgaatgaatcaacatgccttgctctgtaaccgctcctcatatttatagatgcctctgatacttgcttatttcacaagcttccctctgtttcctcacgtgccttgcacacacactcttatcatgcattcgcagtcattaaacagtgtcatagttattctttatggttacaagtgtggggttggtgactgatgaagacaactgatcttattcatctacttcttggagctggagttggagaaattcgagaagaatgaacaaattacgacaaggtacattgagaaaatctccggtgaagcataaaagcacaacttatacgtaatatttctatatttgcttttggagacagaacatgtgtcagtaatcgttggtttagacttctaggtctggtttggggtttggtacagatggttttatggctgcaaatgtcttatgttgttgaacgcccacaagatgctcgatgaaatgccgaagagagtggcttgtttgtaaaattgcagttttttggtggtatatggatgagaagcagatgatagtgagtagagttttgttacttgggggtagaaaattctcttcgccatgagatagactattagagttaagcgggtaaaaacccggactcgttttgtgagacaaaagaacctgaaaaagttctcactttgactattcttgcttctatcaagccattgcaattgttcttggaaaagtgaaacacacactctcgttgtctcatcttgctgtgaattatcattcttatctgctgagttcaagactggattaagcatgattcttgaagataggagtgtgactgagataatatgcattcactggaaaccatggtctacttttcaaaggtaatgtctctgttctttcaatttgagacagaacaaaaggaaagaagtagatattaagttaagtgtggtagcttgagaaatgggaacaaatggttagatttgtaggactggaaatctttatgctagaaagaaataggggtagtattggacataactctcaaaaggaaaggagaagggacattgtgtttgattcaaagctaagacaaggctgcatttgtgtcactcaaaggagaataggaattacctctgacagagtttgaaagaaaaactctacaagtatcagaatgtttaagatcgttcctggagtacattcagtcattcagatgaaaagacggagaaacggagctgtggcgggaatgtaactagtaaagtactttcttgaggattcggcagtgctcaagaagtttatgctgcgtttgggttgtgagagaatgaacaaagagtctatcattttaatggaactattgaggttaaggagatatactatgcttattgtatagtcattgttgaacttgctgagactgataatgatacataggtgtttctacacttaaatgtgcaatttccatttaggaaagtttagtattgggatttgatgtatatattcttaccagaaccagttctccaacttaggaaatttatttgtaataatctgagtgacgctcagtattcttccaaggacaatttgacaactacttgctatggattcctcctttaggttcctcaaaagttcatgttctccatgtaatgaaatcaaaacttgctttttctctgacatttttgattgttttggttctaaatttgatcaaactgactgcatcgagcatttcggaggaatagtacacaaaacattagcaggaatagatcatttccatcattacaacaggtttagaggagagatctgagacaacacaaaggtatattgaacaatgcagtaagtaaagtagacaaaacaagaaaccatatttatgaccaaatgtgttcatttcaaacaatggtaaaggtctgaaacaacagaggagacggacaagttaatactactactactaatcctaacaatagaggagagaaccagttactatactaaaaagccaaaaacctcaagaatcacttgaaatttgttaaatgagacctcaagagacaaatgaaacatatcagagagctacctaccatgtgtcaagagcaaagcagaggactccacggcacctgaaagtccaaagaccgatattgtcgccggcttttaagctgttacctttgacgacatcattccagtcccaattcaaaatgtaattcaaggttccatgtccagagtccttctccatcccccatatcttgaaacgcaaaccccacattttaaatctttggttcacaagaatcgttcccgcaccaatatcttcgtcgtctttgtcttcgtcttcctgcttggcttgacacacaagaatcgttcccacactaatatcttcgtcgtctttgtctttgtcttcctgcatggctcgacactcctctggcgtcaagaagtcgtttctgattagcttctggaatgggattaagagacggctgaggttagagttgacatcactcttgaacagagtcctttcaaagatcagcttcggggtttcagcatcagcgttcatgtgtcccatcgcttggaaaacccactcaggcgtctctgtagacaaccttggcaaaggagaaacctttactttcttgactttaccactcttcctctgttccacggcacgcctcttgcgacttgtgtcgttctccgttaggcatgaagacggagaagaagattggtaattagggtttggtagaactttcgtctctgtcttctctgactcaaccgtgttgtaatccaagaataacgaagcctcataacaacgaaggtttaagaacgatgaagaagatgaagccccattgagagtttcaaacttttgttgttgttggctgtgtcctacaaatttcatcaggttcttctcgaaaagtctcttctcgctgtcttcgtccgcttcctcctcttcttcccatataatcctggatttgcctttcttcacacgttgttcttcatcacacaccaaacgctcaataaaactagggttttgtttggtttcagtctcgtaatcaatggggatttggttaagatcaggaagcgacgaagaagaagtagaaacaccattaggtttttgttgtctctttaccaaagacgacctttttttcctcgggacatgagataagaatctcttctcgctatcgtcttcttcagagacagtcttcttctgactctttgaatcttctcttttctctgcaagtagacgacgacgttgttcttcttcctccgcagccataaccacagtttccgccagtaaacacagcctcgaccacatatccttccctgaatccattgtgattgaacaaaaaaaactcaaaagttcttagaatgatgacgtaaggatcaaggagattagagttatagagagaggctaagcgagaacgagaattaaaactgccttctgttgccttatatacttacattaggttctaggtctttttgttttttccattttttttgtgtttagtggtttgattactgtgattagcaactaattattgtgattagcaactaattatagccgttgtgatcaagttaacattgtaattaacattgtaattatgaagtaatattgtaattatgaagtaactgagaagtttcgtttctttttttttgtatttaattttattatttgatatatatatatatatatatattgttaacttgatttcagttaaatacaaaaactgaaggtatattattaaacaaaatgtgagaagaattcaatataatagtttttctcattttcctataccataaaccaaaagaagtaaagaactctctctcgtttaccaatactcaaattcatcttttccactacataaacacacacaaacacaagccttattatatagtttgatgtcttgatgatgatacactaaatgagagaatacacaacatcatcgtacgttgggaagtccaatggaccgtccccaatcagtagcagagaagtcacaataaccgcgacgaagattgtgaaaagcagaaacgatttacacgggtcagcgctgttttgtttctctggtccaaccgtcacaatcccttcttgcctttcacttccgccgctaccaagttgtagcaccggacaagtgaaaaacccgtatacaatccctgctataagtgctcccagatttgtcctgtcatgacttattggttagaagaaaaacacaatatccttggttaacatgttattgcttacgtatagtctatgttgtagatctttggtcgattgaataaagtaagagttaagcagtttgaaacctatcaatcttgtttatgatccattgatcctactacttatcaaaccaaagatcataggacaattcaaagaaccatatgtgcagatgggtgtcatgattctttataatgaactgaacctaagaagaggctgcttacgtagaaacaactagctgaagaaataataaagaatgctgaacaagaaacaactagctgaagaaatattgatggatattggaaacttaccagtcatcaattggaccgaaatggcttaatatgagaccaaatcctgtcattataatggccttctgaaacaagtcctcatattcgttgcttttgatcatctctttgttctgattttggtcaacgagccaagctcctattaacgcaaatgctggtccctgcacccacccatatacacgaagacgattgagaacagaatgtatggtgcagtttggtaatatcacatgggaaagattagtgaaacttacagttcctccaactgtaggatctgctgtatgcagaaagctcatgaaatttccagagactcctccgagaatgtaaatgagacaaaacgtgaataatccatagtcacggcagacttttggtccaaaagtaagcagagcccaggagctaagggctacatgaggaattccagagtgctgcagatgtaaaatggaagtgtttcattgacgaaaaggggatattacatgaaaccaagtcatcaagagtgctaaatgtgacatgcaaaaagatgcaacggaatgaggaactaaagcaatatatacttatgatattaacaatgttgttgtcaggtatttaaaatctctagctgttttggtcaagtgtgtttttaaaacagtaaagaatgggaacacagacccaatttgttggtcttgtaccagaaacatgggtgtgaccagcctccaccattctccagcaaggattagatcatttatctttgctccatataacaaagggagtgataagagtcccatattgttgttcctaactggcgctgccgcctcaaacaagcagacaccaacattgatggatgctaatatgctcctgcaattttaatggagagaaatatatttctaagcatcaataagaagaacatgtgtggcattgcatctaaaacgaacaagaagtgattaagagtttttacacagcatagaagttcaatgtatcttctgcttgatcttcatcatcaaactgctggaaaggactattattgttttcaataccagtctttctcaatttgcttgctactgaaccgccttctgattttaccacgtccaaggtggacgagactaaacctttagattttgcatctgacaaacagcaaaataagtgaacattaacaagaggaaaaagccagaaaaatcaagcaacaagacaccaaaaacaagaatacctttttggagtttgtcaagataagcactcaaagaatccaactcttcattcacattgagttcagctttgcgatcaatatcatctcctgttgagatagaaggcttctcatcatcgttttgaagtttcccaaagtaagaatccaacagtttaagtctctgtttggtaatcttgttctctgatgacgctctaactaaacataaccttcttcttggtgaacgacaatacgggattgatttcatataactcttcatcctacaatccctgccaagcgtggttgcttcagccattgttctatgtttcagaccagacgaaaaacgtcttaaaccatttgaatcaaacaatacttctcctttacaagggacttcatggtgaagaggaaacagtgccatcttcaggtcctgtccatttcagagaaacatgtcatcatcaaatctcatcattcaccaccaaaccccaaagaagattatacaaaaacatgtgaatgattttgataaaaacacaaactttagagacgcacttaacaagttagtcctaagataatcaaagaagctatttgggattaaacccatttcacaaccgaaaagaacaaacagagatacgattcacgaaaagctttaaattaagtaatctcattgaggcatttaaccaaacaacaaaagggcataacgttttcaagaatccaataacgaaacgagtatcaaaatcacttctttgaagtgagacatttgtcttcttcctcaccgtttgcgtgagacttttcaatttacgaagtacagagacgagtatcaacacaattgggaagaagaattagaatttgagaaagtgataagattttacctttgaacgaagaaacctgatcctaatcttgaagattgaagatttgtggttgcgaggattaggaaaaattggagttcgaataacgaagcagtgacttgtgaaaattacgtttaggaacagaacataaagcgactaaggaaacaatattttttatttaatggttcaaatttcgtcgtgttggatattttattgttgacaaaacaaaagaagagatattttattcttgaacattactgactcacaagtacaactcaagaattgaccattttatttgctttttcttttctgtttttgatcaaattggtttgctttttctaatttaatgttctgatgaatatgaatagcataaatatttttttttgactaagggcttgactcgtttaaacgcagcggatacggttgttgttgcgagagtttgctttatccctgtgatttaatttataaacttcaaatctaccaatattttagtatgcaaaatgttattgtgcaacatacaataatatgatggtacgaaccttttgggaagtggatggaaaaaatacagactaacaataaatttaggatggtacgaagttgtatgctcaattacatattactagtgaaattttttaatctatattaatgcatattagtccgcaatagtgaatgatgaattaaatacggactgattcgatttcagtcagatttgcatcatactacacaactatttatattttagatttggttaaccaacttataaaaactttaaatactacacaaccatttgttttttagatttggttaaccaacttataaaaacttaatttatataatcttgttggtttttgttaattttcacatagttgtccaattgttcccacacatctcagtattgatatccatcttcttatcttcgttaaccacctaccaaatgtcacgtggacgctccatttcggtttctatccggattcgcggtggattctcctcccaccccaatcatcggttcatttcagcatttggttatatccaaattattttaaccggtttataccgaaactactcgaaccagacaatctttgattggtagaaagagagccacgtaggattatctcttctaatggcaaattaaccaaaaacgtaactgaagatcaaaagagaaagagagaaaaaagacgatgagagctctaacatggacggcaatgtcgccgccggtgatgtcacggacggcgacttctacggttaacttacgacgtatcagcctacggagagatcgcgtctgtgttagagccacggcttcgtctagcgccacggtttccggcggaggagtagtagaggcggtagaattggcagagataggagaaagaagcaagaaatggaagtggaaaggagaatattctgttaactactttgtcaaagattcgccggaggaagttactccggcgagtcaaactgttcttttggttcatggctttggtgcttctattcctcactggcgaaggtattaatcattcatcattcatgttttaagagtaaatgtatgaatcttgttgagatagtgtttttttttagttaagtatcaataaattgttgtatgtggaagatttttatgtataggcattgcttttaacaagaacgaatgaaactacttttgcaggaacataaatgctttgtctaaaaaccatacagtgtatgcaattgatcttctcgggtttggtgcttcggataagccacctggttttagctataccatggagtcatgggctgaggtaaacaatctttgaaatactctggcatgtttttgttgtttaaagaagtgttttggtttggtttggtttgatttgatttattttggtgtagttgatactcaacttcttggaggaagtggttcagaaaccgactattttgattggaaactctgttggaagccttgcttgtgtcatcgctgcctcaggtctaaacccttttcactatttgagtttgtttctacgtctaatgatataaacttcgattacttgagctaaagatgtcacaagtatatgaatcttaggtactaagtttctcatatatttggaaaaaaaaacagaatcacgaggagatctggtcaaaggtcttgttctattgaattgtgctggtggtatgaacaacaaagctgtctttgatgactggagaatcaagctactgatgcctttactcttacttatcgacttcttactcaagcaaagaggaattgcttctgcactcttcaaccgtgttaaagacaggtatgtccttattcactttttccctgactttgaaacgatttattcgagagctctaacgcattgacgaatatacgaaacgcagggaaaatctgaagaacatcttgacaaatgtttacgggaacaaggacaatgtagatgacacccttgtagaggtattgtcattattactcactctcaatgacaaagaacaatgaaagttttattcactttttatgtgaaaatgttatgttagatcattgctggaccagcaaataccgaaggtgcactagatgcttttgtttcaatcttaacgggtcctcctggaccaaatccgattaagctgataccggaaataaccaaaccggttcttgtcttatggggagatcaagatggactaacccctcttgatggtccagtaggtaagtacttcacttcccttccggatcagttacctaacttcaacctctatgttctacaaggcgttggacattgcccgcaagatgatcgtccggatcttgtccatgagcgtctccttccatggctggctcaactttcttccacctagtttcgatttgtttagccgtgtacacttgtttataaatgtaaaacaaatctatctaattggaaaaagacagattcaaaatgatatttcttgacacattttgtggtgtctgaatgtaagttgtaaagaagtcatggtggtagtaacttggtaaaggagtttgtttttggaataaacgcaaattacatggtttgtaactgaataccaaatgtcaaagccaaaaatatactaaactaaaagataggcttatttagtcaaagctcaatgctattgacttggtagtcatttttggtaaaagaatcgttacaaatgtagaaagtgactagttaggttgatgaatgattgatggtcctatacaattgataatttgctacttttgttggtaggcaagtaaaagacacttaatgagctgctagaagctatttttggccacaaaatctacaaatttgtttggttgttgaatctttaaaaggacattcatgctgcaatatcatcaacatagtgaagatgataattttcaaacttgaaattcaaaagtgtatatatatgaatatgatgattgaatattgattatcagtgtgaatgaaaaaccattgttataaattttcagttttcatcaaaaaaatgatgccaaagaagaagagtaaacaaaacaagacaaaaagagttaaatggagtggtccaataaaaataaaaataaagaagacaaaacaaatttgtattaaaatggttagatgtcgttgggtgccgggaagtcttcgttggagtctattatttaaatgcttcaccgatctctcattactctctagtcaatatcccaaaatccctaattcatatctttgaaactgataaagataacaaagaaatggcctctcaattgcttttacctccaaaccaattcactaaatcagtctcacctcaagttttcattactggtaagttcactgttgatctcttgattcttttgtcaaaactttattcttgatttgattgcttcaaagttgaatatttgatgtcttgtgtgttttattttgatttgattaggtgattgtcaaggatttagtgacttaactctgaaaagaaaatcaaaccaagctacaagagtttcaaatggatctagcttaagagtaaaagcagctttgagatctactcacaacaaatcagtggttgagattccaaaacaatggtataatcttgttgctgatctttcagtcaagcctcctccaccgttgcatccaaagactttcgaaccgataaaacccgaagatttggctcatcttttccccaatgagttgattaaacaagaagctacacaagagaggtttattgatatccctgaggaagttcttgaaatctataagctttggcgtccaactcctctaatcaggttcttgatttttttatttagttttcttattttgattgtttttttgtgtgttttcttttatatttataatttagccatagatgatttaaagataataaaaaggatttgtttctgtttttcataatcaagattttgaatattagctgaagtgtcatcagtcttagtattagtttagccaaatttcatatcagattatttattttgctttgattatagagcaaagagattagagaagcttcttcaaacaccggcaaggatttacttcaagtatgaaggtggtagcccagctggttcacacaaaccaaacacagcggttccacaagcttattacaatgcgaaagaaggcgtcaagaacgttgtgacggaaaccggtgctggtcaatggggaagttctttagcctttgcttctagtctatttggtctcgactgcgaagtaagcataaatattagaattttgctttggtatcttgaaaaatgtaatgttttgattataagtgacattgtttcttttatacttttcaaaacattataggtatggcaagtagccaactcttaccatacaaagccatatcgccggttaatgatgcaaacttggggtgcaaaggttcatccgtcgccatcggatctcactgaggcgggtagaagaatcctcgaatccgatccatcaagtccgggaagtttaggcattgcgatatcagaagcggttgaagttgcagcgagaaacgaggatacaaaatactgcctagggagtgtattgaaccatgtgttgttacaccaaacaattattggagaagaatgcattcaacaaatggagaattttggtgaaacacctgacctgatcatagggtgtactggtggaggatcaaattttgctggtttgagttttccttttatccgggagaaactcaaaggcaaaatcaaccctgttataagagcggttgagccatctgcttgtccttccttgaccaaaggggtttatgcttatgattttggcgatacggctggattgactcctttgatgaagatgcatactttgggacatgacttcattcctgatcctatccatgccggtaataaaataagctttaaactaactatcttaaacaaaacgcttcttgattctcaatattctgttttcttgatttcttggatctttggttcttgattcttgaaacctgaatcttttatttttggcttaattttgttgtattatacgtctatggttgttggcaggtggattaaggtaccatgggatggcaccattgatctcacatgtttatgaacaaggattcatggaagcaatttcaattcctcaaattgagtgtttccaaggtggttcttcgatcgctgaaattcctcaaatctcatttaacttttgcatttgattgtaatacaaacttttcatgtttaattgtctttcaggtgctattcagtttgcaagaacagaagggatcatacccgcaccagaaccgacccacgccattgctgcaaccataagagaggctctccgatgtaaagagacgggagaagcaaaagtgatactaatggcgatgtgtggacatggccatttcgaccttacttcttacgacaagtatttaaaaggcgagttggtggatttatcattcagcgaagagaagatacgagagtctttgtccaaggttcctcatgttgtttaagctcgaatggccccataaccacgggaaaccaatgtcccatgttccaaactagacgtgagacagaagttaggtttaatcttggcttttgaaatgaagagtgagagagaggacaacttcaaaacatgaacaaaattatctcttgaaataagaataaaaaaggcatttacagaaacaccacattttggggttaggtctctatttttcactctatatatggagaaatctttgcaagatatgaagctcgacgataagtcgatgatgaacctttaattcttccaaaaccatcaacacttgctgaagaagcatcagaacttaagttttagaaaacaaaattatattacgtgatagtactgtcgaaagacatacaacataggaagacgcaacacgtagaagtgagttgaagatgcgatgtcattaaaacatgacttataacatgagattatcggaagacacacacgccacacattaaaatgagaaaacacatgtagtagagtaaaaaaaagggtacgagatccttaagaaacaaatttaaaaccattgggtagaacatggaccccaagttgatgaagcatgttactggattttccatggaacccaacgatctggtgattatccttgtgaagcacgaagcttggtaatgtaccgaatccaaagtacggagagtcttttttgttggtcttgaacctaagcatggttatacctccgattttatcatcataagtaccctccactgatgtgatacgttcaagaggatccaactcgaactgcaaaacaagaaaaagaaatacattgagaatgataataagttgaccaagtactatatattacggaaattgtatcagtgacctcttggtcttcagatatcgtggtcttgttgccatgatcatctccgatgacaacacgagtgcttttgtagtacataaacttgacaaagcctacaacattttcgtttagtccaatgtagatctttcttacactgttgaaagtaccaccatcatcccaagaagctcctccacaccaccttgtgcttttagtttctccacatcaggagtaggaggaatcgggcgataatatgctccaagagaattaagagtattcccaacactattatatccatggaacccaacaagaggactaccattcttctccagcacaaattttctactactagctgatccaaatgttggagagcttctcttttttgatgttttgaatgtcaatgacgtaatccacgtgatgttaacacttttcggagctgctaaggtcccctccacagacgtgataaattcatttggataatcaagcacaaactgcaatcacaaaatgttttgtataagcgcctcaagaacccatatttaaatattcattgtcgatgaatttttacgtaataaagtttaaagaatcatgacctccttctcatttttaacatcacgtcgatacggtgtcttttccacttttccgccattatcgtactcaaacctgacagtatatatttcgttacctataccatcgacgaacacctttctaactccgtcataattacaaccatcatcccaagacattcctctacaatcaccttggcattccaatttgttaggagtggccctactgaaatatgctccaagagagtttagacttttgtcggcatatccatgaaacccaatgatcttatttccattggatgcaagtaaaaacttcctgccctttttataccccatcataacaggattgttgaggttagtttggaaatgaagcccttgaatggtttcagaagcatcatcgtagtaaccttcaacatatactagatattcgttctttgactggttaatctccatctgaaaatttgataaagcgtttactacaagatttaataatatatatactcaaataaatgaacctatagttataattaatagctacgtaccttctgtaaaaaaccatcaccaccagagtcaccatggattaatccagtttctagttttccattcttgatatagtcaactttgatgtacagtatgccttcaaaaccacctagcacttggatctttgatacattgtcatggtcgaatccatcctcccacttcttgcctcccataccacctttcacttccaatctcgtaggagtaatggaagtgaagtaagctccaagagagtatatatgtacattatcagatccatgaaacccaatgatcttctttcctttgacggctagcgtaaacatggtacactcataactataccccatcagttcagaggtcctgaaattggttttgaattgaattgcttgcaaaccataagactttttgttgtagtaagcgtcaacagattcaagatgttcatcttgtagatggtttatctcaaactgcaaaaatagtgagaataaaaataccacagagtcagcattatatatcaacatcacctcaaattaaataagttagggaatagagtaaacctctattaatcaatactctataaattaatatacacaataaattaacaaatcatgttgtaccactgtgaatattaacaaaactcgataaaataataatacttttcaaaaatcttatataaaaatatggtcctaataacacataaattaataatcatatatatatatatatatatatatatatataaaataatatataatatatggtttatggtatgttaaacattgaatttttgttagggtttgtgtatcaaacaattgttacgttatgtttataataatcgtaataaaaagtagtcataatttttttattagtttcgaaatgcttaatatgcatcagtttcattttaatagttttatagactttaaaaatacgatagttgataaatttatacatatataaattatctaaatgaattcaactatagtctttgggattcattctcaaaggagttttttgaaatattaaattttcaaatacaatactacacaaatataagatatcaaaattattaattttatgtgtatccaattctctcaattaacatttttcttaaattttaaaaaaaaacttaaagtaaatatctctataaattaatatttattaatattttggttccgagtcccgacattattaatttatagaggttttacttatattgatcttctaagagatgaacgtaaatttctaatatggacttaaatgggtgattggttgggctgtaactctagaatttttgctgtagagattttgctgtagctgtgttggttgtagctgtaactgttattgctgtaaaattattgctgtaagttttgaactttaaatatttataaaaaatggattaataaatataataattgtaataagagtttatttttatagtaaataaaatcccttgtattactaatttaaatatatatattatgctgatataaaaataaaaaaaatcctatgaattcttaataaaataaatctaaattttacatattccatagattaattttgttatatatttatgttgataatttaattttttgtatttatctaatgaattaaaatttctacagccaagaaaatagggctttgagaaattactctactacagccttaaaaaaaaaataaaaaaaatttggactgtaagtttaaaaataaaggtataacacgattggtttgtaatcaacgctttaaaaaaaaataaggttgtaagtcagacttaaagcccaaccaatcatgcactaaatgagtctaaattagtattgttcaatccggagctggaaaggatctagcccttgaattttctattatatataaaattcgtataaatgttaaccatacatttttttacctttaagaatagtttaccctattttaaaagtaaattaaaagcaaataaaaatagcaaaaactaaaacttttcttttgggtatttgcgaatattaaaatttctatgtgattttggccgcgtagacataccgtttgtgtgaaaccatagttaaagaaaccatggattgatccatcttttggatttccactcttcacatagttgaaataaaaggatcctatgccttggggacccccttttacgtatatctttgttacgtcatcatggtcagaaccatcatcccacagacgacgttcatctaacttgattcctttcgctcccaactttatgatcatcttgaactaatatcaatcttcagctgggtatgaaggtgtattgtttttcctattcagtaatctgcatcagtaccacatgcatgtgttccttaagttgggaagaaccaacacaatatctaaactagaaggaagaaaaaccaattgattatactaccatggattagttaacataaagggatatttaaatttctacaactttaaatatatagctcattacgtttacagtgatagatttgataagatctcacttaaggttaaagttaaaacattagtgcgaataaagagtaagcatgcttatgggagagagagaaaagggctgacctctgaagatgaacagacttccgtaagtttagcgatggacttgtgtttttcatatatacaagttttggtcatttttcaaaaatggatattgatattattatatatgaggctgctggttgcaagattaaatattaaatttgtgaaaatataaactaattgttaaataattattcaaagacgaccaaaagtacgtcttccacaaacaaacgattatttaagacgaccttgcatgattgcatctcatcgacagcgtagactttgttttttatgatgacaaacctactcgtaaaacttaacaaacaaaagtaatatttcaacccgaacatttttctatcgacataatagaatagattttttagacctagactccaattaaaacaggggtcgtttctatattaaaaaacatttaactttttattttacaaattttttttactaaaatcaaaaaagttatatattctatcttgtatatatataaaaaaaacattgcgattttttttgttttttacgctttattgcgagaatttttcttaataattttaattagaaacattaacaatatattacacaataaaagtttaaaaaaaataagactaaaaagtatattaaaacttctatagcttttttaaatatacgcaataacaattttgatttttgccaacaaaaatataattattttttatcatgcaattttagaccaaatcagagtcatatactcatattttataaagtatatctcatggaccattacctcctagtctttgttgatcggttatgtcatggggcgagacaataatttacgcctgccggattaataaaatagaaatggattatacattgctttttttttccaactctttatagtttattactttatttgtttattattatgtgagaaattgccatcgccaagattgaaaaattaaatgagcaatcttgcaattgtttttttttatttttgtttttttctatcaatctaaccacttgttatcagtattctgaaatgcagttggttgatgtggtctaaaaagtagaagatgcttccaaatatggaaaaaaacaatgtttggaattatattaaaacagtaacactaaattttctaagtagaaacgtacgaaaattactttttactgtataaatagagctgtcaaatggtccgtccaaagatcattgggcgtgtccgtacagacagttttttttatgggccaagttggacggtccataatggacaatggtctgaaaatgtccatgcccaataaagaccatgtccataatgatcagcccattttattattgttattattgataaatcaaaaatcatgattttaaagaaaaattcaaaaattgtatttttccgcaaaaattgtaaaaatcggagacttgcatttttccgacaaaacggtaaaattgtgtttttcttaccaatacaataaaatcacgattttggcggaaaaattatggaattgcgttttcccgccaaaaccgtaaaattagagaattgcgtttttccgtgaaaaccgtaaaattagagaattgcgtttttccgtcaaaattataaaatcggagaattgtatttttcccgtcaaaaccgtaatcgaaaatttgcgtattccaaaaaattgtggaatactatttttccttcaaaaccgtaaataatttaataagaaataatttattaaaatttaaaattttcataaaaatagaaacttataatgtaaaatatataatttgaaaattatttagttgtaattgtaattaaaattataaaaatatgattaaaatgaagacatgtctattgactcaattcatgcccatgggcagcccattgttcatacggtcaagcccatattgtccatggacaaaactggtaatatgcccaattagaccatttttttttagtccggaatataggccgcccatatgcatttggactgggcaagcccatggacgtcctgcccaattgacagctctatgtataacacgcattgccaaaatttctacatgtatgtgtgtatatagatttagctcataaatgtaaattatggaaccaaaccgtaagacgaatttgggacaatgtgtttttgcattttgggtaagaaaatcaacacttgctgagaagtatcagagcttaaatgttaggagaagaaaattatattgtgatagttgaagatgtgatgtcattaaaacatgacttattaaaagaaaaagtaagagaacgttattaaataaatttaaaaccgttgggtataacgtggaccccaagttgatgaagcatgttactggattttccatggaatccaacgatctggtgattatccttgtgaagcaagaagtttgatgttgtaccaaatccaaagtatggagatttttgtaagttggtctcgaacctaagcatggttatacctccagatgtatcatcataagtaccctccactgatatgatatgttcaaacggatccaacaagaactgcaaaacaagaaaaaaaaaatacatcgagaatgataataagttgaccaagtacgatagaaatctagaactttaaattatggaaattgaatcagtgacctctaggagatcagatgaaagggtcttgttgccatgatcatctccgatgacaacacgagcgtttttgtagtacaaaaacttgacaaagcctacaacgtttttgcctagtccaatgtagatctttctaacactgttgaaagtaccaccatcatcccaagaagctcctccatcaccaccttgtgcttctagtcttttcacatcaggagtaggaggaatcgggcgataatatgctccaagagctttaatattataaccaggaccaatatatccatggaacccaacaagagcgctaccattcttctccagcacaaattttctaccaggagacgatgatccaaatgttggagaggttctcccttttgatgttttgaatgtcagtgagagaatccacgtaatgtcaaaattagtcggagttgctaaggtcccctccacagacgtgataaactcatttggatagtcaagcacaaactgcaatcagaaaacaacttcgtataagcgcctaaagaaccaatatatagtatcaatgaaattttacgttactagatttaaagaatcatgacctccttctcatttgtaacatcacgccggtacggagtcttttccacttttccgccattatcgtactcaaacctgacactatctatatcacttatactatcgacatacaccttttttacgccgtcataattacaaccatcatcccaaggcagtcctttacgatcaccttggcattccagtttattaggagtggtcgtactgaaatatgctccaagagagtttaggcttttgtcggcatatccatgaaacccaatgatcttatttccattggatgcaagtaaaaacttcctgccctttttataccccatcataacaggattgttgaggttagtttggaaatgaagcccttgaatggtttcagaagcatcatcgtagtaaccttcaacatatactagatattcgttctttgactggttaatctccatctaaaaatttgattaaacgtttactacaagatttaataatatactcaaataaatgaacctatagttataattaatagctacataccttctgtaaaaaaccatcaccaccagagtgaccatggactaatccagtttctagttttccattcttgatatagtcaactttgatgtacagtatgccttcaaaaccacctagtacctcgatctttgatacattttcatggtcaaatccatcgtcccacttcttgcttcccttactacctttcacttccaatctcgtaggagcaatggaaatgaagtaagctccaagagataatatatgtacataattagatccatgaaatccaatgatcttctttccttggacggctagcgtaaacatagtacactcataactataccccatcagttcagaagtcctgaagttagttttgaattgaattgcttgcataccgtaggactttttgtcgtagtaagcgtcaacagattcaagatattcacctcgtagatggttaatctcaaactgcataattagtgaaaatacaaataccacaaagtcagcattatatatcaacttcacctcaatataaaatgagttaaggaatatgttgattttctagacgatgaacgagaattgctaattatagactttaaaagaacttagagtaaacttttactacttacattttaccgttaaaggataattttcccttttaaaaatgaattaaaaagcaaatagaaaattaaaaaaaaaaaaactaaattaatcggcagccttatcagatctacatcaaaataacattgacttttcttttgacggatattgccaatataatatcaaaatgtttatgtgatttggccttgtagacgcataggtagccgccgatttttagaataccgtatatgttccagaacataccgtttgtgtgaaaccagagtcaaagtaaccatggattgatccatctttgggttttccattcttcacatagttgaaataaatggatcttattccttcacgaccacctcgtacgtatatctttgttacatcatcatgttcagatccatcatcccactcccgctgattacgttcatctgacttgattcctttcgctcccaacttttggatcatcttgaactgatgttatcaatattcagctggatatgaagtggttcttgtgtttcctagtacaataatctgcatcaatatccacatgtgttccttaattaaattgggaatattaaaaaaacaaaacatattgtcaagcgaagaaccaacacaatatttaagatcaccaattgcagaaacggaactactgtaagaggatatctaaaactatgctcattacgttcacataaataatagatttcgataagatcttatttaaggttaaaacattggtgcgaataagaagtaagcatgcttatgagggaaagagaaaagagctgacctctgaagatgaacagactgctatgctgatcagtaagtttagcgatggacttggcttttttcatatatacaagttttggccatttttctaaaatgtatatttatattgttatatatgaggctgctggttgcaagattaaatattaaatttgtgaaaatataaactagttgtgaaataattattcaaagactacctaaagtacgtcttccacaaacaaacgattattttaaaacgaccttgcatgattgcatctcatcgacagcgtagattttgttttttatgatatgacaaacctactcgtaaaacttgtaggtggacttcagtttcgagcatttattgtttggcattatttttagaaacataaaaccaacttcaacgtgacatgtgatcaaatgtgctcttggtcatcgaatctcaatccaacatgtgtgttttgtcaagttccatttgagacaagggatcatttgtttttcagctgcacattctcggctcaaatctgggaacatcttgccaagcgaattctcatgcaagattttactttggattactctgctttgctaagtattgtctccacttctcagttctcgaagacgcatcaattcattttacgctacgtatatttaaagcgacagtccattcaatttggacggaaagaaatcgaagaagacatggtgagcttcccatctctgcatcggtaataattcaagtgattgaccggacagttcggaatcggcttctatatatatcttcaaatgggttcaacctccatgagagatggactgcaactctggtttgcaaccaaaccgtaaagcttcagcattggtcattcattcaaaaaaagaaaaaaaaaatctgcacgtccaatcctactggttaaccagtgttacagatatttatcgggtttgagtttactgttaatatccgacaatttaaaaagcgcaaaaatccacaaaaatttggcactaacttgtgatctggtaaactggtcgggtattcgtttaaaaatatatatatttgattttggacaaaaagatagagttttagtgtattcactgttcattattgaattatttcaaaacttttttaagttcttcgtattcactatcctactatcttagtatttttttaccgtgttttagttagatttataaattttaatcactttcttattattgttagactttatattttgttaaacatgatctgattatttttattattaataaaactcaaacatatcttttctcgcgatttcatgaagaaaaatattttaaatttgtttatacaatatttctcaaacaataaatcaaactcaaaatgatgaatattataaattgttgttgttattttagaaaaataaattttaatgaaaaaaccctcaagtttagacttatccattttaaaactctcaacttatttttaaatagaaaaacccagtggtcagtgttttcacactcggtccgaccggttgaaccgtgacccaaacatttttctgatttaggtttagtgctaaaacccgacaagttcaaaatcaaaaaaacccacaaaaactcactattaacctatgatccggtgaaccggtcgggtgtgggttttaaaatattctctttattttggaatataatatgagattttagactttattcaatcatttttagaaatcttttcagttcgtaaactcattttatggtttacattttgacgaagactttacaatgccgccttaaaaatgaaacgaatggtgagtgagacacccgatattagttgtgtaaattcacgatgttttactagtttatttccgtcattggtgatctactactatatttgttatggtattagacgtttagttggatttaaaaaatttaatcactttattattattgtttgattatatatatatatattatttattttttttattattattttttggtataaatgattttatattttattaaacataatctgattttatattttataaacatgattatttttattttttaatttataagaactctaaaatcttattaatattaaatttattaaataaattttaattaattgacttatggtccaacctggttaacccgatgacccaataatcgagaaggtagtcgggttcactgtccgggtcgggtttaatcttggaccatcaatcatctttaaaaaaacaattgtcagaagattgaatatttggtaaacaaagtatatagagttcagaagatataaacaattaaattgacacaaatatttgtaaaatatttaatttttagaaagaaataattgtgataaggaaaatacaaataaatatggagaaaagacactttgtaagaagacataactgcaaagatattttaattaaaaaaattaaaatatttaacgaatagtaacgatgaaaaatgcaattataaacgaggaaaacgatagggaaaactctctgattcacattagggcaaacatgcctcatatatatatatccatacatgagaccgtcacatgaaacccaacttaagcccatctatagatacgtaagcccatattctatatccaaactaagcatgtgcatttgcttgaagtctaatcttgaacactttaatcatctttgaaactcagtgtgtcctcccacactacttcaaaaccttaatagccatgatatgagccaatcacctcgtgtcaagtatatatgcaagtttaattcatccataaaacatagaatatatgctttgagataaaatcctatttagcaaggatctaggcacttagattctttccaaaacatatcaacatctctgctacaccaatttttttgtgagttaatctcagtgacctacgaatgagtgaaaactctacttcacaagatattcaatagcgataagatcgtacaagatacaaactcgaacattcacattacttaacatcaataggaaaagaaaaaaaatatgaccaaaaaaagaaaaccaattggaacctaagctaaaccgagtatctatggtcataagacactatcactaattacaggattccactaaattactcgtatgcgaactacgcatgtgcatttaatttgcttgcagcctaatcttgaacattttaatcttctttttaactcaagagtgttgttctcccacactactttaaaaccttaataaccgtgtacacgtcggtaattagtcaagtaaaacactccaatatccaataattaaaaagagcaaatttagggaacaaacatgcgcacaaactttcaaacatcaaccatgattagagtgcacatgtacaccatagacatttttccttgttaatttactaaattaccataaacacttttttctctcttttattattccttttccacccatacccactttttaactttccatttttaaatcattcctcgtgaaaatagtaaaactcctttatgcaataaagttttcttgaattttacaacgtacaaaaaaaaaaaaaccgcgtggcattttatgtggttatgatgtgagaataatttgtgaaaacgaaactcaagtcaatgaataaaaagacgaaacaatgctatgataagaaaagaaacaacactcgaaaaagttcttctttttcttccgcacatgtctgactctctcataagcgtaaatcgctctgtcaaatatctctgaccagagagacagagttgcctccacgtttcttcagacaagactcacgctcttccctttcaccacattcccttctccatttctcaatctcacttaccttctcgattcttgctccaatttcgaatcttccgagtgaaaaaagcttcaaagtttggaactttctagtgtttattaatctgggtctgctctgagtttcgtgtgtagctgcatatgagcttaaagctcgagtttttccatctgggtttggaattctagggctagtgattggagattttgggaatttaggttgattttagtaggtttgacttcaggttgcgtaatttaggttgattttgatccgatttgtggaattagggtttgtttgttcacaaagcttcaatttttggagtttaaatggatcgataacgactgtgttagaagaaagtttgctgcttcagattcgtattcgatatagaaatgagtttggttcctcctttaccgattttatcaccaccgtcgtcaaattcttcaacaactgcacctcctccgttacagactcagcccaccactccatctgctccacctccggttacaccacctccttctccgccgcaatctccgccgccggttgtatcatcatcaccaccaccaccggttgtttcgtcacctccaccgtcttcttctccaccaccgtcacctcctgtcatcacttcacctcctcccaccgttgcttcttcccctccacctcctgtggtgattgcttcccctcctccctcaactccggcgacaacaccaccagctcctccgcaaactgtctcacctccaccgcctcctgatgcttctccatcacctcccgcaccaacaacaacaaatcctcctcctaaaccttctccttcaccgccgggagaaacaccttcaccaccgggagaaacaccttcaccgcctaaaccttctccgtcaactccaactccaacaacaaccacatctcctcctcctcctccagctacctctgcttctcctccgtcttcaaatcctactgatccttctacgttagctcctcctccaactccattacctgttgttcccagagagaaaccaattgctaaaccaactggaccagcttcaaacaatggaaacaacactttgccgtctagttcaccaggtaaaagcgaagttggtactggaggtattgtagctatcggagtgattgtgggattggtttttcttagcctttttgtgatgggtgtgtggttcactcggaaacgaaagcgaaaggaccctggaacctttgttggatacacaatgcctccttccgcttattcatctcctcaaggctcaggtaatataacatagaagaatacatctcaggttctgtaaaggcattttgtagttggataatctaagatccttttgcatttagggtgcggttagaaaccctagttggtttgttcattaacggttcgagaactgttgaaagaactgtgtactgagtagtatggttagttttagtaacttaatgagcatggaacactcactaagttttggataatgtgtattgttaatgtcttgatcaatctgcatttggttctgccagtgtggtttctgtgtcttctctttacagtatatattgagtgttgtgagtagtatgattagtttcagaagcttaagaagcatgacactctcgctgagttttgactgcttgattttgcttaatgtcttgatcaatctgatcatccccttttaatgtagttagcttctgactatgtgtttctctgtgttgtcggtacaatgctgtggttatactttcagtctaggatatgagaccaaatatgtaactagagaagcagctatttttgatacgtgcgacaaataaaaaaggaaaagaataatcttttagttctgatcaaatgtatagattgtctccgtggtaatcatcaatgcatgaaccaacacattcttacttgtttgtttacccagtattgagttgtttattaacagaaaactcgtgttgacagatgtagtgctcttcaactcgcgttcttcagctcctcctaaaatgagaagccattctggtagcgattacatgtatgcgtcatctgattcaggcatggttagcaaccaaagatcatggttttcatatgatgagttatctcaagttaccagtgggttctccgagaagaatcttctcggtgaaggagggtttggctgtgtatacaaaggcgttctttctgacggaagggaagtggcagttaaacagttaaagattggtggaagccaaggggagagagagttcaaagcagaagttgaaatcatttctcgggttcatcaccgccatttggttacactagttggttattgcatctcagagcaacataggttgcttgtatatgattatgtacctaacaacactctccattatcatctccatggtaccaaatgcctcatcttcttaaaccataaacttatccttttataactacataaacttcaatgcatgtgtatgcgcagctccaggaagaccagttatgacttgggaaactcgggtaagggtcgctgctggtgcagctcgtggaatcgcctacttacatgaagactgtaagttactgatgcttttttgtttttccatgatatttagttttcataattttgttaccttctaatgctctgctttttttttttgcgttggcaggtcatccccgcattattcaccgtgacataaaatcttccaacatacttcttgataacagctttgaagccttggtaacatcatatgagctttattctagtcattaaacggtctttctttcacaacgctgacctcttaagcaagttttttgtcacaggttgcggattttggacttgcaaaaattgcacaagaactggatttaaacacacacgtctcaacgcgcgtaatgggaacctttgggtgtgtgtgtatgcactatttattagaacgttctttgtgtgaaaatcaactactcacagaagaactaaccgatattaactgtcaaattctcttaggtacatggctcctgaatatgcaacaagtggaaagctgtctgaaaaagcagatgtttattcgtatggggtaatactgttggagcttataactggccgtaaacccgtagatacgtctcaaccacttggtgatgagagccttgttgaatgggtaagtgcagctctagttttaccatatttcttgaacttccatgattcaacaagtgtcttctaaccccctttggttacataacttttattaggcaagacccttgctgggtcaagcaatcgagaacgaagaattcgacgagctagtagatccgaggctagggaaaaacttcatcccaggagagatgttcagaatggtagaagctgcggctgcatgtgtccgccactcagctgcaaaaagaccaaagatgagtcaagtggtgagagctttggacacacttgaagaagcaacggacataaccaacggaatgagaccaggacagagccaagtgtttgactcgagacaacaatctgctcagataaggatgtttcaaagaatggcttttgggagtcaagattatagttctgacttctttgatcgctcacagtcacatagtagctggggcagtcgtgaccagtccagatttgtaccttagtagtttttattgcctttgcttctttcttctttccctttaaacatgtcctcgatcttgtatattcttttgcatgatataatgtatttttgaaatatacatacatacacacataaaatttggtagtcttttgaagaaaaagaataacagatgtatttgatagatagtggtccttgctttatctaatgattgctgaaccgggttaacaaattgagtcttggtttctcttgtttacttgcttaatcgtttctttgtactgagttcttaatcggatttgtgagctgtgagttgcgaatcaaagcttagtgaggtctatcgaagataggatttacaacatctcttcttcgtaatcgcccttaaatcctgtttgctttctggcaatgagctagcttaaccctgattgcgacaggcttaatacagtcatgttggatctcctattcgttctgctaccaggaagagaaagaaagactgattgcgacagctcaaccggatgagacatctcttatttacaaatgaagtagaagaacccagattccaaatgaacaaattcaaacttgaaaaagtaaatagttacacaataaacaacattttcttgtttcttgctttccaagaggacaagttttgtctagtagacaaaattaagtaaacaaacctcattgagatatttagatcaaacagatcatcaactctggatttgccgtgagtttcaaaaagccactccaaaataacaatgatgtatcttgattgaagcatatactgatcaagttgattttcagctcaatcttcaaaaacaattgaagaatgaaagtgaaatcgagctatctaaattcatttatgaaatgaagtaaaaaagagagtttcacatacaaaacaaaacatctaatgctaaagtctctcgatataatccaagtcctaagcgaatacgagtgggcatgtgcttgaagctcggggagaaagtctcaacaccttgatcatctcaagttttggaacaacagtatcaaccaagaatgttgccttctttaagtgacaagcgtttttcaaaatgtaaacagcaatatctctatctcgtggcctaagtatagtgaccatttgaaaatttgtaggctcgacaacaagcatcaaggaacataagtcagttgattccacttccagcaaacaataccatatacgcttatcatccccatgattctaagaccaatcagaataataagactaaaagtaataagaaataggagtaccaaaatatatatatatatatatatatatatccgagaaagaaaaacaaaataagaataatcgaagatgaacaagcaaaacaagctactctcgctctagttttagctatagatgcattgcacatagcagtgtcaatgaacaaaaaatactcacgccctagccattcattgagtacatagtttttgtctatgttaaaaacatacgggaatcaaaggaaaataaatatttggtatacaaacgaaaacatctaataatgattcaagtctctcaatgtgatccaagtctgcagcgaatacttagttggcatgtgcttgaagctctggaagagtgtcaactcctttctgatccaagtccgcagcgaatacttagttggcatgtgcttgaagctctgggagaaagtgtcagctccttaaggtttggaacaagatgttcgggttcatcagccaggattgttgccgtctttaagtgacaagcgttcttcaagatgtaaacaacaaaatctagatcttgctgttttccaaagtaatgtgacaagttgaatatttgtagactctccagcaagcattcgggtacagaaatcggttgattccaacaatccacaccagtagaaagagtcacatgaccctaagaccaagcagaagaataagattaaaaccaaacagagtaacaagaaatagtttatgaatgaaacatacttgcactttaaagatattcaatactcgcaagttaggagaatccttgagcaactggccaaggattttcgacttttctggcatgcaaacacataggttcagatgttcgagctggttgaaaacaaagccatcatcatacgaatcctgtccacaaaatattaaaatcaataacaaaggattccataattgagattgacaagtttcagttgataaatggaaactagttacctctgaacatatggttaagacgcttgacagatgtgattgatccaataagactcttgagatcatctaattgaacatcgacatacgcttccctcagcttaggcattttcttaagtaaacagtagtgttcctcttcatgcacgtcttcaagtttcaaatactttaaaggagtatctatcacatacccatcaaaaacctcacaattttctataaagagagttaaactctgcagagatgggacgataatagtgaactctttaacatcttgatgcacagaacatatcaccgatagatcatcaagaacaggacaaatagatagaatgtcctgaagagattttccttctacaaatgtcacactgtcaagttgcaaagttttcagagagggaaaagaaacagtagagggaacatcaatgagaaccacgttgtcgagtttcaaggtgacgtacatggaaatatgttttcatcccaacattcataagaaatttccagcacacgtacatggcgagaaactgcaatttcaatccaccgttcgatatattcaggttcaatatgtgtgttatactgataaagataaaaattgagtcgcaagctttctaagaccggagctctgtgtagtggcagcttcttgtcaataaaatccacaagtccaacctcctcctccttatcatattgacaagtgttgagaaaagccagaagatcagtctttggagaaccgaaatcgagtctaggcaaccacatccaaagaaactcccaacgcttagacaaaatggaagtggatacagcaacttttgtcggaacaaacgataaaatcttcaccagcacatcatctggcaatccattgaatatgtccatatcttacaggttttttattttttttgtcaaactcttacagattctaagttactgtaaaacactagaaaaaaacaccatcaaatgattttttttcaggccaagcaaacgaattagtaacaagagaaaacacagaacacaagcatgacaaaaccctacagagagctgtaatgttgaaatctgaaacaggacaaaaccctggaaaaaattaaacctgtgaattccagttggaagctcgattctgctaggaatcctgagaaagcctaaagaactgcgaaagcgtttggttacaatatataagaaagaaatgtggaagatatcagaataagaatcgtcttcgtctccataaaagcggagcttcgaaaatgacaaaacttcgtcggtactcacagatcattgaaccgttcgtcttctttgcatttaattgggttaacgaatggttttcaacctttaatgggcctaggcgtgggccaggtttcttttttttttttacattccgtatttcttttctctcgatgtagaggtgtatagtacagtaaaacttttataaattaatactaaataaattaataatctctataaattaataaatttttttggttccgagttaggatcagtataaaaagtgacaaaaatcgataaattaataagataatatttattttgaaaatcctatataaacatatgctctcattaatatcataaattaataattatataaaaatatcaaatatatatatgtatatgttataattatatacaataactttaatgaaatataattttagtattgttttcttttgcttaaactcacattagttatttttaatttaattttaataatttttactatatcaaaaattgttcgtattgttttcaaaacataataattgtttttatttgtatttagttttaaaaatatatttcaaataatgaatggaagcttatattttcataaaaggtttttaaaaaacttaccaaattaggaaaatctctttataaaattaatatttattaatttatcgataaattaatacttctataaattaatagaattttgcggtcccaacattattaatttatagaggttttactgtaatgtaattgttttgttttttaaaactgaagtctttttattttatattttcttcaaaaaaaaatttatttcacttgacattttgcaatatttataaatcaaagtcatacaacatgaactaaatcagactgataccatcgttgtaattgctcttaatagctaacaatccatgaagtggattcagaaaagcggacatcaaacaaatgatttgctttgagttttcttcttcaaatttgatgaataagcttagagggactggttcggaaagcagtaagagcacccttaatggtgtatcttaggtatatcttaacaaaatcttaggattaaaagtgattaagttaaatcaaaccaacaatcttaagctaagaaatgtatctaacttaagatatttttgcttagctaagatgtgtctatgtgttacttcctaattggtttaaggaataaacaataggaaaagcaaaaaatatatgcaaaattgatcttttatcattaagatacaattgaatcttaaccattagaggtcatttttgttaagatacttaacttttagtcttaactttcagaaagcaaaattttatttttaataatgctaagattaaaagttaagaactaattggttcttaaccatcgaggatgctctaagattctgttttgttgtggtcatctattgttatataagactagttcctgtgttgcaaaactaggtagagagggtttacgacacttagttatataataaacacacccggaaactagaattttttttttctttaaaacaaaaaagtagaattcgactatacaaatgaaatcatcatatgattcaagtctcaacatgatccaagtcctcagggaatactagttggcatgttgttgaagctcacggacaaagtgtcaattccttgatcatgtgaagttttgtaactaaattttcctttgtatcagccaaaaatgttgtcgtctaagtgacaagcatttttcaagatattaaacgcagtacctctagcttgtggtctcccaaactattgtaaccatttaaacatatgtagactcgacaacaagcattcaggaacagaagttggttgattattccaccaaaccataccattatggttatcatccttattatactaattaagaccaagcagaagaattagattaaaaccataccaggcatcagaaaagaaaaaaaaaattcaacaaaacatacttacattacagagatctccaacactcataagaaaaaacatcaattacaaaaaaaaaaaaaaacaatcagattgattaattagagaaaatcacattgttttgttctttttctgtttatttttttcttttctaaattgactttttttaaattgaggtttttctaaattgacgatttttacatcctatgtaatttacactatctcattgtttgtttttgtttacaaataactaaaaaaataaacttgttttctgaagagatcggatagtggagcttaaagttggtagacaaatctcattgtgataagagttttcattagcgagtctggaatgacaatgcaatactcttataatgaagattgatcgaagcataactaaagttaatttcagctcaaacggaaaaaatctagtgtttgagcttttcgatttatatttacagaaccaaaatttgttctgaaactaaatgaaattttcacattgctcaggtctagagtatcagaaaacattcacaaaccattgttcactagtttcttacatctgcatctttagcataggatattacaatttatatttcgattttgcaaccttgtgcttactactaacaagtaacacccatataaacttgttaaatgaaatgtttcaattttgacatacattttaatttccgtgaatgtatgagactgtaaacacatgtattatattatttagcttttattttttattttgaaagattgtaaaattgtattcaaaaaaattaactgttttacattagatgcttcatagtgacgtatgcgtcaataataaggtctaataaaaactacatttttgtcgtgaaaaagttatcagacatggaagagaagccagccgagcagagcacattgtccaagaacaagacattcattgagtaacatacatagttttatcaatgtcaaacccacacgggaatagatgcttcaagtctctttcagtatgattaaaagtcctcaccgaatacgagttggcatgtgcttgaagctcggggagaaagtcttaactccttgatcatcttaagtcttcgaacatcatttattcttttatcagtcaagaatgttgcagtctttaagtgacaagcgtttttcaagatgtaaactgcaatatctctatcttgtggtctcccaaaatatgctgaccagttcaatatctttagactcgacaacaagcactcaagaacagaactcggttgattccagcaaacaatatcattacgctcatcatctatgagaccaagcagaagaattagattaaaaaccatattaggtaccagaaaaacaaaacattttttttttttattatcaaaacttactttcatttcaaagatgtctaatacttgtaggttaggagaacctttgagcaattggcccaaaagattcgacgaatcaaatgggcacatacatagtttcagatgttcaagatggttgaaaataaaaccatcaccatacaaataatcctgcccacaatattgaaatcattaactacggattctagctataaatgatattgaagtctcttaattgataaatgaaaactaacttacctctaaacaacatattgtgagatgcttgactgatgtgattgatccaataagagtcttgagatgattagaggattcaacatcgacatatgcttccctcagcttaggcatattagtccatgagtagtgttctggatcattccagtcctcaagtttcaaatactttaatgaaggagtatctatcttatacctattcaaattcgaattaccaaataaaaatagtgacaaactttgcaaagacgggatgattacagtgaactctcttaaattgtcattacaacaaaatcgtagagatagatcttcaagaacaggacaaccagatataagctgttgaagatattttccatctatgaaatacgactcagcttcaagttgcaaagtgattttagtcttggaatgataatcgatttgcagttcacgtacatagtgagaaactgcgatttcaatccaccttttgatatattcaggtttaatgtgtggattagaatttatgtggatacacaatctttctatgacgggagctctatgtattggcaacttcttgttgataaaatccacaattccaggccttgagtcccacggagaaacgaactcgagattaggcaaccacatccatagaaactcccatcgtttagacaaaacgcaagtggatacagcaacatatgttgggacaaacgatagtatcttcaccagcaagtcatcaggcaatccattgatgttgtccatatcttacaaattcaagtttctcttactgaatcttatggttgctttttctcttttttgttttgtttctcttactgacaaaagaaacaaaacaaaaaaggagaaaaaacaaccataagattcatagtaaacgaagtagtaataaaaggaaacacagccactgacataggaacagaacaaaactctagaagaaaaacatgtaaagcccaatgtaaacttgatttccttctctgcacacacataaaccctaatgatcgaaacctttagtgggctgggcttcatatggaactcctttttcatttttgttttctaaattgacgttttttattttatttttacatctttttcatttaaattacgttacacttttctattggtcgttacctcgttggtgtttagtagaagtaaaaattaacaaaagcgaattacatattgtttttttgtatagctttccattgatatttctctcaatgcattgctcgagtatcgtcaagctttgcactatcagggacttcattgaccagacaagctacgagagccaaggtaaatgaaaacatcatatgattcagttcaagtactcaacaaatacgagttggcatatgactgaagttcgtagagaaagtgccaactccttgatcatctgaaggtttggaacatcatgttcatctgtatcagccaagattgttgctgtctttaagtgacaagcgtttttcaggatataaaccgcaatatctctatcttgttgtctcccaaagtatcgtgaccacaataatgtttgtagactcgacaacaagcattcaggaacaaaattcggttgattccaggaaaccataccattacgctcatctgttccatgatcctataaccaagaagaagaataagattaaaaccatacttacttcatcagacaaacacgaaagagtttatatggcagaaacttactttcacaacagagatgtctaatattcgtaagttaggagaatctttgagtaactggccaaggagattcgacgactcctctttgcacacacataggttcagatgtttaagctggttgaaaacataaccatcatcaaacccatcctgcacacaataccaaaattattaacagagagttctataaatgagattggacaacgtgcagttgttaaatggaagaattacccccgaacatattgtaagatatctgaggatacaacatcgacatatgcttccctcaggttaggcatgttcattaaatacatagttttggaattcttgtttgtaactaaattatttcatggaagattcattcgattttctttgttaccaaacccgtaaacgaaaaaatacctatcaaaccccacaattgaaatattttatattaaaatttggaacaatctgacttagctggacaaacacgagatagctggaaaattagaattatgttctacacatgaaaacatcatataattcaatttcaagtcctcaacaaatacgagctggcaatgcttgaagcaactccttgatcatccgacgttgtgtaacaaaacgttcacatctatcagccaagattgttgtcttctttaagtgacgagcgtttttcagaatataaaccgcaatatctctatcttctggtctcccaaggtactgtggccacttgaaaatttgtagactcgacaacaagcattcaggaacagaacttggttgattccaaccatccaaactaatacccacatcatccacatgatcctaagaccaggcagaaaaataagattaaaaccatattgggcatcagacaaacaaaaaatagtttatatcgaagaaacttacttccattacagagatttctaatattcgtaagttaggagaatccttgagtaactggccaaggagactcggcgaatcccctctacacacacatagggtcagatgttcaagctggttgaaaacaaaaccatcaccatacccatcctggccacaataccaaaattattaacaaagagttctataatttagattgacaacctgcagttgatagaaatggaacctttgaacatattgtaagatgcttgacagatgtgattgattcaatgacactcttgggaagaaagcattttgcatcaacatatgcttccctcagcttaggcatattcttaatcaaagataagtgatcacaagaattccaatcctcaagtttcaaatattccaaagaaggagtatctatccaatacccatctaacaaccattcatcaggtatatagagtgataaactcagcaaagacgggacaacaatagttaactcttttgtattttcatagtcatcacaatacaccgatagatcttcaagaacaggacaaatagatagaagctcctgaagagattttccttctacaaatgacacattgtcaagtagcaaagttttcagagaagggagacaaaccatagagggaatatccctgagagtcacgcttcttagtttcaaggtcacgagcgatttgcaggcaaaaaagctactcaggaatatgttttcattctccgaaaaatgatcaatatcaagatcatgtacatggcgtgaaactgcaatttcaatccatcgtctgatatcttcaggtttaatatcagggctattagaatgaaaacgcaagctttctatgacgggagctctatgtaatggcagattcttgtggataaagtccctaagtccaacgtcaccgggctttctacaccaccgagaagtgtagtcgagattaggcaaccacatccaaagaaactcccatcgcttagacaaaatgctagtggatacagcaatatccgttggaacatacgataaaatcttcaccagcaaatcatcaggcaatccattgattttgtccatatcttaccagattcaagttactgttacagatacccgaatcttgtcttcccctgaaaatgaagagaatcaaaagaaaacaacaccataaggattcttcttaatcttagagtcgaatgttggacacacaggaacggatcaaacccctagaaactaccagtgagaaaacagaatcaaaagattaataagaaccctagaaattagcactacatagcatttccttacagtgtacaagaggaagtaggagatcagaagatatcggaatcgcagcgaatcgtatccatcgaagtccccaaatgacaaagcttcgagttcatcgtcgttacttcataattgtgtttagaattcgatcatagttgaatttgaatttgggttcataattgaatttgaatttgggttcataaaatcacaaatcgtttttttggaagatggtgaagcaaaacagtagtggaaggaagaaggaatacaggaggaagaaccaagccacgtgtttctatgttaaaaaaataaataaataaaattcattatttattttcaaatctggttttacttggttataattggggaaaaatgttgttttatacgcgaactttcaaaaagtgttcattttatacgtgaactcacgtcggccaaaataaacatgaaaaatacgttgatcagctattttaacagaaacaaaatgttgacctggccaaaatcccgagacgttaactcgcattaacagacccaattaaccccgttaacagcacgttagtgaactctgttaaagccgaacgatgtcgttttgttctaaacaaacaaaacaaaatccccaaatcgaaaactcaaaccctaagtcttcatcttccccaaatcgatttcttatatccaacttctcttaatctatcttctttgagcttgaaatctccaatttcatctataatttctctagatatgagttttaaatcgagttctaatgttcaagaaggagtaagtgggaaccgtggctttccttcaaaatcactgcgagagagatgtcgtcatccacacatcaagttcgaagaagaacccaggaagacccttcttccgttgtccaacatatcaagatgtaagtcgatttcaatctgttattttggtgtttgatccgtaaaacattgttgattcttttatgcaggaacatttgtttaagtgggttgaagattttgtttatgaagagattgtagatgcaataccgagaatcaacacgattggtagcgagataagcattgcgaaatccgaagttgcagttgagattgcagaattaaagggtttgatccaagaaatgaaggaagatgaaaggtggaacaaaatggaattgaagagatggaaatcgatgaccggtttgtgcttggtgtgcctttctctctcagtcattgcaattctgatcataatgttctataagaacaaaaaccggaagcttgttcttggttactaatcagtcctagtgtttacaaaccgaaagcttgtgtttgtaatgaaatccttgttcggctaatcagtcctaaattttttagtgatcaatcactttgaacctgccaagtgccaacacaaaatcacgagatgtttaattttaagtgatcaatctgtttaagaacctgcttagtagaacttgtgtcacaaagacaagtcaaatcacataatgaaatcgattcaggttcgtcatcctcctcctcttcaactctcactctttttcgttttcgaagcctctgtgataccggagcttcaactccgacagaagactctgctacaacaacagccggcaacgctagaactccaccatcaaactccatctccggtggagctcgaactccatctccggtttcagcttctcgtcgtggtggaataggagcaatgtcgacttcgccttccattgctaaggcaatcacaacaagattaatcgaagaacaaacacgattttaccaatgagagaattagggatttggtttgagagaattagggattttgagagaattagggattgagttttcgatttgggcgttttgatttgtttcgttaggtttgaaacgacggcgttttggtcttaacagaattcattaacgttctcttaacggggttaatcagcgagttaacgtctcgggattttggccaggtcaacgttttatttctgttaaaatggctggtcaacgtatttttcatgtttattttggccgacgtcagagttcacgtataaaatgaccactttttgaaagttcgcgtataaaacaacatttttcccattataattgggtttagtttcctcaagaaaatcggttaaatgaataataaaccgataaacccaagatcgtgggtttctaaatctataactattaattcgaaaaatttatactgtatattgaaatttttgttagggggagaaatagatagagaactatttttttgggatatataaatcgttttaatatgatattatagttctcgtagataaataaattgttttttccctaataatctaaatccatatattactttaattcctaagtttagaaatttaatagattttgtcgagaagaagaaaaaaaaatcaatacaacaataaaaaaacaatcgtttaagtgtttaacgtcttcttcttcttttcttttctgggtaaacactttcttcttcatcatcaaatttatcatcaaaatcaaactcaacatcacctttatattcgctattagcgaatccaacatcatcttcttcgtatatttaaaattatatatcaaaatctttgacatatgatgtttaaaatacaaatatatatattacttaccaacagtctatttaatacgctgcgaatatattgtatacttttatcatgtgatacactattaataagtatcctttttaataataaaaaaatctactaaaatttcctaccaattaaaatttttcaatcttcaaaaaaagaaaaatacttaccaaaaaaaaataacctagtcaacttaccaaatgatagtcttaagaaaatcttaattaaaaagaaaaacaaatcagataaacttctaaaaagaaaatccttgttaacacgcaccgtttggtatgttgactaatattcactgcgctgcgtagcattggatagtcgtctcttctaacacttaagtcttaggcggatgaataaaacagtctcttccttttgaatctcacagatctatctactatcgccattcttgcttcttccctcctccattgactaaggttaagccctatctctatgtaaatctctcaatcttcaaattgcttgtttcttgcttcttctttcttcgtaccttaagaacatttcactacttttgaaagatttgttgttcccgacgaagccttggtgtcgtttcatctccttcttcaaatttttaaaaatttctccagtttttgcttcgcgagtatatgctttaggtttcgaattgagtagattaagctcttgttcactgtttttgatttgtcaaatcttgaaccctagttttttcacaaattgattaacaatggatacgcaaggtaatcttggaagtttaattgtttatttaactgtgttcaaagttgaaaccctaattttctgggtatgcgaatcgggctgggattgaaattaatcgctctaggagctgagatttttcttagatttgagatattgattgcttgtttcttcattcttagcaattacgttaatcaaatgttgaattttgttgattctttgcttaacggatctaaaatcttgtgtggcttgatttggatatgattctttttggtcttgaatatagtgtttgtatatatttgtgttctatttaatgtgtatgttgtactctatttaatgtgtatcttgttattgcgtttctgatactgtcgtttcttattacagggtgttttttatgggtggtttgtgaaattgttttgaggatataaagatttcaattttgtttgaaaatggaaactgaggatgtgcttgacataccagcttcaagcaattttggctctgaagtaaagaaaaatagccttgaatctgggaatgggtcacctgaggctaattctttagttggtaatgatgagaatgtgaaaggaaatttagatttggatttaacagaagagaatttgagaattgtcggtggccaagagtctggggaaatactaacagagcaggttagtgatgtgttcaatgcgagtgtggaaagtgtggcggtagatgagaaattgggtatccaaaaggagacactagttcacagcaccactttggatgttagttgtatcctttcttttgctctactatattgaaggttgcttgctttccctgaccttttttttgtgataactgataagacatggcacttgatctgtttctgtaattatttgctgctcagacttgatgtctatcattatgttatcttctgatacgagactatggttaggttgattaggtcacggttaggacggtttaattaattagttttggtgttatgagtttctttcaatcatgggttttggaagtcttacttttagcattaggtttgatgttactttttacacaatgtattgtggcctaattctctaagagagagttgggttgaagggaagcttttgcttaaatcattcttatcttttacgtttatataaggttcatatcatcttcttctgtttttttccgtaattccttatgtcagctaaagcgggtgttaaaagaccccgaacatcgtatgacgaacagcagcctacagtccatgttacttataagcacttaacgaggttagaaaaaaagagtcatgactcaactacatgtaattttaaattgcatgaaatgctcaagcatttctgttattatgtgattcctagctttaccacattgttttaattgttagtgtactgcatctttcagagctagtaagcagaagctggaaagtttattacagaaatggtcagaatgggaggctgaaaatacgtccttggctcaggtatctcttaatggagaaggttatcttactctcaaaaatgttatttgtagcgaatataatagtgactattatcatctttcaatatttgatcaattaacattttgttaagagaatcattattagatatcgagtttaataagtgtgcaagaatatgatactagattatttatcatataaagtatctattatcatgctcatgcatgctgtagctctccaatattctatccttgctttagataggccttagccatattaatactgagatatcgactatttgttgatgtaaaacagaactagcatttactaaggtatgtttatcatagtccctaatactgaactcttttagtttatatgataagaattcatactttacatggggaaattgtttgttggctaggtttatattcgaataaagtttttgacttatcatatatgaaactttaaggtagaatcttttcattggttgtgtgctcaggatcaagaacaactattcgaatctggtgaagagacatgtttccccgccatacgtgttggattgcagaagacttcgtctgtggtgagtgaaaatgttgtcaacgctattaaaagttcttaactattcatatcagtaatcttcatgacatgccaattggtgcttttttgcatatgcagtcattctggatcgacaaccaaactggtcataagccgttggaagattttgttctagtggaaagtagcaccactcctctttatgaccgtaaatttgctataggtttaaattcagcagatggctcaagaaacgtggaagggtatattgaatctatatttgtaacaacttccacagatcctttaattctgctttgcttacatttgctgtagaataacttagcagtgaatgttataatggtcttgcaatgggtggtgcattcatgtaacagttaatgtaatttattgtttcaggggattggagattattgatgatgatcctccacgttgcttcaattgtggtggctatagtcattctctaagagaatgtccaaggccttttgatcgatcagcggttaatagtgctcggaagcttcagaaatctaaacgaaatcagaatagtagtgggccccgtctaccatcaagatattatcaaaaaactcaaactggaaagtatgatggcttgaaacccggcacacttgatgcagagactcgtcagcttctgaatctgggggtaattttgaaccttttctttctgtgtataggttcttaccaatatgctcgatttcagatttcttagatcattgctttccttttgtgaaggaactagaccctcctccgtggctaaacagaatgcgagaaattgggtacccaccaggatacttaggtaagctttctgctctgttttattagcattcatggacatggaaaagaagtggattttgttggtatcgcacaagagctaaactaaactagatgttctcacactttccattgtgtgcttatgtctctagctccagaagatgatcatttgtctggaataactatattcggagaagaggtggagactcgggaggagatagagagtgaggatggggaaattttggaaaaagcaaaccatcctccagagccacaaatgaaaaagaccgtcgagtttccgggaattaacgctcccttcccagaaaacgcagatgagtggctttgggaagctgcaccttcacataggaacagcagcagaagcggccgatggcaacaacaaaaaacaagcagaggacatgattacagagacgatggtccgctcggcgttgaaccatcaagttatcctccaaggtatggcagtagatatgattacgggtatggttcaaacgaatatggttctaggtcaagaagtccaggcatagatagatctttatccgaaagaagtaagagggattattcttcttacgatgctgacttccgggagagagatagagatagagacaggaacagggatagggatagagacagagactgggatagggacagggacagagactgcgatagagacagggacagggacgatcgtgattggtcttatagattaagcagcaggagataaattgtgagacttttagctgtgtatgtgtgtatgtggaggttagggttcaatttttttctacattctctctttccctctatgctgttgtatcatgtccatgaaagtggaagctttcttctagttatcagactttagatgttttagatttaatttcctcttccaagtttctttcgaagctttaaggttttactattttgggtatgtcttcacttcttaaaatggaaagttagttactcatgtttcttattagttgatgttttggaaatgtttacacaaagatataaacacattatttgtgaacattaatacatttatctttatccttttgtcgttttcgatacaaacaaaagcctaaacagctaaaagattgaaaacgatttagaaagatagagatgtgacagaagaagagagcatattgaatatacaaagagcaatctgaccaaactcaaacaatttgtgattctcatcaccaataggagacgtccacgtcgtcacacctccaccaccaccgtcaccgtcgtctctttccctgaatccattctcacaagtcacggcggattccatggcggcgcttaccatcacattaaccgtacctaactctttccttgtaataaaaactctcactgcctcctccaatctatccgtcgcgtcctcgtaaagctcgaggcagtcacggaggcaagcactgcggaaactaccgtcgtcgtcgcttataagaagctgttgaatggtggaagctgttgcggtggcgttgtcgagagcttggagcattggaacaagggcaagagaagaaagattggtcggagaaggaagagctattggagagttgttgagagaggagacacagaagttgtaatcgaagatcgtggatttggctgcgcaagatttgcaggtttggtcgatcatatcggacgttgactttacttgtgagacaaggaagaataagaagataatgtagaagacttgagagagcttcattgtttttctagttatgagattcttcttaattcttttgtttggttgatatatagagagatgaatgtatacgtacgacgtcgtttgcgttgtgggaatatttgactatttaagatggttgagttgttgttcaaaaaaaaaaaagatggttgagtaaagtgtcatcaacaatgggttttcacttgcttctactctaatacaaatgtattcctcaagcaatataattagttcggtattatgagaacattctgcgttaaatacttaaatgcaatttagaagaaaattaaagaagttgtcaaatgtcattattgcatggacagttacttttgaaaattgattgcaaattcaaagtgaaaaatttgcttcaaattttattctaggttagttaagtttcaattggaagatagtaccgttctttacgtttacatttttctccatttcaaatatacgtataaacttaatacgccaatttagacaaatgtaaatgtttgattttattttggagtatttctttagttccgatttagacaaatgtaaatgtctcattttaatacgaaattataattaaaattatccaatcagtactctatttctaattcagtaatagtgatccaaatatatactataactctccatttattattgactgtgaaccaaaaaaaattccaactaactgtgaacaatttgattttcattttgtaacggattttacaacaaaatcgacaagctcctcaagaatctactttacttaggcaatatgttaactgttaaattaaatgggatactttcttaaattatttagttattttagttcaaacttatattgaaatgaacttcaaatttaaaggaaaaactacattgtttatatcttttgttcctccagtgttaatgttgttggaatcattttgtacgaaaaaataatcaatttttgtaacaaatattttggttcaccacaaatataccaaaattttgtaatagaaagatttaaaaaatagtttgtttacttctataatacatacatttcatagttactcaaaaaaaaaaattatattaataaattgacatttttcccaagtttataaggtatcatgtattcgagtttgaagatcagcaaagatgtgtattttaattgagatattatataaaaatactgaatacatccaaaaaagtatcttcccacatttctcattctttcatttatttgtgcatcttctacttaattactatttctctcatatagtttcctcgttaggtcatacattgaggatagttatggatgacttgcttcacaatgaacaagtcatggtctgtttgcattgttgacaatgacatagttgctcggcagtagttaatattacttgtgtcaccgtagaccattttatagagcataaataatgccatagtatccatagatgaaaaaaaataaagtataattattttttaccgtctctcaattgtatacttgtcgatagtgacgcaagtaatgtgaatctcaatcttatggtctcgtcgaaactgctggagatgactctatgaaaggtcgtggtcatgtcctctctttctcggtcgtaagagaacaaattatttgtttaagctgtatatttgttgtttgcggtcctaacaagctaatctagctaggtcctaaaacaaaatatttgtttaagctgtatatgtcatatgatcaattttattggtgtgcatttgaatctaagttatagaaaaagagcgtatatcattggataatgtgttacttgaatagtgatgactatgttcgattgaaaggcatttaaaaagaggaaagtgaagggcattctatttctctaccattgcaatgcatgcatcggagtatgcaggacatgcatgaatgaacataatgtatgcaggacatgcatgaatgaacataatctagctttgatcactttgtatcatgttgatcttggtccccactctgagactttaagaatgaaacagaggaacctgaagtttattcagtggcaatttctttgtagaatgtgtaaatgatacaattgcataccagttggttaactctatgtatataatcgaaatttcacctgattctcttatcatactcattggttagctaccaattttgccataaattaaagacatttcctttttttttatccgattaagatttataaaaagacatgagtttgttggacttaaaactacaaatacaaaacatagaaacagaacacaaatattatcattaaaccaaactgatgaagcagagaaccagtttgagttcgatcaatttccctcatacatatatggaaaactgatcgaggtcaaaccagatcattcattacattgctagaacaaataaatctctaatagaatcaatacatacagataacaaagagaagttgatttgaaaactgcagagagattatcttcaaactgctgcaatagtgtttgcaaagtcattgaaacaatcagagaatcgtagattatctccatccaaacatctctgaaacaccaaatctgcatcttcaaggctttgaaaataagaaaacggatttgtatccaccgagacttgatcatcaacaccaacatcgttcaaaatacttgcactagtcgtctcctgatgagtagtgttgtccgaaaaccaatcatctatcgagctttcaaaaggggtgttgaagtcaatgagttgatcaatagccatgtcttgattgtaatataggttaacttcaggtaaagcagcgttgttgttgttgttgttgttattatccgtaacacaaaaagtttcacaaatcgagagaatctgatcttgttcttcagtgatttcattgaaaatttcaggtgatttatcagggacgcaacagattgcagaactactggactgaatatctagggtttgatttggctcttgagtaatatcgttgagattttcagggatgcaacaaactgcagaagcggactgaaaaattagggtttgatcttgagttccgtgaacatcgctcttctcattcttcttcaagtccttgtgatcgttaacgcaagcttcatccgcacgcaactccttgagattactcaacagagtccacatggaaccgatcgcttcactaatctcttgaggattctccgatctcacaaggctctcgtcattccaccaaaaccctaaccctagattcttgcgagtcaaacagataccaacgtcctccctcgtctctttgttatccttcggagccgaaacaggacgttttccggagagaaaagcagagacaacggcatcaacagaggagtgaccgaaagagtagaaagagacgtcggattcagaagaaggaggagtcgctaagatagcgatttgtgcgtcggagagaagacaaagctgagaggctttgctatagagacctttacggcgtttggtgcaggtaaccctaagggaatctctcttctgtatcgtctcaatcgcaatctttctcttcgtgcctttcaccattctgattgatttttttctcaattttcagataattgaagtgaaggcttcttctatctctcagtctcatatatataagggactatcgaatctcatatgaaaaaggaaatatcgaaaccccatatcatcctccttaaccgattaaaccacatggaccgtaatatgggctaagcctaaccatccaccagaatccccttttttttttttttttcatcctttcttatttgcttatgtacaagcataacattattgatgataaattattcaaagatggacaagaatagatatataatttcaactatgctctatggaccttcgccacacaaaaacaaaaaaaaacaaaaaaagaattacctaagactctttttaatagtttaaaaacaaaatttataaaataactaaattttgcctccaaattatttatattactattaattttataaacaaatttagtatttatttattagtgtagtatttaattagaacgttagataatttatttatttttattttgataatttttagttattttcttatcattcatatttatttagcgatatttttagttattttgttttataattattttcttagattctacaaaaaaaaaattgtcagattattatgagagacacaaacaaatatatagttggttcttcacattatcgtgtttattctttctaatcacaagatcaacaatgtagtatcactcttaaaatgtgattatgaagttaacaaagcttacatggtagcagaagaaaacattgttaacgaccggaagacttacactttgccacactttctttatttttcataacaaagagatacttttggagaatttcatcttttttactattcaatattaatcaatactgttttgcctctgaaataaaaatctatgggtgtgtgtcattgtaattctctcaaaataaaaataaaaataggcaaagtagacataaacaaaagatctttactctaatcagttttgtgagtgacacaaagctccatttttttacccttaaatcaaattactaataataattaaaaaatcttataaaaataatatttctggcaaatcactctggttgacctcaaactcaaagtcgagtaattgccgatctaaaacacagggggtgattcagaaatccccaaaattcgactaaaaactaaaaccctagccctaattcatcctgattttgatcgccgtataaaagactcgcattttctgggcttagtatggcggttccggtgctgggtggatttccgatcttcatggtagtgagagttttgggtttcatcatcgcggctttggttttgacatggactgttcattacagaggaggcttagctctttcttctgataacaaagatcacatctttaatgtaattctctcgattgttgttttgactcacatgtgaaatggattggatgaaatgttcttgttgctgtatctgagattcatatttcttgattgtgttgttgagatattgaaatttggattttacttttctgtgtgatcacaagctatgatctgagactcatatttggatgtataatgtcatcattggtagatatatatctgatgatgtcaaatgtctttgtttttaggttcatccagtgatgatggtgattggactcatactcttcaatggagaaggtaagcaaacaatctccttcacatgttaagagtttgtagtatattaccgtcttaacttcatattttagacttcaaatttgtagtatattaccgtctggcgactattctaatgtcaagaggttttagtattcgttgtatcggttttcatgttcgatttccgcatacttcatttgtcaaagagactgaactgttgaattgccctttttaacatttgagtacattgaaattttatgtcaagaggtttaggactcataggattagttttttttgtttttagttacggcattgttaattcggtaaagagaccatggacatgttttcgtttctaacatgaacggtaccttcaacttatgcagctatgttagcatataagtcagttcaaggtacaaagaacttgaaaaaactggttcatcttacactacaactcacagcatttattctaagcctgatcggagtgtgggctgctctcaagttccatattgacaaagggatcgaaaatttctacagtctccattcgtggctcggccttgcttgcctctttctctttgcattccaggtacactctctgttctgacttgttttaaaataacaatctccattactcagtaagaataaatatcaagaactcactcaaatctattgttacaaacagtgggctgcagggtttgtgacttattggtacccgggtggttcaagaaacagcagagccagtttgatgccatggcatgtgttcttagggatttccatatatgcattggcgttggtgactgcaaccacagggatacttgagaaggtgacgttcctgcaagtgaatcaagtgataactcggtattccacagaggcaatgttagtcaacacaatgggcgttctaatccttattcttggcggtttcgtgatactcggtgtggttactccggtcagtggcaaggatcaagttctcacacaatagagtaaaccctcgaaaagatctctttcaacatttcgacctatcgaaacattgtttatttaagagacaatttgtgatgtaattgagtctttttgaactgatttaacgagcagtgcatatatgactgtaatacaagtaaagcatgagaacacgtgtaaccaatgttgaagactgaacccaacaaaaattggcatagaatctgagaaagatttgtatcaacctccatgagaagggagagtaagagaagcctcactcatacatcacagacaaagaaaaacatcaccgatatcgataaaatcttcccggagaggcggatgatgaatcgcactcttcacagagtcaaaagtttctaaaaacaagtcaaggccaaaaaaaatgaacccggtactcaggaaaagaagcggatgaggggaggcagtgccggtagttattctatctgggttgtgatgagaagagcctgagctagaggagggggttggagaagaagagctttcgcaaaaatgagctttgcttagacaagcaagtgttctttctgatattctctcacgatgacaggcacacttgtgggaggtacctgaaaacgaaaacattgcgttcaatggtttgagattctgaataagtggagaaactgtattttataggtctgagacttcaggaacctaatgctatgtttttaagagacgatggttaatcttaccatgccataatctgtgattatcatggaaatgtaatctgaaggtgtagcatcatacctgtcattagaaaaatcacaaacgagtttagtggcagagaggattagtattaacagaacatagtttcacttctccgataaacacaagcttacatcaagttcaaaaactgcaggtttgcgttgttggtcaagccatctaaatagtttatgtcttctcttccatgaacttctgaaatagcatttggatcacctaaaggtaaagaagcaagaaacccaatgtaaggtaaaacaaaatcaaaggcggtataagatgatactgatatcgagagaagatattgcataccaagctcattggaacatattgaatccaattgcaccctctcatggaacttgtaggcttcgcaacatacaagcacaggaacacggaatgcatttgcaaccattgcaacacaagcagtcccaacccttgaataaactgttccgttagacaaaactgacgaggcgcccaaaaacactttggtgacttcatgcatgatatatgaaatggcatttatatgagtgtatgtacagttaatgcctcgtttgatcaatctacgaagcagtagctgcccttcaagctttggacgagaatccaccaccaagactcgaaactttttcctgagttcatgtgcatgtaatattaccatctcaacagcagtgggagatccgtaggtcagaaggacatcaccgtctcttattttagtaacagcatgtttgactatcaccgtatctgccactatgatcttctcgttaatgaaccgttcaatatctgactgaagagtagcttttgcttcagattcagaaagtgttataggcagctttgcaatcctgtttttcacaaatcgtattgcgtttcccatgctaatcgaaagcggacggcattctatgaggaaggagacgtagctacttattttcgcagtcatgtccctgttaagagacttctcaggcggtgttgaataatctttgacaacctcttggaatgcttggagcatcgcaatacacctggcattgccaccagagatatccccagaaagatattgaagaccaacctgataccacaacaactgatactcattcagtatacaagtaacattcatcttaatgaagcaatataaaccactcattagaacaaacggttccttgttttaacaaagagattattaatagtttattagaagcaccaaccagataaattcaagagaaaacaaataccttgtacacagcaggatgcatagggtcaagttggaagaacttagtctcgagatcaggaagttgagtgccatgctcatactgaggcaaatgcctaaatagctcaaccctgtttttagcctcggtctgttttacaacagcacgtcttttagccttcacgactctactctcatcatcatactgcatgcggggatgaggagcatctttctttctatctttttcagatggacctcccttcttctcagctgctccagtagcaacagcaacatcattcttctgagatgtagccttcgctggtttagcagctttaacacttgttgaagccaccgaggctgaggacactggtgccaccttcccaccatcagctgatatagcacagtattacacagactgattaagatattgcaaaatacacaacgataacacaacagagcaaccagcatatcaaatctctgtactaagctgacgaatcattcattgcgataaaaccacacattggtttaaatcaaaaatgcaccttttgcagcagctttagcagctctttgagcttcttgaatagctcgtctctcagctttagtggttttctctttcaatggcttcttctggtcactctgcacctccattccactagccttctctgcaattatataacattgtgaatacattagcctcatatatcctaaagaacaaatttcaaaatcaatcaaattatgattccacaagatcaaaagtgagagtaccagaaagtccaggaggcatggtaacgacggagacagtggttaaaccactagcaggaacactactagatttagcagcagccatagaatccatcccaataccaggcagcgaagaagcaacaggaacagatgattttacgaaactacccctggaatggcgtccaggagacgccgtcgttgatccatcagggaaatcacggcgacttgagtaagaaaacgaagaaggagacacggctgacgcagcagcaccagcgacagcgactcgaagagggaaagtatcagaggaattgagacgaggaggaggaatcatgacgggggagagtgagttaccggaaggagaaatggtggaagaagaagaagaagcagaggtagcagcgatcgggtcgggttgttgttgttgagttgatgaatcgggttgagatgatgtgaagaaaccgacttgtcggacctttggatctactacggcgcgagggttccgacgagactccatcgcgtcggaggagaagaagctctggattttttctcggtgaagacggaattattaattttggggatcgaatttaatttttgttttcccagacgaataaaacgtagaatagggtttttatttttatttatttactttttcagatttatccgatgttaacagtccagtccgagtcactaaaacaatcttactttgttcttttgtttttgttttgtttagagtattaatccatatgcaatttatttattctaatagaatctagtatccaaggttttggtgtcagtaacataataatgaaataggagcataatcttatttaaataactaagcaagtccaacaaattgtgaactgagagagataagaactgaaacacagttcatatgttttatcatgttcagagcaaaggagacacagtatagagaagagatcaaacaacaagtagattcttttagggctggtggaaattcataacatgatcttactcagattaaaaagcatatgagacctgacgaaggaaatactttgatggtggtgactacatgaaacttggggaagctgggcctttggagagaccaagccgaacttccatcccgtggtgaaagtctactggtttcagcgtctcggattcgcgaggatctgtagattatacaccattcatcgtcagaacaatataaattgtgaaactaagagaattaaaaagtttaaacatttttctcttatatactgaaccaaaagttcaactttggttacacaatgtaagtaagtagtatgtgacagtcaatttttgagcaatgctcgatgatttgtgacagtctaactggaacaaaggtttgtcactgtctattggtgttttggagtggaacaatctacaaagtagagactagtaagcgaaacgaaataaacaagttgagacacttttctattatatgctaaacaaagagttaaactctatgcaaggatgaggatgatttggttacacaatgcaagcagtatgtgacggtcatgttttgagaaatgctcaaagattgtaggaatagaaaactctaatgcacaaccaaatgggaaaactggtgtaaaacaattaccattcaagtaatcctcaaaaccaaaattatctagagctcctgtgtagacttcaaggccaagcattgatgaaggaattggtccaggaggtctctgaaacctgaatactccacataaaaagatatacaataaatattcaattcaccaataaatattcaatgaagaagaggctgctctatgcgtttatggttctgaattcaatctacatattgctactaatttaagagtatccactacgcgtttatggttctgcaaatctaattctaagtagcactacacgattatgattccgaattttcgatataatcattatgatgattcatatacacatttgtactaacaatatttcaaaattcagaacagcaattgacctaatcaagatagattactagcattaggaaaccatatttcaatcttaacagtattctataaagcctaaggaagattctcatacattctcatacctaataatcagtgtaattcagaatttcatatgctacagatttaaagatccataccgagaaaggatttgtctatcaagatccatcttcaaaggaagagcagctccataagtatgcgtgatcactctcctcttcatttcttcttgtgattgcttcccctgaaatcacaataaacaagtttatagaaaggaaaaaaaaaaactaatttcagaaaccccgtcaaaaaatcccaattctcaaatttctgaatcaacacgaagcttattcatcaacaccctaagttccttaattagcctaattttctaattcctcaatatcaataaaaaaaaaaaaaaagattgtgaagtgattgattacagattcgtaagccgtttcgagaggatgagatctaaggatatcgctcttaacgccgtgaagaccaaagcgaagagcatcgttcttcatacctccgatctcatgagctatcttcttctgcgactccatctctcctcttcctcttcgtttttttttcctccgccgttctacttttaactttctcggcgactttctgggcaagcaagcaaggcaaaagtttcagagaaagaagaaggaatgattttgcttaagtttagtagaatgaattttatgtaaagctcaaactcaaggcccatttgggcttttcttatttgtaagcccataaaactcttttttctgtcgcatatttctttcctaaccttttttctttcttacaacacatttttcttttctaacttatgtgcttaatttgatactttttttaaggctttagtttggtaatttaaaacaaactaatatattttgtattgttcaccaagatatgaataatatacagtatatgtattttgtttactcaaatcaaaattactctagaacacgttgcaatcgtagcttgtccccttccgaccgtattaccattcgacaaggctagttccaattcccatttctgtaaatagtatgaactttttatacataggataattatatagaattgatttacaagaccaaaataacattgactgaaaacgtcgccgtatacatgattgtctatgttcaagaggtagaagatacagagttggtggagaggttggaaatcagtcttacttcatagagattctcactttctcctttaccttcaaagcaaaacaacaataataattttttaagaaccgagaacaagaaattcataaacatgaatggagaattgattcactacttaccgacttctgccgtgatgtttggtccaaagaaggaagtgaatttcgcctatcaaaacaaaatttttatgcttagttccagctttatgttttgctacttcttaaaaactagatttgataaaaccaacgctacttaagctattttcttatgcgccaagctgatttgttagtagtatatgaatctaactcttacctgtcttttttcaaaatctgacaacgtcagagctttggcctcaaatacaaggaccacacagtaccgaccatcggtcaggacctacagacatgatgagttatcaaaaatgatccgtttaagtttagtttcaccagtcaatatccatgtcatatgcaagtaaaaattgagttatatattttgatgattcatgtaaataatatgatgtaaagtcatgcgcgtgaagaaatgtacctcttcccttatcagctgtaagataggtgcactacgtctcgggattcctcctcccttatgaccaaaacagtcgaaagaaagagaggttaaagcggaagtacaagaagcgtgtgttgtgcttcattttgttttcgtgcttcattttgtttcaacaaaatagcttaccagcccatattgaaagattcgttttagtgcttcttccaaatgttgttcatctccataacggtatctcgtgacatcatttctaacctaataaaagaaagaagaaggcacattaacaattcacgagaagtaaatttaaaatcctatgtgcactgacaaaactacgatgtgatgtcatatagggaaactaaactgagcaagactttctgcaaaagaacctatgatactgaaatcaagctagtgtttagattgaatttcgaaatactaatgacgaaaactactaacaccccttcctcttatcagaaacataaatatgttttaggaaattaatgtaacaaagacgagctgaagaacaactaaaatcagattgaaggtactccggtcagtcgagagtaaccagaaccactacgtacctgcgttaaaataggagtagcacagctttctctaagcttcaccgcatccgaatagctcaagcaaggaactggtttgagttctgcgtactgcaaaggaagcaaaacccatcctcagggactaaaacaattaaccattccgaaaactcaaagaaagaaatgagtaactctaatacaaaagtcaattttctcagtaattttacagttatccgaaacattccactttctcaaggacatgatagtgagaaagataactaaagagcataaagagcataccttaagagccattccgataatagaaaggggaaatccatatgttagcattatagcagaccactcagttccaggaaggatagtaaaataggccccaaaaccatacctgttaaacagatccataatgctaaacctcacatatacccatagcaacaaagaaggcaagagaaaactcacgagagtagcgaaaccccgagacctagcccaataacaccaaatgaaatctgcaatgcaaaacatatggaaaaaatttcagtgtccaaaattattccaacgcacattcaataccacctataaactatgagttgcatacatcaaatccttcctaattctcaatttcagaccactaataatcgaatctacctacttggagagacactatacttttaccataaatctcacacagttcacaaaattggacaaggcaatgactgattcaggaatagttaattatataaacacaatgaatttgaagaaactctttaattagggatttaaaaccttggctaaagtgaattcatcatcaggaattaaggttctatcaccggaagctactgatggagaagagctcgtggaatcagcagctcttccgacgacatcgagctttaaaacctctcttttcaacctcgtctcgggaatataaagccatctctgctttggcatcagagacggttgtgaggacgaaacgacggatagattctcatggcgacgaccgcaaagatctagccgccgactggagaataagacggtggttcccggagctaccgttatagatcccattttcttcctcttctcttctctctctgtgtatcttttgtgagagtagtaatgtgaggctgaggtaaagaagtgtatcggccgccaaaattctggccacggttcacctattctaaattcggtctactaaacccggtcaacaatcaaaatcaattggcggttcggattctattgactatggaaagttgaaccggtttttccttaagcaaagacgtgagccggttttggaaatttctttataaagaccgatccttgaagttctctgcaaagttggagaagaagcggtacacgatgcagtcgcaaacgaaccctaatccgtcacttcccgatgatttgatattgagctgcgtcgcacgggtctcaagattgtattatccggctctctccctcgtctccaagagctttcgatctctcatagcttcaccggagctttacaagacccgatcactcttggaccgcacggagagttgtctctatgtgtgcttaaagttaaatccttaagatgagaaaccgaggtggtttactcttttccgtaaacatactggaaccctaaagtcaagtgggtatgttttggctacagtcccatttccacatactcctcttgagtcatcttcttcgagcattgtgtcggtttgttctagtatctacaacattggcggatatgaattgccttcctctagcgtctagattctgtattgcacgtctaacacgtggcacgagggccctaggttgcgggtgaagctaatgtcatgtactgcttgcgttcttgatgaaaagatatatgtatcaggaagatgcaaagatggcgactccatgacgttccaagtgtttgacacaaatacacaaacttgggatcctttgtctgtcccttgcagcgagacaaaacacgactttcactacaaaatcgtaaggtttgacggaaaattgcacctggtgagctacaaaggtgtggatgcttacaattccaaggaaggtagatgggacctggttacaccaagcatagaacataataagtatttatatgattgttatcgcaatatagggaatgtttggtacactattgtaaaaggagatatctcaacgtccgtatggtggtatcacagtgaggaaagagagtggagagacttgaagggtatggtaggattacctaagttccctattgatgcttgtcttagaatggttgattatggtgggaagatggcagttttgtgggacgactatttgcctgggcgccgaaagaagatgatttggtgtgcggagattgcgcttgaaagacgcggaagtttggaaatatggggaaaagttgaatggtttgctcatgtgcttacagtccctagacaatatgaattcgtcaaggttcttgctgctactctttgatgaatgcgttacgagccttgaaactatgattttgtcccttgtttcacttctaattaatttatgtcacttattgattgataagcataattctttaccataaaagaaatccgacattacaaaaactgaatatacaatatcataataagaaatatagaatacatacataaattcttaaaactaactcacatctcacaactataaggatcgtttcatacctagagatttcgagtgatcattattagcatacaaatagagcctttttggttgttcataaatgaagctatcaacaactcactactcaatgcttaaccaaacaaaacatacaaaacaaataaccggttctccccttaaccaaaggcattaaccggttttaatccctctatatataaagtccaaccctaaatttgttttctccaagttcaacagccattttcgtctcttaaactcatccaatgtcgtccccggaaaagttttcgccagcgccggaatcgaactcaaatccgtcacttcccgatgctttgataataagctgcatcgcacgagtctcaagattgtattatccgattctctcctttgtctccaagagctttcgatctctcctagcttcaccggagctttacaaggaacggtcactcttgaaccgcaccgagggttgtctatatgtatgcttatacttaaatccttttgagagccctagctggtttactctctgcttgaaacctgatcaagccctatcttctgaaacaagtaataagaagaagtcaagtgggtatgttttggctacagtatcaattccacatcctcgtcttgtgcaacgttccagtctcgtggcggttggttctaatatctacaacattggcagatccatatcaccttactctagtgtctcgatttttgattgccggtctcacacgtggcgcgaggctccaagcttgccagtggagctagttgaagtttctgctggcgtccttgacggaaagatatatgtagccggaagttgcaaagatggagattctcttaacttgaagaacactttcgaggtgttcgacacaaaaacacaagtttgggatcatgtacctatcccttacaacgaaacaaaacacaacatttactccaaaagcttatgtattgacgaaaagtggtatgtaggggctaagagaaaggtggtttcttacaatcccaagaaaggtatatgggaccttgttgaatcagagatgtgtagttataagtcttcatatgattattgtgagatagagaacgttttgtactctgtcgaaaaaacatggcgtggcactgttttcagatggtatgacactgagctaggacggtggagaaagttggagggtttggtagaacaactacctattattcttgcttgtcctagattagctaattttggtggaaagatggcggttttgtggaaggagaatatgacttatagtgggtctaataagatgctctggtgtgcagtgattacgcttgaaaggcgcaaaaaacgtgaaatttggggaaaagttgagtggtttgatcatgtgcttacagtccctctaacatatgttttcgaaaatgttcttgttgctaccatttgatgaatgtgtgtggtgtatatgcatgcaaccatgatgtataactctttctattgtttcacttctaatcatttaatgccactggttgattatagaatctgttcactttttcagaaatttataaaaccctacaaacaactcataattatcaagagtgtttcatgatgttttggttgttcataaataaggttcattatcaaaccgttccttgtaaataggaattcatgatgttttcttgtagtgcgcatatgtactcaatgaatgtgtagtgctccaaaagatggtatgacactgagctaagacggcggagaaattggagggtttggtaggactacctaggttctctcttcatgcttgtgttagattggctgaatatggtggaaagatggcggttttgtgggagcagaatatgccttatagtgggactggtgacagaggcggtaagaagatgatttggtgtgcggtgattacgcttgaaaggcgcaaaaatagtggaatttggggaaacgttgagtggtttgctcatgtgcttacagttcctaaaacatttgttttccaaaagtttcttgctgctactgtctaatgaatgcgtatgaatgacctcgtctcttgtttcactttctagccatgtccacttgttgatgactaagcttatcttttgaccaaaaaaaagcagtccgccattacaaaatttgaaaatacaatatcaaaacaagaatgatagaatctgtttgttcacttttcagaaattcttgaaacttacaaacaactgataaactatcaaagatcgttccatagtttcgagaatccgaatgaacattagtatacaaacagagctttttggtttgttcataaatcaatactcaatgcgaatcacattaccaaagagttttgagtcagccttttacctctttgcatatcagagtcatgttcttatgtgctcgcggccaaagagaatcatcatcactaagtaataatagtacttgcattcttttgtgcttgaacccgtttcatcctacaaaacataggattcaaaagaagaattgagatgcaacgcagaatatgccaaatccatgaacaaactcgcatcgactgatgtacagttccatgcaaagaagtagattatttctatcactaaacaattcaaaagtatgtactttccagtgcagcatcaattactcataccgcaaaacatactcagaagaagaaatgagatgcgaagcaggaaatacaaactcatgaacaaattaacgttgatcaaagttcaagaaaagcaaaatacagttccatgcaaagaaagtaatcttcttcttccaaagaatagtttcaagtgatgaataactaacttatactgctaatctgtggaaagatggtttagttgcgggttttatatagatgtggtttgagattaatcaagcagttttaacctctaaatagtttccattcataaattccttgagcttaagatagaaataaaatgattcaccttatgaaagagatgtatttctctatctctggtttttgctcagagctgaaggaaaaccatttttcatgaggacatacttcattccagcttcctaaatctgcatacaaacaaaggatagagattattattactatactctcgtgaaaacaaacaaagagtttgtaaaatatttcacaccttgaagcaaaatgttttgctcatcattgtaagacttcaatctccagaatataagaccattgtcatccaattcgaccgggttggttctaacagcatcatcacttccttgactctctgcaaacacgatacaacacttaagaagcctataatcatgatcatggaaccataaagaatcaaaggagtcgagatttgtacttttagatagcatgtctattgcgttttgcatttcagaataaacttcttgagtttctgcatttatccgcgatacaatcgcatcatgttctgttatcaacaatggaatcccgtttttggcttttacggcttgagccaactcatcttgcaatttctgcttcagctgtttctcctacaacagaatggttttagaatgaatcaagtgttttcaaagtttacttgtaaagacttgttagattttagagttaccttatcttttgcagcattgatcttttcttttgcttcttttttcctttcaacagattcaatattttggctatcaatgcaattcctcatcaccctgaaaatgttatcgcaatatgtaaaccctcaagtaccttaaatcaaagatagtagttgattcagtataactattacttacaatgtgccaagcgtttcatcgcataagaaattcaaaagcttaagcctttttgatgaattcaacttctcatactgagaaatgcctttttcaaacatttcaggagggaaatcatctagctttacttctgattccgagagacattctccaatcgtagtgaaccaactaggatcagttgcactcaggcaaacggatctatattattttaaaatggaaatgaatcagacatgcatcatcagagaaggaagctgacagaaaacataatactttttaagaaaacttattcttacgtttctcctctatcctctaatatcacagtaagtagttggattatcatctgtgtgagagtggaatattgttgtcttcttttgcttctcccagataacatttcgcgtataacacattcagcttgtcctttcctcaaatcaagtgcctgtcatagaaagtcaaatgaagcaggtaaggacccattaacaaacctttcaaacatgtgatcaatcattcaaactgtgcttagggatagaggataccttcccaaaagctgaacaaaactccaaaaactgaaatacatttccagcatcttcaggagccaagtcaatgcctgaaacagtaattgagatattgccctgaggtattttaatctcaacctgatcctcctctttctttttgagagcaggtttaattcttttgattttctccgctacattgttttccttgataccttttgctgtagtctctgcatcagaaaacattcatgtgttagtctcttttcaatgatagtactcagatttgcaagggcacatataagataaactcctctcactcttcttttttccttctgccaatactttcttgataacttctgttgtcgcatgaacggaatcagaaagcttgatcttctttggattactctttttcaccacaacattctcattgctgcagccgttgtttatatccttgagctcttcccgtttagtttttctcgattttttaatactaacatgtttttgttcaatagaattctcctggtcaagtttcagtggtgaaactacaacaacaccttcctgcaaacactaccatttaatcaaaataggcacacaataatactcaaaagttaagatccacaatacaaggatcatcctagaacatagcacgtaccggtttcaccttctttgtataaaaatatttgtcagaaccactagttttaagaagctctgagacagaagagaagccagtctttttagcagtgtgtactaatatcccggtaggcttttggcctcgtttcttcctaaaaataacaaaattagctctaaaacaacataaaccttgcaaattgaatgattttgaacttacatgcagtagctacagttgcagtttcctctacacttgggacaaatccaatccttcttcaacgcaacctcttgtgcgttctccccatacctataacatcaaacaagaatcaatatcccaatcacacgagcttatacatttctctataacacaaaaaaaatctcaaaacatcaaatcaaacctgttcaatatgcacttggtgcataacttaataggacaagtcttgtctttcttcttggtcacgcaggatccaacaagatccgttctcttttgtcgacactacaaacacaagaccattaacattaattcaataccacaacagatctctagttaaaggtaaccatgaatacacaaaatcagatcactatggttaacaaatttgtaaaaattgagtaaaacccagaatttgacgagtgcccatttatcaatttcagcttaatttcaaaacccagacgaacataaccctaaagaaaacgcctaaattcgaaaattttcaattttcaaaatctcactattgtcaaaattaagtaaaagccagaatttgacgagtgcccatatttcaatttcagcttaatttcaaaacccagaagaacaaaaccctaaagaaaacaccaaaattcgaaaattttcaattttaaaattctcactattgaagcaataactaagtgtttactggaattcatacaaatcaaattcaataccataatagatctcgagttataagcaactatgaatacacaaaatcggatcaatttcaccataaattcaaatcccaatttgataaaaatgaaagaaagaaaaaaatctcacttggtgacaagtctttccgttggtggaatcttcgatccttgatacaccaccgccaggatttggtgtttgttgttgggtctgattcttactcaccaccgccataaccaaagtctcaacaaaagcaaccaaaaaaaaattgatttgattcggaaaattagtttatgggtatctgagtttttgtttatcactggactcgagttttatgcttcttcttctttggaaggagtgagaaatctcgaaagaaagagagaaatccaaaagtttttgatttgatttttccctcgctaccgaaaattttgagcgggcgagaatttcgattttaacgattttcaggcgttgtcgtatttttttttgttttctatcttatggatgtagaagttgttttccataaatacagtaaaatcggcaaattagaatcttttaatcaaattgatatagtaaaacctttataaattaataaaaattgtgttatggaatcatcgtagtatcatctatattttttttataaaataaccaaacaaatatgttgaaattttacattctgaattttatcatttgcatttcgatagtcatataagcagctaaaaaatacaacaattgaggccctcaataataaatttcaattttatttcatttgtataagtgaactttcttgtctttcatatttattttcaaaatactgttttttcttctaaatattaaagtataatggtttaaacattactaatttatagagattttattttataagttatttttggtgcgatacaacttttattttctctaacatatatattatttttttgcgatatacagtaaaataaatataaattattatttaataattaatcaacatgttaaaataataaattatcctggtcttgactcacgttaatataatttatgatgttatagtgaccatatttttacatagttttcaaaaacaaaacaaattataatgttatcgaattttgttaatttttacatgataagataatatatataatggtttagggtttttaaatattaaatttttgttagagtttgtctaaaacttttttttgtatcaaatagatattttgattctaacatttatcatatcaaataattgtttttttctcacaccaaataattgttatgttgtatttttaaaatatcatattgaagtacttttttttgtgaaaaaaaagtactttttctatattttggatgtagaacttttttttcttaaatacagtaaatcggcaaattacaatcctttaatcaaattggtaactacagtaaaatctctataaatcaatactcgataaattaataaatattgtattatgaaattattatagtatcatatataagttttttaataaaataaccaaaaacactatttcagtttttaaattctgaatgttatcattttcatttcgatagtcatataagctgccaaaaatacaacaattgaggtccctaataatcaatataatgtatgtatttcatttgtataagtaaattttctagtctttcatatttattttgaatttttattttctttcttctaaatattaaactatggagattttactttatcaggttattttcggccagatgtaacttttattttctctaacttgtaactgacagattattttcacgttatatactgtaaaacatctataaattaatattcgataaactaataaacatgataaaataatatatgatgttatagacttatagtgactatatttttacataaagttttcaaaaaaaaatatcttattatgttataatattttgttaatttttacataataagaaaatatataatatatggcttagaatatttaaatattaaatttttgttagagtttgtctcgaacttttattggatcaaacaattgttttgaatttaacatttctagtatcaaataattgttatgttgtgtttttaaaatatcatattgtagtagaactttgtatgttgttatcatagagagtatgacatctgtatattattctgcaaatactcaataagaccatcattcaaccttgttaacgcttctcgaaagttgttatgaaattgtccatcatgttgaaagttagtttcaggtggtcaccatgaaaaactgaactaactcttttcaagccaaattatcattttaaatattaattaatattaaaattcttcatatgatcttttatattactactcgagatgagttcgtcagtagcattaagagtctttgtaaatccctcactaatcgtaacaatgctttgatgagcattgtttgtgcaaaaaatacactttcatatcaagaatgatattcgtcttctcaaatatgtcaacaaatatatggtaaaatatgaaaatagagagatatcgtaaaacaaaatattttacaataaatgatataattttatttttatgggataagacgaatgaaattcatatatgtaatcttatctttttgtttctaatttattttattttattttgggattataattactcaaaatattttagtataccaaattatttttataagtctagtatgtcactgataagaatgtctcaatggtcggcaaaaaatatattctactatttagatagtaaataaaaaattcataaattactccatagaaacgttattttatattgaaaatttgtatatcataataaaataaatttgggctactactatggataaatcattggcagtatacatgtggttactaaaacctatagtacatgtaaagttgaataaaaagtcacagtctcatggtcgaaacacctaaattaatctaccatattgtgctcgataaacaaatatctcagtaatttagttactataaacacacaatcacgtaacattttaaggtcatttcataaccatttgttttcatctcttattctcttattatcgacgacccaatcatgccatgatttttcatttcaatcacattacaatgagatgagctggatctatgaagaatttacatcatgatttctttatcatcaaattaccttttttctcaaacactcatctcactacatttaattgattagctatatatgactattgcctatcttgatcaaccatataactggatgacccaaatttatcatgatcattcatcctaacccacatacgattggctatctctttttataacaaccaatcaaccatctatctaatccacctcaaacacatatatcatttagtcttatacacatttacttcaatcacacatgcattttcatccaagtctattaacatattcacccaagtatatatgactttcacccagaaaatcaacatttaccacccaagtcatactatatttttctatcattcactcagtcaatttcatgttttattcatttaaataaaaacttttctaatttttacattccgacatgtaaaaggagagaaaaaacctcaaataattgtagttacgacttatgacgaaaataaatcttcctttccattagtttagcgagaaatagaaaatattgtaaaaactattaagcttcattgtatgcagttcagtgtataaagttgcaataaacgcttaaaatgcttcactggactagaaaagtaatgccggctcatgaggaaggacgacccatcccgtgtcctaattatcaagggacccattttaaaaatattttaaaataaataaataaattagatagtaaactaaatataatattcaaaatcttttaccgtttagtttatttgatctgctgatattttggttttataggaaaagaagaagaagaaatgtaaaaaacatgcacccaatatataatacgagtaatttaataccaacataaattagaataaaactatttctttgaatacaaaatgcatcatatggacttaatgtctttgacaaaaaaatgtttaacaaaaaataaatatagtgtaatttggtaagaaaactaaaatatacaaaggtaattttgtctttttgacttggtaaaagcttcctctctccactagtgatattactggtgtttttagttattttttaagggaagtttactcaaatagcccaaaatctatttttttacttactcaacatggagattttataggttttcattttcaataccaaaatgactcttgagggtagtgttaggaaaaaaagtatatatcaaactgccattaaaaattaattctaaataggacaaatttggagaggaaacttccccgccaattgataaatctatcacggtagctactagctagtgatggcagacttgatagatttgggctatttgagtaaacttgcgatatatatggttggtagagttagtattgtggtagatttatacggtggattaaacttttatgagataagtgattttggtagatttaacaaggttgaaagagttatataatagtgttaggatcaatggtggaagagttaaatagaaaacagatttagttaataaagtcactacatgtggttgtagcctgtagagttattattttgtgatagactttggaatctcagtacaagagttatgttcaatggcagtagacatacattaactctaaatgagaaagatacccaacagagttaatggttagtgataatagatatacaaaatctggtaaacatagttataagtctgtcaactacgcggtagatttagtgttcactcaactagcaaaagattggttagagttaaataactatgggtttaatatgtagaggggaactacaagcactgccattgagatatttaatcattccatatatgggtttgttgtagctttagatttgaattgatagtttctaaaaactcgtaaatattttatcagaattaactcattttggtgaagaaggataaaacacgtacgattaacgatatttaaaagagaaatgcccttaaatgattgaagcattgatgtaaaaggagggagcccaaagttacttgcacgaataatccgccaccaaacatggttcttccatgctttgcactacgttccaacatgttcattttctctcaagcatcttacacgtaacaaatgcagtgtacatcgaccatatgtggtttcaatttatataaattctatcgacataaccagattctttttttataacatgaaccgaattagaatctctttttcaaccatcaatatttttttctgtaatatattgaattggaaatgaacaaaaagaaaagtacacaacgaaatctatgataggacacggttgcgtggaaagcaaataaatttgagacagctaaccttgagacattattcaacggcagcgtaactaaactaatcaaacccatgtagcttaggtttattatacaagtttctaattatatctacaattattatttgattacgccgaaggttcaagtccaatcagctaactttttccataaataatgggtgaacttaattattaggtatttgaccagatcactagttattttacctaaacataacaaaaactaatttttttggacggcgaaatttacgtttctatgattcattcaattttttttcatgctatttattttagttatacacgcctactttataatctgttaactactaagaaatgtactaattagaagacggtgcgatatgataacattaacatggtgtgtgtgtgttttaattagtctcatgttctttttcagtatttgttctattacaaaaacatagattgttcccacattccatcccaaagtactccttcatcacttggttagcaacaaagaatcggttgtcaacagcagacagaatgcggaagtggaaaggcaatgcaaatacaacttgtgtcttttgtcaggaaccggaggagacgagagaacacttgttcttcttgtgcccatacacgtttcagatatgggatgagctcacaagagggctgcttctagacaacttcacggcagattggaaagagcttctaaagttactcatggaacgaaacatagaccaaacaaagacattcattcttcggtacgtgtttcaaaacatcattcactccttgtggcgggaaagaaacaacaggaggcatggagagcaaccatcaccaactgcaacactagtcaagatgatcgataagaacatccgaaaccggcttagcacacttcagaggggagacaattaaagtatgaagatggcatagtcctttggtttgcaacaagaggaaatcaagtctagaaattccaaatttcttgtagatatttttgaattttttttacattcacttgtaatacctagtaactttttcttttgaatataattcaacatcatattcaaaacaaaaaaaacatagatagtggaaagaaatcgattccacttaattggtctaattttcttataacttgagaaaatcgttcagtaattttgattgaaaacggttatagttttgtgagtacaatcaaacaaatataaaaagaattgaataaaacgagaatagaaagagaaaacatgtaacttaagaaacaaacaaaacggctaaacagctcatatcttggccgcgtacagcccacgtaaaatccagtttataactttcgattattttatataaacataaacaaacttattttcttgaataattttaacatcaatatatctctctctccgcgtcgaccaaacttgcaatttgcaaacgaaaaaagctcctttcttttgtattataaatatacacacataagtgcccacacaacttcattcatcaccacaatcacctgaagagccaaagcagcaaaagaaacaaaaaaaaaacaagaagtgaagtcagatctcgaaaaagagtttacgaatccatgggggaatcaaagaagaaaagcagatcaatggcaacacaaagagcttggagtcttgtgagaatggctcttctatggggaagaaaaggtggaatcttcaagagatggcacatgtttgagctccgtaacttgttctccaagcatctcaaagccctaaatcatcataacagcgttgacaacaaccgttatctcacacgttacggcgagaaacagctttctttcgacgagacgccaatatttaacgttaaaatgcatcgccctacatccatgaggttcctcttgccttgcattgctcgtcccgctgactttgactacgatttcgaattggatggtactcaagatgatactgacgatgttagatc

SEQ ID NO: 789 - DNA, 47460 bp, Arabidopsis thaliana
ctacggctactacgatggttcttgtaatgagaaatgtgatcgttcggcgaatgatgatcaagaagaggaagaagagaagggtgttgatgtgagagcagaggagttcattgctaagttctatgagcagatgaagttacagaggcaaatctcttatttgcaatacaaagaacacaacgacgtcgtatgatgatttatcacttcattttgattctcgtgttttgttttttttctctcaattttgatgaaagaagttagaaccataagcctgaaaagaaaaaaaaatatccattcatttatatttgttattatattccacattagagaattaacagagtaaacatattttgtaacagaggaccgagcagagtaataactagtagcttattattattccaaaagatatgctggagaaccaaaagaaatatataaacgtcggctccaatggcaaaacatcaacaattagcatccaatggcaaaacaataaagtacgactttgatcaaggggccaacagaagcaccttcaagaacagcagaaacaaagagaagagaaggcctcttttgctgaatcaaaacaaacaacaatatcaggcaaatggaactttagtacaataagaaagcagccaattcattattaggtatataaagcctttgtacgtgttcagaaggaggacatggaagtagtcaaatcatagttccaacacatccaatcgttttaagaataccaccaatattccagagtccatggaggtaagccccaaagggaaagtctgaaacaagccgacccattttttttttataaatataattaaatattctcataaatatctaattaaaccaaccaataacataataattaaaccgtaagtcaaaaatactattttatgaataaataaataattcgaccaacaaaaccaaaaataactgataatcctaaccgggttccaataaccaaaaacaccaaaaataaaacaaacgagttcctaaatcatcctctcttccttgccatgattccacgatcacactttatctttacctgcatcaacaacacaatgagatgcgtaaatattatcataaatacttagtgaggcgatcctcccatctacgagctatacacacaagcaaatacaaaggtataatcacgaatacaatacaaacaaaccagtcattgaacaattcacccaaaacacattcaccacacctacatatcatcacacaaaacaaatcacacaacccaatcgctcagataagctcatggtcacgcactcaccttaacaaattgattctaatagcaattaaacccaggagagactctccttgcgtctgaaacagtccagaaacgtcctacaacaagtccacaaccaaaagcaaccttgaagcaaactggacaagaaaacaccagaaacaagcagtctcaaagacgaaaccctaaaatacaagctaaccgttaactatacaatcgctccggtgaaatcctagctgcagacgtcacaaagctgcccacgatcggaaaacagacgagaccacgatctcagtttcaatctccgctggtcctaattcgcgtctgagaaaacgtgtctcacgaaactgcgaataactcaaccaattttaatccaaatctaattctgtaaactggagaaaaacgataaaggatttggaaataactttaccaaatttcgttaccttttaccacgatttgatatgacgaaactgatttctcccaaaccctaacgattctgctcattctctttttctctctttttctcctttataaaacgaaaagtggctaactaaagccctaatttcgagtttccttcttttaaaggcacactctagggtttccaattaacccaaccaattaaaccggatgatttaaaaacaaaccctaaccgattttccggttcacgggcgttacaattctcccccactaacatagattcgtcctcgaatctagcttcacccttccactccgaggaactccgtgcaaccatcactatagtccgcactccctccaaccagaccccctctaggtctctctatccagtcgatatactcacgatttactagtcattgttgctcacaactcactctccactctcagaccgcaatcttcgagcataaaccgtcactttcaggcctcggcctacggtatctcgggtatcacacatattatcttccccactcaaagtcaaaccctgagttgtgtcggctcactctcagccacaaagtcatcgagttacgacacttggagaaaataataccacaaaactcgctctcgggtcgtcaccctaaagcgtgctctcggatcgtcacccgaagccaccgtacccctcgtactctaaagacaccatgtccctcgagttaccggtacctcaggagcataccccgctcctcacgagtcgttggaaccctcatgtccctcgagcaacaatactaaacgcttccgagcatatctccagactctctcatggattcgcgtaagacacctctatgcctcaccatccatcatatcccctcgaaaacatccttatgaccaactcccggccatctcgtaaacacacctttctcttacgttgtttactcaaactttccgaaaatagacaagtcctttctaggaaactttccatttttggaaaccgcacaacacaatcttaaataagacaactcaagtcaaatccaagaaaaaatactcatcttattaatcatcaactgtcatgatcgttacaactccaaacgaaaatacaaatgaaagagaaataagaacaacaactcaaaaactcaaaaactcaacaacactgaaactggaaaccaaggaaaggcaaactcatgcaacaaccagcttctctaaccacttcttgaaccttgccttcatcctcgcctctggctcccaagtctcctctatcacaccatcgcagtcccacaagactttgatcaaaggaatcttcttccgccgaagttccttgatcctcctctcgagaaccctcactggtctcgcctccaaagtcatgttgggctgaagatcctctggaatcttagccaacacctcatcatccttgtgaagacacttcctcagcatcgacacatgaaagactttgtgaaacgcacgcataacatcaggcaactctaacctgtatgccactggtcccaccctctcaacaatcctgaacggacccatgtacctcggactcaacttagtctctgagatagacctgttcggacctcgcaacatggccatcttaagatacactctgtccccaacctcaaactcaagctctctcctcctcttgtcagcataactccgctgtcgatcctgagcttccttcatgttcagcttaagaatccggatcctctctctggtctcctgaacataatctgcaccatatatgctcctctcccccacttgggtccagcataacggtgtcctgcatggcctcccgtacaacgcttcaaaaggagccatcccaatactcgcctgatagctattgttataagcaaactctaccagactcaagtgatccgcccaatgaccttcccaatccaaggcacacatccgcaacatatcctcaagcgtctgaatagtcctctcagattgcccatctgtctgtggatgataagtcgtgctcatctgcaccttagtacccatctctgcctgaaacgctctccaaaatgcagaagtaaacttggaatccctgtctgacacaatactcacaggtactcaatgcaacttcacgatctcgctcacatatttcttagccgacaccgccgctccatcggtttttctgatggtcagaaaatgtgctgacttagtcagacggtccacgatcacccaaatagcatctttggttcgcgacacaggcaacccaaccataaaatccatcgtgataaaattccacttccactcaggaatgggtaaactctgcaacatgccacctggcacctgatgctcagccttaactaactggcaaacatcgcactctgcaacccaattagctacatccctcttcatcccgacccactgatagtaccgcttgaggtctcggtacatttttgtcgctcttggatgaatggaaaatatgctcgcatgagcctcactcaagatctcccgtcgcaactactcatccttaggcacacaaactcgtccatacacaaggatagtcccattagctgcaaactgatactcagagccctctgccttaaaagccgcaatcaacccctcatccttctcctgagccaaccgaactctagtcagaagatctgctcgatccacaacttccaatcccaatggctctcgtgcaacagcacacaaccgcaaagcaccaatctcactcaccaaggcctcaacactctgtcctggagccgcgcccacgcgcttaccggtcaacgcgtctgcaaccacattagccttaccgggatggtaagctatctccagatcataatcagccaccaactccatccatcgcctctgcctcaggttcagctctggctgagtgaagatatactttaaactcttatgatccgtgaacacctgcacttttctgccataaagataagacctccaaatcttcaaggcaaagattactgcagccatctccaaatcgtgagtaggatagttgccctcatgcttcctcaactgtcgtgatgcataagcaataaccttttcacgctgcattagaacacaacccaaaccaactctcgaggcatcagtatacaccatgtaaggctgtccatgctctggcaatgctaacactggtgtactcgtcaacatctccttcaggctcacgaaaccctcctcgcactccagtgaccacacaaaaggaacatccttccctgtcagcttagtcatcggctgtgccatactcgcaaaccccttgacgaacatcctgtaataccctgccaacccaagaaaactcctgatctcagtggcattcgtcggtttaggccaatctctgatagcctcaatcttctctggatccactgaaactccctctgtagaaacaatgtgacccagaaaacccatttctctctgctagaaactgcacttactcaacttagcgaacaacttctgctcccgcagcttctccatcactctcctcagatgtacctcatgctcctcatgactcttagaatacaccagaacgtcatcaataaagatgataacaaactcatccaaaaacttctggaacacgctgttcatcaacctcatgaacactgcaggtgcattagtcaacccgaaaggcatcaccacgaactcaaaatgtccatatctcgtcctgaaagcagtcttgcgaacatctgcctccgctatcgggatctgatgacaacccgacgtcaaatcgattttggataaacaagtagcacccctcaactgatccaacaacttatcgatccttggcaaagggtatctgttcctcacagtgacccggttcaactctcggtagtcaatacataagcgaaactcccgtccttctttttcacaaataacaccggcgctccccaaggtgaagtactaggacgaatgaatctcttacccaacaaatcctctagctgcttctttagctctgccatctctgctggagccatcctgtagggtgccttagacaacggcgctgtccctgattccaactcaatcgtgaaaggatcagaacgtgatggtggtaatccctgcaacgattgaaacacatcctcgaactcctgaacaacccgaatgtcgctcactgctacctgccccacagactccggcataaatatcgtcaccaggtaagcctcgcagcccttctcgatcattttctctgcctgcactacagagatgacgagactccctgagataggtctcactccctgataaaccaaccttccctctggccgctcaaaagaaactctcccacggtggcagtcaagatgtactctgtaataatccaaccaatccattcccagaataacatcatacaactctacagggctgataatcaaatctgctggcattgactcccctgcaatctgaatatctacacccttcgctctccccaaaaccgctagaaactgccctccagcaaccttgacgtggagatgtcccctctccctacagtggtagcactcccccgtctcagctcgctgcgtgcaatcctgcacgaccaccctgtccagctctggaaggatgatctcacttcctcttctgcccctgtgcaggtttgccgcccttgctaggtgtcacctgctgctgagtcttcttcggttctaccgctggactcactcccaccacctgcctctgaaggtcctcttctacctcagcagccgtctccaccagtgccgccttcgtggcgtactgcgacactctacaccgcactctcaaatccggtcgaagtcccttcaagaacctcctcatctgggcctggtcatcctccatgccccgacctgcatacaccaaaagtcggttaaactcccggtcatactcctgaaccgaccgtttaccctgtgtcagctcaagaaaacgcgcttccatacggtcgagcgcctcctgcggaaagtacttggcattaaactcagccacgaaatctgcccaagacatatccgtctgcctcctcctggcagtcacactccgccaccataaatgtgcatccccctctagaaaaagcactgctagatctacccgatactccgccgggcatctgctcgaactgaagttccgctcaacccgcgacctccaactgtcggcctcctcacgactagtaccaccagaaaaataaccggtgctaatcctctgcaactgctccatcatcctcaaataagatggaacctcctcagcaagcgcagcccgctgctgcacctccgccactcgtggcgcaactggagcctccactggtaccacacctggtaaccgctccaacaactgcctcaacaggcccgccaaaccaacctctggaacctgagctcctccagctgcagcacccatcactcctgggccctcagcaccaacggcatgcacaccggtaccgacaccagctccaccagcccccactccggctacaccagctatatcggcactaagaccgttcctaaccccgggctccacaaactcaggctgcgaacccacactctgctcaactgtggcactgtggccatcactctcgccggtaccctcgaggactcgtcccctaccgcgaccacgaccgcgaccacgaactccagctcctctaaccatctgcgctactcaagaacaaatggttaagaaactaaaacaaacgaatatatcacaaacaacttaccgtggaatctcatttaaggctcggagaagatgatgctaggactccaacaacacacaattgactaaacactccataatcaatcctcaatatgctaacaccctagctcatcccacatcaatcaacaggaaaataattcatcaattaatttttctacacatcctagaaccgtaatcgctctgataccaaattgaaacaacccgactcatttttttattaaatataattaaatattctcataaatatctaattaaaccaaccaataacataataattaaaccgcaagtcaaaaatactattttatgaataaataaataattcgaccaacaaaaccaagaataactgacaatcctaaccgggttccaataaccaaaaacaccaaaaataaaacaaacgagttcctagatcatcctctcttctttccatgattccaggatcacactttatctttacctgcatcaacaacacaatgagatgcgtaaatattatcataaatacttagtgaggcgatcctcccatctacgagctatacacacaagcaaatacaaaggtaaaatcacgaatacaatacaaacaaaccagtcattgaacaattcacccaaaacacattcaccacacctacatatcatcacacaaaacaaatcacacaacccaatcgctcagataagctcatggtcacgcactcaccttaacaaattgattctaatagcaattaaacccaggagagactctccttgcgtctaaaacagtccagaaacgtcgtacaacaagtccacaaccaaaagcaaccttgaagcaaactggacaggaaaacaccagaaacaagcagtctcaaagacgaaaccctaaaatacaagctaattgttaactattcaatcgctccagtgaaatcctaactgcagacgtcacaaagcggcccacaaaatctcgtgccgatcggaaaacagacgagaccacgatctcagtttcaatctccgctggtcttaattcgcgtctgagaaaacgtgtctcacgaaactgcgaataactcaaccaattttaatccaaatctaattctgtaaactggagaataacgataaaggatttggaaataactctaccaaatttcgttaccttttaccacgatttgatatgacgaaactgatttctcccaaaccctaacgattctgctcattctccttttctctctttttctcctttataaaacgaaaagtggctaactaaagccctaatttcgagtttccttcttttataggcaaactctagggtttctaattaacccaaccaattaaaccggataatttaaaaacaaaccctaaccaattttctggttcacgggcgttacagaatcattggatagatcgaatatatgtagtgcgttttggtgtttagaaaaaaggaaagacaaggagttttaattttctgtagttgcttaggcccaacgaaacctcttaatttccttttttttttttctggaattaagggagaagactcatcaattagagtatacacactgtgactaaattaatttgatagtttactactttatagatttattaaaatttgttttcaccggaaaatgtatacacctatagaatatccaaatctgatcaaattaatatctaattatgtttcttttgatgcataatcacaaatcaggatgaactttattgacacacattttcaatttttgtatgtcaggggttgagtttcacaagtttcctataccgtatatatgtatacatgtgcactacatatatttttgttaaaattatccctttaatatgaaacggagagaataggtatttaggtataaaaatgtgactaaatcatgtggtttagcattatgtccgaatgatatgatgtccctttgtagttcctttttttttttgttgaataaacatttgtctccttaccatccaccaaaaacaaataaaaataaaatatcccttgtcttgctatatatatatatatatttttttacctgcattgttgaaataatcttgttattattttcttgttaaacgaattaatcttgtacaaaataaagatagatatgatatgaatcttatcatatcatatgatattgacttttcaatattagtaacgtctagttgtagaacaccattaagcatttcagtttcattaggaagaaaggaaatgaagaagaataaacgtacgtcaaagttatcaaaaagaaaatgttgatgaatacaattcgattttgatcaaacatacaagcaaaaacatatatacaaatataatgttttttttaaaacattattagatatatctgaatttggcaaaaacgtccaattaaacttgtgataattaaataatttttggctagtccaccataaataaaagacaagtccactcaacaaaaccaatacccctctaattccaaagccaaaaataacaaacgaattttaatctcctcacaaaaaaagaacaattgaaccatagtccatagttttgttgggtaccttatcttttattgtcactaatatttagtggtgtttacgttgtttaggcagagaatcttgctaaattcatgtctcaagattccaattgagtaaagtcaaagattctcataaattcaggtctgaatgttgcatccgattcaccatccaccgactcacgaagacaaatcttcatcagaattcttactttattactttctattaaataatcatatccattaaataattctatctatccaatgacatctcgtatggtcacacaggtcacgtccttggtgtctctgactcgactttcttaatagatttttgtttttccgaaacaaatatgttctgtcagaaaattacggcgaaattcttctcttactctttactccaaattaattagttttatttcattttagatttttgattccatttcattgttaaatccttatctgcaaatataattatcacgtttagtaactcttgggatttactatgcttcaatccgaatcttatttatcgcattaactttcattacggtttctttgatataacgaatgcggaatttacctatcaagaactatatatggattattattatgatctcctattaatgagaccataaattgcaactaaaattagaaaaccacgtagtattgacgtcaagtcaacatcaaaaagccacgtgatatttgttatgcaaattatgaagataagctatataacttcaaaatatgcctatcaaaagtttagagtttatctatttaaaatggtaaccagcccctaaacctccaatatttttttatacttcaagagacccaaatttattttggatgatttaaaccttatttgtttaataaattaaaatttgaagaaactgatttattactaaaatcatgaatctcaccattatattaaaaattatattaattagattcataaattataaatataataatttctgatagactaatatagtttgccataaaataattaaaactaagactttcaattttaatactttcagtaactttgatcaaacacatttttatttaaatagaatcaattttttaaaacattaattgaataaattatatatttttttgtttgtatgtacgagatttttctttcagtccattaatatgtaaatccatatatatatatatattaacaaataaatgagaagctgaaatgacttatccatcattattttgtttgaaaattctataactcccgtcaaaccaaaattaggcaattttcattttttgaaagattctctcctaatttttgataattttttccggattctatcaattttaagaacatttaaacttctactatgatattatcctaataagacatatagtaacgtatattgacatctattagattattaccaaacatatgtacacacacacataaagcttgattgtataaaattataaatatatgtagcaataacacaaatacacacaaaccccaacacacaaaaacgcttgtgaaaaataaaaagagaaacccaaaaacagaacaaaagaaagaaaacaaaacgttcttaagagtttaaatggcaaaccgtttcctccgaccaaacctcatccaccgtttctccaccgtgagtcccgtcggtcctccgaccaccatcatcccagaaatcctttcctttgaccaaccaaaaccagaagttgatctagatctctccgaccaagctcgactctttgcttctgtcccaatctccaccctcctccgctcaaccgcaattctccatgccacgtccataggccctatggtcgatcttggctcgtggctcatgagttccaagctcatggacacgaccgttacacgcgatctagtactccgtatcgtgaaaggaacgttttacgaccatttctgcgccggtgaagacgcggctgccgcagcaaggcgcgtgagtagcgtgtatgagtcgacgggacttaaaggtatgttagtgtacggcgtagaacacgctgaagacggtggcgcatgtgatgaaaacattcaaaaattcattgaaaccgtcgaagctgctaaaaccctaccttcgtctcacgtaagacattctcaaatctattttttttgtcttgtctcaaaatttcatcttttagactttttctatacatttctctattttttccaaagcaaactcttcataagttttcacggtaatttgttttctttctgttttggtttagaattactttaattattcgatataaccatcactttaatactgatcaaatatttttagaggggttacatatataatcactttgtgcaagtcggatctacaaacaaaccactatacatgtttataggtgtagtcgtgtagaggcaaatggagagaaatgaggtcaattgaccccaatagttctttgctatgtttatattaattttctgttggataatttgacacaaaactacctccaccagttcgattcttctatatgttttcagatatttttattttttgaaaaatgatgccactagattttttgttttcaatatctgccactccaaaaacgtggagtaaccgaccaattataacctttataagaaatacaaatatataataaattaaattacaaaagagactaccccgtttaataaaccttaaaaaacaaaaaagaacaccaacttgtctgatttttttttcgataacgatttcttctttgtttgttttaaacgacttgtctgaattttagttttttttttttttttttttttttgtctgtaaatatgaaataacaatcaaagtcacgtcggttcctcgtcagacttcaaagttaacacgttaatcacgcaatgaggacatatttgaatcagaattgtcaaccacacgctaggaatattcctcgtttactttaatatcggtttaaaccggttctactgctaataaactttttattgggttttgtctgaacagttaagctcagtggtggtcaagatcacagcgatttgtccaatgaatgtcctaaaacgggttagtgatttgcttcggtggcaatacaagaaccctaatttcaaacttccatggaaactcaattcatttccggttttctccggcttaagtcctctgtaccacacaacgtctgaaccggaaccattaaccgtagaggaagaacgagagcttgaaaaagctcatgaacgcctcaaatccgtgtgtcttagatgtcaagaatcgaacgtaccgttactaattgatgccgaagacaccattctccaaccagcaatcgattacatggcgtattggtcggcgattatgttcaattcggataaagatcgacctatagtttacaacacgattcaagcctacttgaaagatgctggagagagattacacttggctttacgagagtcagagaaaatgaatgttcctattgggtttaaattggtgagaggtgcttatatgtctagtgaagctaagttagcagattccttgggttacaagtcaccggttcacgacacaattcaaaatacacatgattgctacaatgactgtatgagtttccttatggagaaagcctcaaatggatcaggcattgcggtcattctagctacgcataacacagactcgggtaagacattgaaccatacttattactccataaaaaaatcttacacatgaaaattcattttttctttttatgatccatgataggtaaactaggggcaagaaaagcaagtgagctagggatcaataaagaaaacgggaagatcgagtttgcgcagctttacgggatgtcggatgcgttatcttttggattgaaaagggccggtttcaatgtgagtaagtacatgccatacgggccggttgatactgcaattccataccttatccggcgggcatatgagaatcggggtatgatgtccacaggtgctttagaccgccaacttatgaggtaactcctcagtttaacactctggtttagtcattgattatatagtttccggttctataacaggcaagttcacccgtttaacactttgattgagtcagtaccggtttggaaaacttcggtttctgcctagattttggtcttaacaatgtgttgatttgtttgtgtatttgtaggaaggagcttaagagaagagttatggcttggtgaagacacaggagataaatgtgtttcattcatggaatatggcaaatatagattttaaaattatatataaatggagtagcaaaatatccacaaatgtataattcattagtgatcaatgaaaatgcaatttgcatatttcattttttgcttaatcatgaatttatattttttttttaatattcactatgatttttttttaaagtatgttcttcatgtttcatttcggaaaaaaaaatctaaaggaaaaatgtatcacaactaaggaccagaagaaggatcaacacaaaaatatattaactctagaaggaccacaacttgttaatcatataaaattgttgggaatggtgatggattgatgatgatcatagtgagaagatgatatatttttttttttggacaaagtgagaagatgataatgatgattattgtatgatgataatgatatgatgatgatgatgaaaaaaagaaacaagtaacccatcaaacctattacaatatcccatgttacaaacacattagactcatcaaccaattcagattacaaagggacatatttaacccattaaagttgatgggttgggatcaatcgaccaatttattgattttggttttactctttttttgcttgagaagaagatatgtgagattaaaaaacaaaaactcaatagatgtgctgaattagaaaatcagaacatgccaaaatggtttataatgatcttcttttttttggataaatttcacactcttcttttaatcgaagatttttttttactggtcaacgggaatactaggaactatgtgaccataaaagctcatcggaaatactagaactatgttgttgatcaaattcaacttcgtgaaattgactaacaacattttctgcaaagttgaaacaaaagacttcaaaaatagtattatttggatggtgtttgagaaacctttaagagaaaaaaactagattaacccaaataatgagattaattactagaatgtcttcaaaaatattgatgttaaattggttcttttcttgtctaaaatacccttttcttatgtgttgaaaataaaataaatacaaagatacccttttaaaaaaattccagcaattttataaaagtctatcgtttagttatgacagatttatttttattccgcagacttgtttaactgcgacagattttttatggcagacttttttggttgacagactttttaaaagatagttatgacagatttataaattatagcagatttaatttgattgacagattttttatttatttaaccacaaactttcatataaattgataaatttttatttttgtggatgttttttacgataaataatgacaattttataattttgttaaaaatatctttcatattgtaacagatttattgtcaaaaaaataattactagaatgacgtctaacgataaccgattttttcaatgttatgacaaacttattttatgttataacagatttttgtacttttataaaatatctgtcgtttgatggcagatttgttttctaaaatataatgacctgttgtgacagttttattttcttttagcttgttatgacagatttactaaaatcagttaccatatttccttagacatagtcgaatggaaataattttttataatcttcagtttcaagaagaagctgtccaattttgttagagttttgatttttgatggtaatcaaagaagaatataaatcgtcttttagagaaaattaggttttaaaaacaatttcaattgttttgtgaataatttaatgttaaaaaaatcagtataagaaccctaccaaaaaaaattttagtataataaaataaaaagaaacttagtaattagtataattgtttagattttaaacaaaactgaaataagaaaaaaaattgtttttcgaaaaaatagtcatgggactcgaacccatgtatgggaagttgagcaaggaatcgttaccactatactactagatacgtctgaatattgttgcccgtaaagcagttaatttcttttattattttcgttttttacggttctatttttattttttggaaggaagaggaattaaaatgggtttttggtcaatttacacataactagctttatggcccgtgcatagcacgggcgtagatgattttactaattggaaaattttatcaactactaaacaatttaagacaaatacgtatatttcaggaaacatttaactaagcttttatgtctttgtgacattaaaatgtatcaacgctttgggtttattgagtttccaagtctgttgtttgtgaagaacctaatatgatttggaatcagagatagtcagatagatgctttgtttataggtttacattgctgaaaaagttttacctttttatggttttgtaaatagaaacttttgttaataactggtcttatatgctcatggttgtggtcatttgttggacattaatcgatgtatcataggaatgtttctctatagttttgggggtttagatttctagtttctgactgcacagtccctagagactttagaagttttttttacatcatgatttctctttcgcccgaatgtttagaatcgtatagacgtattcatgagtgttcatacagtatctgattgacttaatgcttgagactttagagaccatttaaaaaaagatgaattagttagaaaagaatatatgatatatgtatactgtaattagctttaaaattcaaggctccaaagaacaatacttgtttcgttgtgcttcattttctctttctcttattcataatacgctgtcgtgcaattagcctaggagaagattatgtagaaggttcttgcataattagtattcacttatttgatcttactgtttcaatctcttcaagacccatctcggcagactaaaaatgaaaagaagaataagtatacatatatcgtataaaatgaaaagaagaataagtatacaccacaagagtctcaaagaaggacaaagctaataacaataactttttataaggaaatcaattagtacattgtgaattctagaaaaatggaatcataccacaataccaaaacgcgagcatctggggcataagcaaaatttcacttgccatcttggaaacgctatcaaagtactccttattcagtggcttccaaaagttataattgttagaagaagcagaaaataagtaatttcaactaaaacaacacaccaactacaccaagcatggatcatgagacgttaaaaagactaagaattttactattaccacaaactaatggaaaattgatttaagcactaaaatacctaccgattgtggtataaattaccaagatataagaaaaatggaatagtgtttttggaactctgcgtcgaacaagaagactctccaatagaccaacagtcttccgaactctctcttcatcagttatgaaccgaactcttgctgaaaaatagttgaagaattgattgaaaattaagaacactttggattcttgtggattgggttcgtaactgaatcatgtaacaaaagcattatgtacagtatatgatttacagatctaaggagaaaattaaacacttatccaaaacatagaaaattggataataccgaatgaaaatctgctattgttttttgatctgccaaagagaatgatgcttttaaacgcttgcttgagcttgaagacgtatttggcaaaactgtaaagtgtaaacacattatattgaaatgttatctgcatatgatatattaaacaatctttgaaagctataacaaaaaaaaaaaaaactgaaatcggagatggagatggtaaattgataccttcagtaaagaaaagattaactgatttctaagagcaatcgattactgttgatgggaagactatttttttatagatataaatagtcatcggaagtttggaggagaagaagtggaagaggtggagatcgtggagatcgtggagatgaagaagaaaagggttttgagaaataaaaaaaaaagttttataaaaagtacacaagatattttttccaattttattaattaaaaaatgaattagcaaaatctttcgtgaaaatgaaagagtaaaaaattggtactaagctgatgtgtcaatcagagaatgcatcagtttttgctaaaatgactgttgatttagtattattagatttgtgtcattctagttaactacaaaattagggtgttaatctagttattaatttgtatatttgtgtcgatcttggtaattttcagaacctttaaattggcatttctctacaaaaatattaaattagagtgcctcctttgttatcttatatactatatcattcaatatatttgaatggattttgattcaatctaatgttccaagggaaaaaaaattatatttctttttgtttatcagcctgaaatggtcaattacaaaatttgatcataaaacacattcatgatattgctcatgagcttaatcagagtctgaacccacaaagctcatgttttttcaagcagaatgtgttcttccttagaaaggcttaaacctacgagcagctcgaagttgttgtatcctcttcttgtcttcctcgaacttactctgaagcgccaagagttctgtccacaaacaataaaacacaaaaccaagaatcaattcatcagaatcagggcagacaaattgaagggccacttgtgtgactagggctgcatataaaaaccgacccgagccaaaactgacacaaaacacgtttgaggatatagaaaagccagggcttaccattgcgttgtgcatctcgcctttggaaacggtagaaaccatgagcgacaggctcactctgtttctttttagcgatcttatcctccaaagcagcctgagaaaaagatccaacggctgttccggtttcagattctgttgtctttttccttcctttgtgatgcacgaccacagtccatccaccttctgcagctttagcttctttgtcttgtttctcctgttcaacacacatgacaacattagacaaaaacacgatagtcacttagacaatagacatgaacacttcaaaatataggatgacgagaagaacctgttcaaggcgttcttcatgagcagtcatgaagtcatcgattctcttttggagctcgtctaaaccaggtctaccctcatagtaatcactaacccactctgcagtttaaaagaggacttatcaaattaaggaagaaacagtttcaagagtgttcatgcttatctaatcatatgcagctagctaataatggaagaaacagtaatcatttttgtttcatccatacttttcattccccttgtgcaatcctcatcgcctgaagaaatttgataaacatcttcctcctcttcaattttgttctctttcttagaggtcatgtccatctttttcttcttatttgatttcttaaacttgcctacaagaaaaaatttactttattgaacaagatgatggagttctgaagtccttagactcgcctacaaaaaacaatctacttcattaaaccagctctgaactaccggtttcttatttcagttccattacagccatgtcaaacataaataacattcataagaaccacagattcagagttagatagacagtaaagttcacattctgctcaaagaaaatattatataaagacttaaaactagctaaagttcctcatgcaaatgattcagagaactaacataagacaaccaaaacatggtaatgaactactcactttctcttttcagatcttcgactgaagatctagttatttcctcggccttccttttcttcttagtcttgttcattttgcccttcttttcttttactttctcagttgaaatagctgtaacaagaaccagagatactaaactcaataccagaatctaacagctcagtaatagatttcatctgccaaaaacaaaagaattcaccttccagaatcggttcgcttatatcaacattgcctactttctcttttctcttcttcatcttcccactcagcttaccatcagctggagagctttttatttccttacccttctgaatcttctttctattgggtttctcacttgatttagctggtaaggaataataaacaagatactatactcaacatcataacacatcttaaaacactataaaacacttctaaatccatcaaagccaaaactttcaccttgaagctgtgcagcctgaggatcctcgcttaattcgacattgctcactttctcattcttcttcctctgaatttttttcccaacagtttcttctgcattgattttatccgtcacttcaattagacaaacaataatttgcataagcaatttacttcttctgcttcacaagattaacctttgtaattaagttcaaggccattccaattaaagctctcaactttcgaaatcaaataagttacctctaagaacacaatcttagtatacacaacaaccatagttaggtcttttcggttctgtaatgaaacctcataaatcaattaagtaagaatataaacgcgagaaaattaggcctacctttagggagattactcttcttcagctttctcgtctccttcatcttctttctatcgcgtgagaagcaaaaactctgtcggcgattgtcggcgtcgacgctctcggaaaaattagggattagtcaggccacgaccatgtaaattagggtttttgctttttgtgaggttttggactgaaacagatacaagggtaaagttgttaatatcagcaacacgagaggacatatacgtattcttgactaaaccggtctaaaattgggttcagttcgatttattacgtattttctctcgggccgtttcccggatattccaaaacaatcgattcgcttccggttttgaattcagtcctttatcggttaattggtaaataatctggtctggttcatctactggagaaattcaaaccggtttaggccttctctttatcgccgttgctcttctctgttactcctacaacacttgaggaacaacaatggtgaatttgttgtcagcaaatcgagaagctttgattgcacaaagcatctgtgcaacagtattgaaaggaaactggaaaaatattctgaaacacaaagttgattctgggttattgaaatcagcgataaccactcaggtaatctctgagctttctctgttttctggttatggtggaccttctctttcatggagtttctttatctggaccgattctttaccaagtagcaaacatagtttacaatcatcatggaaaatgattttgattctcacaaaacacaagcatttcaaaactgcacaccaactgctcgataaattggctcagagagagcttttgtcatctcctctggttttgagatctttagttggtggtgtttctgaagacccagaagatgtatctcacgtctttagctggttgatgatatattacgctaaagccgggatgatcaacgattcgattgtggtgtttgagcagattaggagttgtggattgaagcctcatttgcaagcttgtactgtgttactaaatagtctggtgaagcagagattgactgatactgtttggaagatattcaagaagatggttaagttaggtgttgttgctaacattcatgtgtataatgtattggttcatgcttgttctaagtctggtgatcccgagaaagctgagaaattgttgagtgagatggaagaaaaaggtgtgtttcctgatatctttacctataacacgttgatctctgtgtactgcaaaaagagtatgcatttcgaggctttatctgtgcaagataggatggagagaagtggtgttgctcctaatattgtcacttataattcattcatacatgggtttagtagagaaggtagaatgagagaggccacaagactgtttcgggagattaaagacgatgttacagcgaatcatgttacttatactactttgattgatggatattgtagaatgaatgatattgatgaagctttgaggttacgtgaggtaatggagtcaagagggttttctcctggagttgtgacatataattcgattttgcgtaagttatgtgaagatggaagaataagagaagctaaccggcttttgactgagatgagtggaaaaaagattgaacctgataatatcacctgcaatactttgatcaacgcatattgcaaaatcgaagacatggtatctgcagtgaaggtcaagaagaagatgattgaatcagggctaaaactggatatgtattcatacaaagcattgattcatgggttttgtaaagtgttggaactggaaaatgcaaaggaggaactgttctctatgatagagaaaggcttctctcctggatatgcgacctattcttggctcgtggatggattctataaccagaacaagcaagacgaaatcacaaaactcctagaggagtttgaaaaaagaggtctttgtgctgatgttgctctatacagaggattaataagaaggatttgtaagttagaacaggtggattacgccaaagtgttatttgaatcaatggaaaagaagggtttagtgggagatagtgttatattcacgaccatggcgtatgcatattggcgaacagggaaggtcactgaagcttctgctttgttcgatgtaatgtataatcgacggttaatggtaaacttgaaactttataaatctatcagtgcctcttacgctggtgataacgatgttttgagattcttttggagtcatgtaggtgatagatgtcttatatcgaagagtattttacgggaaatgaacagaagcgaggtattgtgaagtgagccaacatatcacatttatatatatgtactttaaaagacactaataagctacgtagtacttgttgtttctagctactatagagtgaaagaatactggtgtagatatcctctgcatcaatcatgatacaataatgacctttatggaaagtgaaagtgcatgtactgctaaatactatccaactaataaccgtaaacaagctgtagatctgaatacatttcaacaacaacaacaacacatcaaattaatcataagaaattaacaaaagtctgcataaccgtaaccgtaaagttcatgctgcatgcattaactgattcaacccaaagttgttcacagattcttgtaccgccgagtatggtctgcgtttgagacccaaggatgttgaaagctgttgttattgatgttacccatagacatgttttgatgacaaccataaaactccttgtgcatcaactgattcaacccaaagttgttcacagattctagtactgaggcgcaagtaacttgaaaattgttgtttgtgatgtcacccatgctcatgttctgattctgatcataaccacaaagctcctgctgcatcaagccagattcttcttgtattgagactgaaaaatcttgattgaaatttgatgcagagagtgggatttgagagaaggtagcatctccatggttactcatgcacatgttgtgctcataaccacaaagatcgtgcttcattaactgattcttcaacccatagttgttattcacagatttttgaacagagtagtaatcttgtgtgtttgagacaaaagaatgttggaagttgttgttggctgaaaaatcttgattgaaatttgatgcagagaatgggatttgagagagcgtagcatctccatggttactcatgcacatgttctgctcataaccacaaacctcctgcttcattatctgactcttcaactcagattgttcaagtaacgctgagatataatcctgattgaaatttgatgcagagactgggatctgagacagagtattatatccatggttatacataaacagcgagaactggctagggttcaaagattggttcagagaagatattgatgttaaactctgatgatccggttttgtctcattctgtttctgcgactcaagaaatcgaagcctttcttggaatttagagacattgagttctaaggactgagtcaattgagaaacttggtcgggagagtaatgatcagcgagtggatactttaaaacattcacgttcttaagactcgtcttcttcttcttgttcggattcttcaaacccttgttcttcttcttcttgttcaggaacccatgaagattaacgcttttcttgtgtctcaaggcttcgtttaattgattaaacctcagagcaatgtctcgcactttctctcgctccttaggccatgttttaagttctccgtctggtccgtaatagatgacgcaggcttcgatatcacagagagtgcaaagctctgaagctttcttgaatatagtctcaagtctgttagacaaacttgtggaagcgagtgaataagaagaagaggaagacgaattggaacaacgagaggaagaaggtgaagatcgaatggtcgtcatcttcttgttgattttgaagacaaactctctgtgtttgttttcacgttcagagtgaagagaaaaagctaatgaattaggttaaggaaacccttagatatgtcatatatttatagagttttttttgtaggcctgcgagacaaactcgaaccgataattccgaaccgctccgaaccgaaatttttggttccgggctttgcttcggttaggaaaggaaaaccgatcggaaggtttgtaaattatgtttggttacccagtgtttcggttcggtcggttaaccgatatatttttcttcctctgctttcgtcggaactcttcagccgctggcaagcttctctggttagggttttcgtagaacctgacaatttaaagaagaataatcaaaacgctacatttcaattttggaatcggtagttaagaggccaaatttttgtttttttttactaggcttggcccaaacgtgtatatttttacagcggcccaaactattatatattggacctgttcgtttctgtgtcgcctaatttggtcacttttaattttcattgtatagttgaaaatacgtagtttgggttgggaagataacatataattgcttcgatctaattgggttggacttagaattaatgtcacattttaaaaccaaaaccaaacgaatctaaatatgttcatgagatcacagtggttaggctttaaccaaaaacattcaggccttcacactaaaccaaaatgttaaaatcccggttaagctcaaacttgttgcacatgataatcatgacgtgtcacagctggaatttcaatttctttttttcgaaacatgtcttagtcttggaatcttgatttttcaaattttgaatttttctatatagcggaaaaaattggagttagaccgtttgaagaagaagaaaaacctctacaaatctctctatgatatctctcactttttagaaatccctaaattttaattttttttgcaaaatgtctggagaagtttttttttctccggcgatcttgcttggttcaccgacgaattgtcggcgacgatcatgatccagaaatgacgatctctcacttcgtctaggtatatcgattatctggttagttatcaaactctcgaatttagggtttctttgaggcaattccgatgattatgaattctcaattccgatgatctgtttatgaattgtgtttctctgttacttgattagttgattcgattactgttacaacacctctcgttctttgtttatgttacttaatttgttccatcggtgtgttaatcttttggggtttgatttgtctcgatcaattttgttatttcctcctcaataccatctacgatagttttgtgattcgtttgatttggttttgtaaacgatcgcgagattgggatatctgtattaggtttagattttgtgaatgggaatcaaagatcaagtggtgttgtgatgctctgtatctggtatagattttgttctgcatcactgtgtttccggtttggttcttggtctgattcttttggtttacttttctattttttacagatcgttttgcctgagaacaagaagaagatgatggttcatcatagttaaccaaggaagcggctctaatcttagttatgttaacaaacacaaagtgcctttggttttgttcaaatatttgatctattcaatctttttctcctccttgatcttttgatattggtctttgaatatgatgttaagtcacgtttcttcttcaggtgcaaagtccagagcctagaatgtggcgtttcttagaactcagaaaacagagaattctggattcgcaaatcaattgaagaatgtgtatacttacaggcacttattcgtatacacgccggcattcatacattcatacatacatacacgccatgcattcatacattcatatatacatacacgccatgcattaatacattcatgcattcatacattcatgcattcatacatgcttgcattcatgcatccatgcattcatgcatccatgcattcatacatacacgccatgcattcatacattcatgcattcatacatacacgccatgcattcatacatgcttgcattcatgcatccatgcattcatacatacatgcatacatggattagttgcgtacttgcttcccttgcaccctcataattgcttctttgattctctgtctgatactctgtttacttacttaaatactttgcttgtttgctacttttttttcttcttcattccttgcttactaatcagcttccttctttggttacttgtgtgctaactcgattccttatttttttctttgattctgtctttacgtacttgttacacgcatacttctatgcatcatatttgcttgtgcacattcataatttcttctctgtttctttgattatgtctttacgtacttgttacatgcatacatctatgcatcatatttgcttgtacacatttataatttcttctcacttgcatccttgattcattttctgatcctttcgcttacatattttctgctttcattccttacttgattgctttcttcttttattttttcttccttgcttaattaccagcttcttgggttgtttgtttcctttcttgcttccttgactcttttgcttacttgcttgcctttgtattttcttccttaattccttggttaattggcttccttgtttcattgcttacatgcttgatttcttacatactgtctttttttacttaattctttggttaacttgcttttcctgtttctttactgtatttcttccttaactactgaacttgttttaaaattcttactttctatccttatcgcttggcatattcttatctcagtttattttccactaaaatgtgtactttgctttagatagtactaggttactatttgaaattctacagatggagactctcaaagggtacttttccctttaactttctctctttgtttctaattttgttttttagtagttttaattgttcagggtttgactcaaaccgtttgagagcttggtgtttacttgcaaccacattcttggattctctaacacaaggttgtaaggctgaatatcgtgtgaatcagataaggaataactattttaacttatcttgaatcaatatacaattatattaatcgaaataagctagagaaaggtttatttgtctgtggtataagcagtggcataagttgctggaagaacttgcacgatagagtaaaacaagaatatcaactagccacgaactcctacttgtaagttgccatttccaaatctcaagataattctattggatcggacaatttgcctttggttatgtatgtattgctggtcttgtatacatttgcactgatggaacactgttatttgtaaaccgttttggattttgttagcttaaagcaccgcaatccgtagctgtgaaaaaatgtgagagatcaagttctagagaaaaaccaaaagctaagcaagattcagatttgtggaagtaaagcttttgcatgataattcaataaaatcatattcaggtcttggtttctttctatggtttggaacttatatagtatgttctactagtttttgttgtcttctcaaatcggacgcaaataatgtctcggcgtgcctctcttatatggatacaccattctgcttatttcagatctatcgcaatggagcattaaaatggtcgtgcgtcatatttgcgtatgtttcttcaatctttcttatttcttttatgcttagtctttcgacttactttctcttctcttcttcagacgtagaagattatattagtctctcaaaaacaaatattttgtttgagtactgtactgatcaaacacccattggtttgcttcacttttcacatttcattttactttgatgcagccattcgagtccaaagtcaagatctatttagagcaatcaaaatacacattttgaaaagaagtaattgtttaattttgttattgagaatttacttgaagttttgtgttttcttgaattgggaattttttttttgcaggtcttctttcatccttgcacggtgaagaacaaagactctgcttccctttccaggtttcactttgatttttatcagatatttgtctttgtgctaatatatggttatgaagttctactgtttcagatggatttcgttaataagtgttcatgggattaatacaacaatcttcagcattaatacaatttttcttttctttcactataaaggattcttattcgtttggttgttgaaagataccaagaactctcatcaaaactagagtacaattttccattgaagtagcaagagtagatctatggaggtgctttccaggcatgtttttactataacttaatttcatttgtttgatccaacttcaaagcttcattgctataactaattttttcaaaacatttcaggattttgaagtaacgtgaagctgaatattgaaaatatgcaaagacaaaaaggtaacatatagttttgacatgatatctctaacgattatgccacttacatatccattaattagtattcaataagtaactttgcatccgaaacgtatataaccatcctagtactatgttacaacttcttaactaacaattggagttcagggtgtaaagaaagatcaatccttttatttgggatgcttactgtcccttttcggttcgaattacatagtttcaatgagcgtccaagaaatttgattgggattttcgcaggctcgagcgggaatcagggaggttcacttccattgacttacatcgacagcagaaggcagtagtcaaggtgctctcctgattaggtgatgaatcttcaaccttaccaacaaatgtcttttttaccctttctctttatactaattttattttcccaacaatgaccttatcaaaaaggtggtgctctcgataattgacaagtgtggtcttaggttgttggctgttgctctcgtttgacatcgatactcatagtttcagtcttcttttgtttttctttactgcgtggaaacaaatgttcatttgttagtgtttttatttccctccttaggtggtgctagagaaaacgaaggaaagcctaggtgcatggtgcaacatatggtaatttgttggattgttgcccccaagacatgaaagtactgaaaccattggaagggctttgactctcggtgttaacatcaagatgatcactggtgaatttgctcacccattgatcgtgttgtaataataatacacctttgccattttccactaacattctattggacgacgtaggccagataaccagttgtaaacttggaatgggaataaacatgtatccatcttcggcttttcttggtacgcacaagtggtaggaaccaacaaaccccatggatgaatatgtctctcaagtctcaatggtacatgtcatgaatatctttcagttgtctttgcgagaaccaaattgtcctaaaatagagtttctgacacaggttgtaagttttgtcacgtaagagacatggagaacatacctggcagagaatcaagtgaattcctccaaagaactgatcagattagaaagagctagtgtcttgcggctgaataggtaaacattcttagaataaaactactagcaaattggaaatatgttatacccatctttctcagattttttcagaatgggagatatgtaaaggaaggaacaaatacttttgacaaactatttaggccatcgtcaaagattttgcaacatacacatccattaattagtattcagtaagtaatcttgcatctatataaataaccaacctaatactttgtcagtaacaatctcactaaatgtttgtataattgtgtatggtaggtagacagtggaaagaagtgtctaaaggaaacttgaacccagatgtctgcatagaggtaaatccacataagatctcacaccctcggccaagttcacatcacacattagaattatagaaccttggtaagtagaataaacctacttaactacctatgatagttttcaacttaaaatctgtgtgcatcgtgattgaattctataaactcaatttgatacatgccaaaacgttgatgtgaaatatgcagacgtgtctttattcggtggagcatggaattcttctcattgtagatcgctgcttgacattgtttgacaatccactggtcgactctcttcacacaacttacaatgagctcaaggtaggttaatgaactcgagctatgattgttatcagcttcttgcatatccacatatacatcaataaattccttcattcgttgaacatatgtagttacagaaagaatgcaagaaccagagtaagaaaccgatttctggaaaagataattcaaagaatctatacaggtatcgtatcttcgtctgtagagatttaatattttgacttttctcttatagcttaaaaatgggtgtgttcggcattctaaatcaatgtcacaaaggagacaagcggtaagaaccaccaaaccccattgacgaagatggtctcctggaaggtaactgtcctaaaacagagattagcatgtttcagaagtttttgtgagaaccttactgtcctataacagacaatttattttgccacatgttgtagatttggcacgtaagagacgtagagaacatacttgttggagcatcaaatgatttcctccaaagaaattgattagattgggaagactagtgtctcgcggctgaataggtaagcatgcttggagcataacggctagcggcaatgtccaactgccattaggaacaacctgaaaatctacatcgacctctttgatagcgtgatatagtcatgtgtgcatgcatacattcatatgtgcatacattcatacatccatacattcatgcatacattcatacattcatacattcatacattcatacatccatacatgcatgcatacattcatacatgcatacattcatacattcatacatccatacatgcatacattcatatatacatgcatgcttacattcatgcatgaatctatgcatatttgctttcttgatttattgattgcttatttacttatttgatttcttaactagcttgcttgttttttttttctctctgtttacttacatttataacttgtttacttcttgtttgtttctttgattatttgatcgttactcactccatattgcttcatttcatttcttaatctgtgtgtttacttccttcttattcccttcattgtttgctcagaccgtacatgcaattcacttgtttacttatcgtcaatttcttgatttctttgattatttggcagtcgcttattcaactgattcattcatggcttagctctttcacatgtttcctctttgattctttgtatctttacttctgtagttgttttcttacatgcttactttacttgttttattgtttctttcatttttttgtttactcacatcattgtttatttatttatttgcttctatttagttatatacttctttcattgtgtataaattttttgaatttatacaaatgtactcatataattttgacaacaatatgaaaaatcgaaacactaataaatatccgaataatcaaaccgaaactgaaatataaatattatttcaaaagttattattataaatctaaaaatatcaaaataaataaatcaaaaatactaaaatacctaaaataaccgaaaaatccaaaaattaacaaagttttttttcaaatctaaccaattcctcatatataaaatacatgtatggagcctccaaacctaaactctaaaaccataatctaacctgaactagtacccaaacgcctaggcctaataacgtatatgccacttataaaactttataacatttccaaattttcattaactgtataataatttattatagatgaatataacactttagctagagatatttcaaaaaaggtcactcgggatggtagaataagatcgtatctatctataagtggacctttgtggcttcattctcttaagatatattagtcgacacattatacatgttaaattatatatattaatattaatttgaattgaaagtaataaattattattgttttagttgatacaataaaagaaaattttaaaaactcttaccaaatattaaattatttttgtttctacaaaataactctaattagtcaatagttaatacaattgaacaaaaaaaaaataatttgatatgtttaaaaagtattaataaaagatagtaaaaaatagaaaatattcaatagtttctgaaatgaaaataaatttttgttttaattgtttatattaactaaaacaatcgacataaaaaataataatattaatattgatgagagatatgggtgcctcgtcatcaacggtgcagaatctctgttctctgagtcggacccgtattcgatcgattttgtgtcgaccggacggcagcaggattagccggtgagaaattccaaaccagcgggtgggttaaaaaagggaagggagctaggaaaaagtttcacttttcttgaagtgaactatggatcctgcgcagcgaatcttcaggtcaaggtggatgcttctgtgtcatatcgctgcaagttggttactacaagaactagtcttaccatagtccatagatggttgtttgaagattcctctgcaaggtaaagctacgaaggagatgatcgagcttaacgttgagaagttcattgatgtgggaacagtggatcaccgcagtgaaactccgtactcaattcctaaatcgaagctgactctagagtatttgagagaccatacttattttcgtgcaagaacctccatgattgcagcagttacaagaatccgacataagatgtgtcttgcggcgaagaataggggccggactgcataatactattatttcaagttattcactgcctaactctattgtcttgtttattttaacgtgttagcattagaaccctaaggttcgatatattacagtgatcaatatgacaacatgtcatgtaaatgtaattccactctccttttttcttcttcttgatatgtaattcattctcttttcttctaattctaaacttttttttttccactcattctaaacaattaataaactcatttcttataactttttccttttgaacccaaaaaaagaaacttttttgactagaatccgatcaactatggaaaaggactattgtgaataatctcctgaattaactagaaagtgccaagagctccattaattttaactggattcaaacatcaagatcccaaaaagatgcaacacttgtaataataatgataaattagattttaaccgcgatacaccctgagacgatttattttctaaaactagtgatttttaaattaaatgattatgcattatattgcaaatgacatcatgttataaaatatttttttatataaatattttaatatatagtttgcaattgttataattatattatatgatattttggaagagttaaaaaaataccaaacaaagttgataggtaaatcataatttttaatcttaaccatttgttttaattttaaccagattcattattttaactggattcaaacatcaagatcctaaaaagatgcaacacttctaaaactaatatagattaatcaaatcaaaacattactaaatcaaaagttgagatcacaatcattagaacaagtcaatcgagctaaaaatatccaacaaatgtgtcaaacttccatataactctgatctcatgaactaaatatggattaatcatcctaatctccacttaatccggaacaccccatattccaacactttactgacatgtgtcagaagatgaaagctccatgagagctatataaattatggaacctttggaggaacttaactcaattcaatctcataatcacacttttattcaaagaaaatacttaactttcttttcactaaagctattcgaaaatgtcaagcaactcccagaacattagcttccaagctggccaggccaagggccaaactcaggtaatcctaaactataatattattactagggccaataaaaaatgattagggctctaaaacttaaagtaacaaacgtttattcttaaaacacttataatttttaaagcaggggaaaagtttttaaattaagtatttcaatagcaattttgtctgagattttttcttgtagtaattaattggttgatggtgttcaggagaaggctagcaccatgatggacaaggctagcaatgctgcccaatctgccaaggagtctctcaaagaggttcgtataatctagataattttcatgattaattaaatcgaattcttgtaatagtatggaactaattaaattgtttcatttataaacatttgtatagaccggccagcagattaaggagaaggcacaaggagctaccgaatcagtgaagaacgccaccggcatgaacaaatgaatacaataatcatatgattcattatgttattttttttacgaataaaaacaataattcattttttgaaacctaaagattaggttcaacggtttgattattcagactgttgtttctttctttcttaatattattacttcttctcttggatttttgtttctgtttattatctcatgatcatgtaatctttgagatcctttttcattatagagatctctaataaaatagcattgtcttatgatcgtatttttcttttctgctttcattcaaattatacgaaaatgtggctgaattggcattataccggtatggcatatgtctttttgttagggtggaaaaagaaaacgtataactgaaaaacccttcaaagtaaacaaaaaaacaaaaattgtttttattaactaattcgttttattaatgagaaaggcaataacccaaaaaaaaaattcaaaccaaaccgcatcaaataaataaaaagttctcatgattttacatcttatataaattatacttagtatggccaccatttgagatttattaggaggaaatatataatggatatttgtattatatcatgtatttaaataatgttcccttcgcatggctctcaaagcctcttaattaagacaaagttgttgacaaaaaaaagagactataaatcattattacttacttttataatttattaggtaaaaaacaaatacaaaaattttcagatgacaaaagatacaagaatataaaattaaaaattaagaaactaaatatacaatcttatatgtgaaaaaatgatactaacaattgattatataagttattataaactaaagaaaagatatatcttgatacaacaagtttagcttcaactacacaaatattttcacacaaaaaaaaaactacacaaatatttaaacaattcactcaatgttttttctctctcttgatttacctcattcttgcatattcttgtacataatatttttgtttttaatggatgtggttggcgaaaaaaataaacaatattgttttgtttagaaaaatgtaaacatatgaaactgggttacacagtaatttatatgtatcttgtatacggactcgatagaattaacataaaccaaaaaatcaattattcaagaaaatttcatcctcataaacacaggatctaagcttggtaagaaaagagatcaaagaatctcttaagtgttcaagaaagaataattacttttaggacaaaaactcagaaggcaacttggcatctaaagactgtgcaaaactctcacttttaggtaatacgatataaataaataacccccacaaacttgagaagagaaaagctggtggaagaggaaagatcagatttcaagatcaacgaggcaatgagtctgcatagggattcaatggtcccggttaactccaggttagagaacatggactctccgattctctctaagatttgtgcgtggggcgtaatgctggggctctttgcgctttcattattcgctatggcctatgcttgctatcataagcaaacttcgaattcatgcatcgaagagaaacaaggaaagaagcaagtgttgaagccactagatatggaaccaaagattgttgtaataatggctggtaatgaaaaccctaccttctttgctaagccaacccagatcaatgcatgaccagtattgtcttaaatgatcatgatgtcaaaaatcacaagattagtgttatatttttccattcattcgctggacgagaccattaatattctactgatatatttatatatacttgattaagttttctataataatttttttatttttctttgttaacttttcaataagaacaattgtttataaaattttctatcaacagcaaaaaataaattatggcaaagatatatatgtctagtctaaaaattcttcaataaataattcatagaaagcaaaaaaataaagaatactatcaagaaaaaaataaagaagatagttaaatattagaagtggatacaatatgtgtttgtgttcggtttaagtaaaacataacatatagagctgctgacatgaagatggccaagacagaccccacggctacgctaacttggaagaaaccaggctccatattgtttcttacgcacttcaaatttgttctttctcacctttttttcttccgtgtcttcttcactttctcggttgcaaaagatacttatatatgtatgcagggccggctcaacaaaacgtgggaccctgtgctcgttaattttttttctaatatatgttctatatgtttagaatttagtttgattatacactactgtttgtaaaatggaccttgattgcttaaagaaaatgattgaaaaaataaaggaccctgtgcattagcaccaagggcacaccctctaagccgggcctgtatgtatgtattgaaacaaaagtttagattttgtaaaaaaacggtgaaattggtaagttttacattatgctatcaataaatttggaaattttacatttagtcgttaaggagcattaactaggaaaaataacaaatattccattttatggtagctttatttaaagtgctagatcctcgaatatactgtgttgttcgcatatgtgtgtgttaatattactatcgaatatattgaactatacactttttgagtcaatttggttaagtgtctttaattagttatacacatgttgatcatagatcctctttcaccgattaaatcacatcagttttattggttttgcaactactttaatgtttttttttcagcaaaccatcgtatatgccaacaacaaggtccatcttatacgggaaaatggattaaaaaaaatctcacatgaaaaaacctacgtaccttatggtttttaaatgattttaaaccctcgctttttactaaaagattttgtgtaaaaaagacctaaaagtcgtccatttctataaatttatcatgcacctccaaaaaatgtataataatattacaaaatcaaaaataatatataatataacatttatacatatattgtaaatatatatacgatcacatatatttgattttcaaaaataaaaaagtatagttgaaatctttgtcttgaatgctttgattttgatatattacttatcaactttttaaaaacttgaaaataacaaaaaggagttattttggaaaaataattcgtaaactagaatttaaaaaaataaataacaaactaagttgtttttaaaaatataataatttatttggtatttatttagtttattaataagtctaatattaaaggttattttattatttttaaaaaatttagagtttaaaaaatcacaaaaaaagttgagaaagtgggtgattggtttaaaatttagaatttttgctgtacagattttactgtagctgtgttggatgtaactgtaacttttattgctgtagaatttttgctataaatttttaactttaaatatttataaaaaatggattactaaatataatagttgtaataaaaaaaattttataataaataaaataccttgtattactaatttaaatatatatattatgatgatatataaaaaaaggcctatgaattcttaataaaataaatctaaattttacctaaaattaatacataaattcattgcaatctcaattttttcatttaggtttagtaattatcagttttttttagaacttatctttttttttgttatatatttataatttaattttttgtatttatctaatgaattaaaatttctacagcaaagaaaatagggctttgagaatttactctattacatccttaaaaaaaaaaaaaaaatgagctataaatttaaaaataaagctacaacacgattgattagtaatcaaggctttaaaaaaagttaaggttataagtcagacttaaaacccaaccaatcatgcacaaaatttctacatatttttctgaaaaataaggggttcttaacctatttttcctttttataccaacaatatggtatgtcgagataactttactaagcgctgttttaaaattaaaactattgcaatatagcctaggtccatggacgtaacttcttatcttttatctccctcctatcttttaaagagaggaagcttgatttttttttgtcttcgattaaaattggttctttccggctaaatacattttttctatatattctcggctaagttcgagttctctcttagccgctttggctatattattgtttgttgtttttgttttctccctttttatagttattagatctcttctaatttagaagagataaatgtagtagtgtttgttgggagagtcaaagatcatcaattgcttgattctcttgcaaggaaatataaatcctcataccttcttattgggaccgtattttggttatggatgcatgttctccttttggctgggaatcgtgatgagtggaattcagtgactagtgtagaacttatcagaagagcgtgttttactactgatttgatctcttactttgccgcgtcttccagtgatacaagaatatgatgactcatggatctctgttctacgccctcgaaaaatttagctaaaagtggtggtatgatgaaacggaataagcagctagaattggtggtaattttcatcggaaaaattggattcagccgatgtttcagctctggtggatgagtcatttcgtgtctttccacctccaacttgcaaaacaacacgtgttcttacgaggtcagctagtttttgctccgtaatgctttattttggatctatgttggactttgttttttttgtttttttttgtcgagactttgtttgttttgtattattggattctgatacacttagcaattttccaatttggaaatcaaatacgggatggacgaccaaaaaaaataaaaatacaactattgcaatatatgttttcaaaaacaattaaaaaccccatcactttcgtattgctttctaactataaacttcctatattactttttaattcagtagttttttttttaatacgctttaaaattactttagaaatcgagttataacagttcagtagttttatatttggcaaatatttcgatgaaagataatgttttaaatattatttatcagcccgttttctagatttgtttggcatctctatatatttggtcaacttctgtcattataagctatctttacaaattcgtacgcaaccttgaataccacatatttttttgccttatcgagcgcatgttaattttcttattaagtgctgctgttccaaacttttaaatatgcaatttgctttcatctctttcgttgtaactgagaaattttaagagaataacgatcaaacacagagtcacatgtcaacatcttctcagtcgtacccaatgagtggcggcgatgatcaacacagttacatccataattcctcataccaagtatgtaatgtaatcatcatattttatacgattgtaactatgatgattctgttattcctagaatgtaaccataacatgcaatttttgtgagactaatccctaaatatatctagtacactgtaatgattaacatacctttgtgatacagaaagcaggcatagatggggttcaagaaaaggcaagacaatacattttagaaaacctcgatctccttaatatgaatcccaatcttagtacttttacaattgcagattttggttgttctattggccctaacacttttcatgctgttcaaaatatcattgatattgtgaaacttaaacacctcaaagaaagccaagaagatagtcgtgtggcgcctctcgagttccaagtttacttcaacgatctaccgaacaatgactttaacacgctctttaggactcaacctccttcctccaaacaagaatatttctcggttggagttccaggttctttctatggaagggtgttaccaagaaatagcatccacatcggaaacacttccttcacgactcactggctttcaaaagttcccgaagaagtttgtgacaagaactctctagcttggaacaaaaattacattcattgtaataatttgatagaagaagttaccgaggcttacaaggtccagttcgaaaaagacatgggggtctttcttaaagctagagccgaagaacttgtgcctggaggattgatgatcacattaggacaatgtttgcctgatggtgtggccatgtatgagacatggtcaggtattgtgaaggataccattggtgattgtcttcaggatatggccactttggtaagatataaaattccaaagtatttttttttatatacccaaagcatcatatctagttttgaagcctagatcaaatatttatttgatgctttggaattggattatgagaaattggtagtaataaagtgttttttctcctttgtagggagtaaccaccgaggaaaagatcgaaatgttcaacttgcccgtgtattttcctcaagttagtgaattgaaaggagcgattgaacaaaacataaggtttacaattgagatgatggagattgtaagccatccattggaggctgtgcaattatccaacaacttcatcacttccatgtatcgagcaattctctctacagttatagaaagacactttggaggtagtgtggtagatgaactattccgtcaatttgctaagaaactctccgagcacccgattgattttgaaaagtgtaagaaacaaatggtctatcatatcgttcttaaacgaaagtgaatattgagattatccaaaactttgtgtattgttcaaatccaaactgtttcctcctttgtaaattacgtttaaaactttgaagttatatgtcttaagctttatcaaaacagaggaagacctaatacatgtataaggccgtcattaactcaaaggctaagcccatttagcctaataccttgttccattgtgttatctattaatcggataatcataataacaatattaggcatcgatattgcatgtataggaagacaccagagcaggagtgaaaagttactgaagacagcagagcaggagtgaaaagttactgaggttataaatcttgattgggtagatatactaatttataaatattgagggactctaggtgatagaaaacatagactctctgttagccagatggttttaagttatatctctacagatgtaacttatagccagaaggttttaatttaagttatatcgtatcgccaaccatgttataaacccgcaacgagggatgctttgactagatcatatcactctgtttcttagctattacctaattcatcaataatttattctaattttctttactaactacttaaatattagacaaagaaaaaaattgttaacaacgggaattctactgaatttgaatgtagatggtgagataatgacagtggtaataaaaacaactagactaacatgtgtgaatctaataattttaactttgtatttggtgaagatatttgcttaaactatataccaccacctccatggatgttatttttctaaataaattttatttttatttttctttgaatgtaaaagaatcactgcatcatctaataattagatcaaagacaaagagtcaagaggacaccgactcatcatccccgtaaagagacaaccgaatgcaaacaaagatagcacacaaatgtggacatctatttgtacataagtccgttgcatatgcacatcttaatttaaatcttgatactatattcaattattaagtaatgttaactatttttttttgtcggctgaagtaatgtttaactaacccttttttgggggaggggaaacagaaaaaaaaaaaaaaaaaactattaggaaacagagatattactaaaattatattgggatattaactgtctattgttgccacttataaaaagaaaatcagtctttctatttttattattcgagccttgaaaccacaattatatttcagcgaacgcaaatttagtcggtatgatttggattagcgtcatactttttgtgaaaaatatcacttgatgatacgtatgtaaatttgatttataatatttagtattataaagaaaaaaggtgaaatattcttagatacgaaaaaaaagaagagtgcaattcatatataccacaaactttacaaattcattgtgttttttttttcttaagtttatgtaatggtctaaatactgtacgtcgaggaaagagtttttagaagtttacaaaggattcttcaaaaaaaaaaaaaattgtaaaaagtttaagaattggctctttatattttataccatttaccatttctttaacgtttaaaaatctttcggaaacctaaaatttgtggaatctttgtagttttggggtttgatcatttttttaaaaaaacataattatttttcagttcttgagcattctttgtatatatttctatatttattatagaaaactagtaaatgatgacgttagttcagaaatcagaaagaagataaaaagtggcactatcctaacatgcatgttatagaacatgggtttgatcagaacctaacaccaatcttcaggaaggttcgtgtttggtttcgtatacagagaattctaagtgtaaagatacattcctctcatgctttaatgtaaaactaaaattgccgcactctctttaatcacacccattaattaatttaattacttagtaatataacctaattaatgttatttttcctcggggtgctatgaagagtagaaacatcgagttttaaaaaatagttttttcaactaccgtagtattggtgaacctaattaatcgagccattaagagaagacaacacataaacaattagaaagaaacaaaatatttacataaaagaacaattattctttttcgaatcatgtcggatatagctttaaacgttagaacatataagctgtccttaataaagtaataaaaacataccagcagcctttattcctaccacatgcatatacttatatacatacgagcttactcttagcaaatgcaaatacacctctaagaaacaaacctctctctctctctctcatcaagattagggttgttgatggataaagaagaatgcagcagtagtgaatccggttggacaacttatctttcgtcgccgattaaagtagatgaagatgaggtcgtggatgaggactactactatgaagggtataacatttataattattcgagtaaagtcgaacacgaagaagagaggaacaaagatagcgatgattcaatggcctcagatgcttcgtctgggccaaattatcagcggttccaccaaaagaacaaggcgttggatttgaagaacgggaaaaatgaaggtaattctaagagtaaaaatgatgatgatcatcataatcattatcatgacggtaaaaaaactagtaactcatacaggaaaaaagacaagaaaaagagagaaaataagagtacctataggatgaagtgattaatcattgtatgttaatgttagtgttataatatgtaattagtgcttgtatatggggatgttggattattatttcctaatttgtttggggttttttgatgcctcaaggataggaagatgattcttttattatttattgaaaattatgtgggatatgtgttgattgatgtctatattaattgttgttcttgattcataaatgttaatgattctatcataaactcttttcttccgattggttgcaattcgattcgtattagatttaatttacttgcatgtttataagaaaaatatttaatattcaataaagagaaagagaaagtatagaaatttttaaaattccatcgtttaagcataggatataaagtaaatatataccacttagaagttcaagatttaagtttatgaactcgttttcaactaaaatatatttcttaacaaatactaatattaaacagataatgagagacgctcaaagaaagtaactgatgattgtgatgatgatgacgtgtaaaatgtaatcatccattatatgtacatatgaatatatgataagagaagtgaaggcatgcatgtgtagtgagaggtgtttccagagacaagtttcaattattgtcatattggggatttgtgtgtgttttgcccaaaactctctgaaaaccttctgatctgaatagttctgggtgtaaaaagaaaatggatccaccgcagacacatgcaaccaacatgggaactattccacacaaattcaatattaaataattatcatgtaaaatatttcacaaattgaagccaaaaataatgtgcttatttttgtctagatgccagaaattatatgcttcaccaatcattatttggtaactccggataaaaaatatttgtttgtcgtatgtggagttttaatagtttaagttcgtgtgcatatatcttcttaggttcaatatatatatatatatactagattttatctccgcggtgacaatttatctttttaaaattagtataattttttttttcaaattgtatctatctataatatatttttattttatagtttacaattgttattaagtaacgtcctaccaaacccatcccgccaaacctgtcccgtaaaaaaaccatttatttatattaatgttgatcttatttatgatatgtttataaatcattgtctaaatatttttgtcgatgcgggacgttgaatccatacattttttgctaattggttaatatacgttcatttttaaaatttcgaatcataaaatatgacggaataaattaatatttttttaaactctatatattatataatgatgttaaaaattgtaatatatcaaacttattataagtttaaatattaataatattttataaattttaaatatataaataataatatttaaaaaattaatatttttgcttataaggtaatgacataataactctaaaagcaaggatttagaagatttaaatctttagttaaatatttttattaataaataattaatgtcagtgacatgacattgtaaataagttcaaatacaaaatttatttatttaaacaaaaaacgtttagtaagaataatatttatttaacaaaaaactttgttttaaaatattgttaacaaatatgtttatgctaattttaagggattgatttgaagtttggtgggattaaatttgattgataatgtgattgacaatttaaatcaaaaatttaaagtaaaattaattattttgaaaaaaagatttaatgctaatggcattagattgtaaataagtccaagtccaggatttatttgctaaaatggctgcaaaaatgtatatatagatatatatattttgatttaagagattctggggcgaatcttgtaattttagtttcatctcaaacgtcactagaaccggcgatctctaggcgaatagggtctttaccaattgagctaacgacacttggtcttgagttcaatattacgtaaactttaccgaaaattttattttggagaaatctgagtctacgcatatgacgaatgctaatgtttaaagagagatttcgtgcatatttgtccaaagatagatgcaacttgatcacaaatacgtgttgattttcattctaatgaggaaacaatttgggtttggttttagagaattaaaaattgggcattatttaattcactgaattattggaagtatattaattttgtgtgtaaagtttaccccattgtgaactatcgagtttacccgcatgtttcatatatttaagggtatggataatgagttgtgaagaaagatgcatatgcttatgccatacatgctatggttttgtagttctactagtcaccaaactttggattaaagggatatatctcctggatctacaaattcttctaacaaaataatataccatctctttgttaccgaaatataagttgatttaattacatttatattaaggtggaattttaagtctatgcatcaagctagtcatgataaaacttcatcccactggtattatagattttcaactctaaaatcaattggtagttagtgtatttgtcgatgtattttatatattattttaattccttctagcttttgatgtgaaatcctaacggacccttctaataaattagatttcactggatccaaaatcaaaatgaattagaactagtaatgagttctttgaatattagttaagatctcttatacattatttaagggctttttaaaagatgatataggatcctaccatttccaaagaccaatgaaccaatcatcgaacgaaaacgaagcgaggaaaagaaataaaacaaacatacttgtctcaactaaagaagttactttagtaacatatatagactacagagactactttagctcacacacgcacaaacctatatataggctgagattgtgatgtatatttatacaataatcaaagtgaaaaagaaaagaaaaaagatggatcgatgattttgagaactgggaccaaactgttattattttgacttaccaaaaaaacaaaaacttatgtcatttgttcctgtcctgaccataaagtgttgtgtgttatattgaattgtatttccagcttttgaggtggtttagaaaagctgtctctatttctttcttcggctttcaatcgcaagtgtctctttcagtcttccacttacattatgttatgtgattttagtggctaagctctttgttttcttggccggtaagtttctcacccacacgaattcgaagaaaaagccgtttgttttcttgactggaaaggggtctccttttacgtaagattgtttgtttgtcttcttgtctgagattgatgt

SEQ ID NO: 790 - DNA, 71736 bp, Arabidopsis thaliana
aagcttgatttaacattttatccaagttataggtttacttatgccgctgaacagatttaccaataatcaatagtgtaatttaggtttttaaaaaatagcattaactgctttctaagccaaatcttgcaaaacctcagtccatgcactaccaatacaaggtactaaaataaaataaaatacaaggtactaaaatactacagataaaagctcttctttgcttgacataattagatttacgagagtttcacacacaagtacacaaccatgtaaggtcttaattgtttttgtttgcgttagatttacgtatttgcttttcatattcttattattttaatcacaatcttaattcttttcttaataatttttcaacataaaaatgcaaatggaaatggaagaaaataaaccgtttacggctggtgtatatttttttcaaagacactacttaagccaatttagaaagaacaaaattggtcattataaacgtaaaattttaaagagaaaaagaagaaagtctactgttagtaattgatgcttgtatttacattttgcaaaaatatttatgcatgtaattttttttaaaattatacttcagcaatgtgaatttttatcgtttgttatgcaaacaattgtgaaacaatttcttacttctattcacgggcaacacaagtttgaagaactctgctttaacaattactaatttagagtcttaattaaatcttaagctgagacagatctctggatatacatttgttgatacatactagagccccaaaaaaataaaaataaaaatcatctatacaacgtcgtcgtcgtctctgatgcaagagaaaggactctgattctgaagctgcatatcactaatcatttgcttaagctcagtggtttcctctttgagctgaacattctcttcaataaccttctcttgagactctaaaacgcagttaagcttacgaagcagctgatgattctcatccctaagccacatcacctgtgaccaaagctcatccacttgtctctgcttcctcatacgcgatcttcttgccgattctctgttagatatcttcctcttttgcttcctctcatttattatctccttatgattctcttctgcttcatctgaggtcgagttgttgctgctgatcaaactcatgaactgtgaagtgttcacgccagtttcgaagctgaagaatggattagggttttgtccgcaaaatggtgaggatgtaggaatatgggaaaggtacgaaggtggacaaccatggaggctaaaaatgttggtggatggttgcattatcggtggagacttgggacgcaaggtagggtttactcttaggtgatggaagaaaagaaagattgtaggatttagggaattgtgatgaatgtttggtgtgtgtggtgagaagaggtgttcatatagactagtagggggacaattgtggaccatggtttcttcatttgggtcaaaccaatataaaagcatctaacaatcatgcagctaaaacgtgtatttatataactttatttattatttaaaaacacgatctattttttcacctataaaattattgaactacttagaacgaaatctaaataacttattttttaaagcctgtctaagatttattagaagttggttgaagtcttagggtgaaaaatggctttgtaaatgaatgattgggattaattgagtttttcttttctttcaatggctaggaaacaaattgttttttttttgttgtgtggaaatttcaaatatctttcaacttattttttaaaacctatctaaaatttatgagaacttggttgaatttttggggtggaaaatggttgtgtgtaaatgaatgactgggaataattgagatttttctttctctcaatggctaggaaacaaatttgtgtttttttttttggaaatttaaaataactttcaacttatttttctgcaaaatagtagataaataaattgaacaaactacttttataatttggtcaatttttttcaattttgagttgaatgaattaaatcattttttaataatttattcatcttaaatagtaaacgtttggagaaatttcaaaatgtccattttctaataccgtaccaccactttttgaaaatgacttctatctaaaatcttttaaatattttattatattaagcttggtttaatatatatacatgtaaaattacacatttagaaaaaagtaattaaagcatataatattttatagaagtgtcggattgacacatatagcaatcatgcgtaattcttcattttcgtcgtattttgctaaaagttcgacctatgtaattagattctgttaggggaagggtggtgattttgaaatttaaccttttgaaacccaagaaacatatgggcttttataaccatccaaatttatattatctttaatttttttttagtgttgttagaaaaaaaaaaaaatattacgtgatggacttaattagtactagaggaaagcatctcatcaagaagaacagaagaagcataaacagacctatgaatgagaccttgaaaaggttgagagaaaacaaatttaagaagctaagtgtccaattcttttgcatatttgatgtgttcgtttagttttaataaagcataaatctttgttcataagatctcaacagaaaatgaactacaaatctctaatcaatctacagtggtattcatatcacatgactttcttgttttaacatcaattctgacaattcaactattcaatcattgaccacatcggtttcttaacaatcaagttattggatatagagagccctcttcacctaggtaaaacctcataggccttttgataaccatacaaaaaaatattagtttgctctcactctacgccaacagggtgataaagctcacacgtaagtaacctgtaaatgacaagtaacactcttaaccaaaatagcttgactcgttggcttggctttcaagataagatcctcactctgagttacctagtaaatcgtacttgttctgcaggaggattgcctgcttgttctttacatgtcgacgttgttgtggttttgacttgagttgcttcgaatcgtcaatactaagatcctctatatagtcaaaggcaaaaacattgcgaaaatattgtcgtttctaatccgattgaccttaatcttcggcaaggagtagatatactgtgaccattcctgtttctcaacatcctctagaacccacacacacaactcacggggatgtccatcaccagcatcacactccaatttagtcacacctaatttacccttgtagtttataaattctctatgaaaattagagaagtcttttccatcaagaaacttgaatttctcagacctaacattaaaggaaactactagaaaacacgatgtcctagcaaagtaatacaaaaccccattgatggataaggctctaccataataaggttcatgggttaagggacatatcatcttcctccacttcaaattttcagttcctaatgtcagaatataatgaacccattctttattgagtctcttgttcatgcacaaaaccttatgttgcttgccaatcggatcaaaccctaaaaagcttcttgacgttttgtagccatttgttcaggtaagctaacatagcgtcctgtgatagggttaaatatcacacaaactgaagcctttgaggtccaaatatcatggacagggatatggaacaaaccagagacatagctacacatgtataggttcatgtcttcatggaacttcatatgattatgaaaatctacttcaagggacggattctgagactgaggcgaagagtagaatatcaaaccacttgcttttaagaccgcaaataaaagacgtggacgagcggatgacttcgttatgaacaactcggtgaaatcttgacggtaaagtatggacgcccatagcttcgacacgcaacgacaccgagcgattgactttgaagacaatctcaatgctatctccacaaagagatcatctggaatggaatcaaaagtttttctactttccatgatcagacggagaaagatctttgagaataaaaatctcacaggctcactctacaaatagatttggaataaatctcttaagaggtcgacctaattaattagatgatgttaattaatcttagggaggtggtggtgaatttgaatcctattaggatcgatcggcactaattaacctaaggcccaaaaaatatgggctttttaaccatccaaatcttgcttttttgaagaccctaacatatagtatttcacaagaagtcaatcaagaaaggacatgatacttcatttttggtcacgctgcttcgctgcgtgactcacgcacatgttaacttatacctaacatatatttcccaagaagtcaattaagaaggacatgatacttcgtttttggtcacgctgcgtgactcacgcacatgttaacttatatacctaacatagtattgccactcattcatgaatttttttttgaatgaaattatgatatgatactgtgaacgtgttttttcttattctattcatgattttttttttgaatgaaattataatatgattctgtgaacgtgttttttcttattctatgcatgcttacgttgtacgtagtgttggctaaatgatttgaggggacatcactttaggttttagtcacaaaatcttttaattagaaaaaataaaccaaaatgatccctcacgtataaaatatctaagtctgaagattattacaaaaaaaaaaatgaagaaataataaattttcaaaaagaaaacaaattagatcaacgtcagtatatattaagggaaatttgcagaaataactagcaaaaaaactataatttactaactaaccatcctaactatgtaactataatattttctgtataatatgtaatattactaaatttgccattgttgcctcaatactttcagcagccaccaccaccgccggccaccatctattccggccaccaccaacactgatcaccatcaactccggccagcaccaacttcagccaccaccaccaccgaccaccaccaccgccaccatcatcaccggccaccaccaccaccggtcaccatcaccaccggccaccaccaccgccggccactaccaccacagcaaccaccacaccgatcaccatcacttccgaccaccatcaactccagccaccaccgccagccaccgccggccaccaccggccaccactactacaatctccaaccaaagaaactaatttaataattttactaccctttagtgttagtttctacatttgacatattatagtagtgttagttttttaaataaattatcaaaaagtgttagtttcgcaattcacccatatattaaactgaaaaaaacaataattttttctctcacattaaattaaattaaatatttttttaaaatacaaaaagttaaaaaaaataacgtagatcaatatatgaaactgaaaagaaaaaaaaaacatttttactcacagtaaagttaataaatattatttttaaaacacaataaaatgttggaaaaagtcaaaataaatttcgtttgaatgtgcatttaataatttggcttcagcgccaacaaacacaaaagctataattttccctctccttcctttcttcacctcccattctctgcttctttcttcaactaaaattctttttccgcagagatcgatttctcaaatctctgtatcatcttctccattgtttagaaaaactagggttcttatagatcctcttctctctcgtccctcaaatctctcgtcgacatcatcttacgaagatccacaacaacatctgaagaaaatcgcaagaaaacatccaatttcacaaactctaggtttccgatttcttcttccttttctctaatcttcaatttgatcaatccgttgcaaaatcgaacttcaacatctgtatctaatccaagattctcaatgatttcaggatcaatggagaatctagatgaaatccgtaccgatattgtcgaatctactgctccgttgttgcaagaatcatcatcagagagcaacggaggaggagaattcaacggagcttcgtttagtggtgcggttttcaatctcgctacaacgatcatcggagctggtatcatggcattgcctgcgacgatgaagatcctcggtcttattcccggaatcacgatcatcgttctcatggctttcttaaccgatgcttcgattgagttcttgcttaggtttagtaacattgggaatcaaagatcttacggtggtgttatggatgattcttttggtaaatgtggaaggattatgttgcaagtttcgattctcgttagcaacattggtgttttgatcgtttatatgatcatcattggtacttatctttaacttctttgggtttaggttttagattggatctaatatttggttttataactctgtttttgtttggtattttgaaggtgatgttttggctggtaagaatgaatatggaatccatcatgctggtatgcttgaaggatggtttgggattagttggtggaacagaagaacttttgttcttcttgttactactctcactgtctttgctccattgacttgcttcaaacgaattggttagtattcttctctgtaccacttgtatctgttgataggcttagattgtgatggttagtatgcttccttgcagattctttgagattcacatctgctatatcagttgctttagcggttgtttttcttgtcatcactgctggaattactatcattaagctgtttactgatggtttgatgatgccgagacttctacctaatgtcactgacttgtcgtcgttttggaaactcttcacggttgttcctgtgcttgtcaatgcatacatttgccattacaatggtaagtaaacagagaagcctctttgtctataattataaacaaggaagatctcatgtttccattggtttttgtttcagttcatagtatacagaacgagcttgaagacccttctcggataaaacctgttgttcgatcagcacttgcgatgtgttcttctgtttacgttatgacgagtttattcggatacctcttattcggtgatggtactcttgatgatgttcttgcaaactttgacacggatcttggaatcccttttggttcggttcttaatgatgcagtgagatttagctacgcagctcatctcatgcttgtgttccctgttgtcttctatcctctgcggattaacatcgacggtctcatctttcctacggctccaccacttacttcctctgagtctgatctgaggtttggctctattactgctggtctcattgctgtaatcttcttgggagcaaacttcataccaagcatttgggatgctttccaatttactggagcaactgctgctgtctgcatcggtttcatattccctgctgctgttatcttaaagtaagatccattgattcataagctaagagattttggttttggaacctataatgaatcattatctgaattgatattttcttgtcttctttcagggatcgtcataaccaagcaaccaagcgagacaagactatagccatttgcatgatcgtccttgcggttttctccaatgcaatcgccatttacagtgacgcctacgccttattcaagaagcacacatacgtatatccaatatgaaaaccagtgatgattctgtttcttctctcactcactctatgtgaaacgaaatatgagaagagttattggtgtaagatgtctttagatgattttgaaccacatgataatagttgtaaactctctgtatataaagagaatgatcagtttttctacgtttcttttttagttgtaaaaagggtctatagaagtgaaagatgttcctttacatcatcttcatcattaatgctacacacattcaatatgagttaattgagtgggttttggtcgaataggtttgcattacactcgtacttagaatatgagtaggacattagaacagagaaatagagagtttcatagaacaaatatccaaaagcgtatagatcaagtttggctatagaaccaatatccaaagtaacaatattgttacaatgtcattgtgaatggtaagaatacaacaaacagcaacaagtgtatattttgaagtcattgcacaattccaaaaacagagttataaagaaagagcctcaaacaaaaggctaaagaagaagagttagagaaatgaagaaaccgttaactatctccatgactctgctctaagctcaagtgctggaatcagcctgagaagggaagcatggtctccatacagtttctttgccaatgtccattaacgctattccttttcttgtcagtttctctctaatctcatcacttttcgcgaaatctttattcttcctggctgttatcctttcttctattaactgcgaaataccttcttctccaatttctgctcttattagtgtttttagtttcatttctttcaaaatctcggcatagctcagtgtagtgagtaaaccaagtacatcaagaacttcccttgctgctttctcaatctcaacgagtgacacaagcattgacattcgctgcttcttctgcattttctgaaaaattggaaataacagacaactttggtatgcatagttgtgaaggcaaggaggcacaaatagagaagaaggcaagaggcaagaaccttgagcttgctgagtgaagcattgatgaatttcaatgcatcttggtaagcaccagttagtatatgggcagtattcaaatcgtctaacatctttgattcaaactcagtttttagcttcttaatgatgtcttttccttctgcagtttgttcagattttccaccatcttcagacaatgcgtcttgatatggtgacagaccttcatcaagatcttgtaaagtctgataaacaaaaatcagagattaaagtcagaactgggcataaattatgatggtgtcttacttttagttcacatattcctaatacaaaatactgcaaatggacatgctagttaagtttgatataattttgaaaacaaatctgaagcactgtacctggtaaacatagtataaagcttctgacgaactctctagctgcgaggcagtgaaactcagaggagaccggtactgtgcactcatcaagaagtgcctcagagccaatggatggtagctagcggttatctacacagattgaaacaaaaaatgaaaacctgtcaataattctgcatttagccatgggaacaacatccaaagaaaaagtcgattattatactagtagcaaataagaaacatacttctctaatcgttttaaagttgtgctttgattttgccatcttctcgttgttgatagtgacatgcccattatgcaaccagtaatttacaccactatcctcacatgcagcacatgtctgggcgatctcattttcatgatgcgggaatttaagatctgcaccacctccatgaatatcaaatttcggagacagataatgaacactcattgcactgcactcgatgtgccatcctggtcttcctggaccccaagggctctcccaacttggctcatcaggctttgccgcctgcatagaattatgttcaaacttcacttcatcatatactgtgcaagcctcaaattgaatataataaaaagaaaaaagatattcaaaccttccataatgcaaaatcagcagggttacgctttctcgaatcaacagcaacacgctcaccagctcgtgtatgttccaacaactgcccagataatttcccataattcggtgatttgtcaacggagaagaacacatccccttccactacatacccacaatctttctcaatgatctgtaaacaaggcaagcatatgtatcaatccccttattgatcattccaatttcaaaattcatgatctttctcaaccaagagacaaacttaccttttctatcatcttaatgatgttgtccatatgttcgctgacacgaggctggtgggtgggagggaggcactgcagagcacccatatctaccaaatattcatcgcaaaaccgattactcaaatctaacgggtcttctccattcttattagcacgatcaataatctgcagagttccaaaattcagatactaacaaaatgtttgtctaccttagcataagaaatgtaactatcattcaaatgttcaatacagttgtgaataagccatattcaataccttgtcatcaacatcagtgaaattgcggacaaaagtaacatcataatccaaatgcttcaagtatctgcataaccagtagaagcaaaattcaaactatagaaaaagctaaccaacatgcaaaacttcaaattgagatcgggtccaaccacatcgatctaatagattctattcaacaaaaccctaatttatcagagaggaagaagaagagagagacctgtaaagaacatcgaaggaaacggcggcgcgagcatggccgatatggctgaaatcgtaagcggtgataccacagacgtataatccgattttgccaggagtgattggaatcaaaacttctttctgttgcgtcatcgtgttgtagagcttcaattccattttctccgcctccatatctctcacaatctcaccaccacaactacacggcgaagttaacaaaaacgaaaaaacccttttttcttaattgtttttggtaacttatgcgacctgttgttactttacttttcaacagttctctttcgtgtttgaagatttcaatattaaaacgggcctaagtctgagggtcggcccaaccaattacggtagccagatgaattggcggggttttgtcgatgtggaattcgggttattcggataatttaggtgttattaagatttgtttttaaagatgaggttaatacagtttcaaactttcaatgtaatagttcaattaaccaaatagaaaaatatacaaacttaatgtaacaaaacgtagtacgttttgagattttttaagctaacgcattagatgtttagaaattaataatatgtgtatacaatagttgtggaattaatctctcaatttcaaatctcttacatatattaattgtaaacatattattttaaagaaaccttattcttacttattataaacgaaattgtcatgacgttatcctataggagaaattttttaactagtttaaataactaccaattcttactagaatattaggaattagtctggactacatccggttttatgttaaaaattgatgtttttgaaatagtttactaagtctttttatttgtttttacgttttttactatgcatagaaaaacgtcatgtgatgtattcttaacattttaatagtataaacttaaatataatattaaattttcacctttatctatctatgtttggtttttttcattgtaatttttttttctttctaatttgtacagattgacaagcctcaatgaacattttttattagtaagagattgtgaaaatcacataaaatactttcaaagtaacaaccacatgcactttcaaccttcatggttttgaactcacacaaaccatcaaaattacgattttgttactttaaaacttcaaatgacttttgtgttcgtggatcaacataaatcagaaaaatttcatcaacacaagtatttgttttccgttataaattaagatgtggttttaataagtaatttttgttttaataaaaaattaattttatttatttatttattagtaatatattttaaaattatggaaaattgaaaaattcagtattatgataaccaattatatattataatagttatggaaaattcaaatttaaaaatttaaaaattattactttctctttggtaatcgatcgctaacaataatattgtatgaagataaccaatcatatattacgtctaatgaatctatatgtgtttattatcttttttgtatcccctaaaataaaccttgaaatacctaagagattttattattttcaatatgcaagggaacatctgctaaaaaggagagacgaccgtgatctttctggtaatttatttgttggtttaaatgtgaaacaatatttttagaacttttattgtttctctttaagactatataactaacatgtcttgtgagcctatatgcaaaaaagtacacaaatgataccttagatatagaacataaaaatactccgacttaaaaataaacaaacaaagaaacttgattatctttgttttttttggagttgtaggctttgatatataacttcatctttactatcactatcatttttatccttttttggcttagtcaacaagaattagatataaaaatccgaaagtaatataatgagggatttaatgtaccttttcaaacatttttgttttttaatttttgttgagataaaatttattgtttaacaaaaactttaatttacaataataaatcaagagtgtgaaaagtttggtcaaaattataatggcgattgctaatttctttcatgaagattcactgttgaaagagatgtcttgtaattgtatttcttcactgaactaacaagataataatattattacaagagatcagcatctttagtttaagtatataacaaaatcataatattaagacttgtaactaaattaacgagattctaacacttgaactcaatggattttaatttttgcaatatgaattattttgaaattataagacatatagcatatatttagatgttatcttacgattttttgtagccaaaaaataagcaatagatagttggaaaaaagctcatataattctttgagtatttgcaattgagagattcattctccaactatcttgtgtgcacattaattctctaatttggtgtccaatcaacaaaaactagacttaaaaaattcaacgttagacaataaaattgaacgttaagtacttcgattacaaatagaataaatccaaagaattcctaaatctttttcctaaattgaaacacaattgaatcctaggcgattttttctcaaaataaagatctataaagttcaaatttgcatagtcttcatcgattttatagtgtgtaaatttataaactgagtaccaaagattcgtagggcgtgcgtattgtagaatgtgtaagcttccaaatcgaaagtccaagttaaatacgaaatagtagaaaccgaaggtgaagagaaagatagtggaatctgatgattatgatgctagtgttaaaagagataattgcctagttatcgtcttttttttttttttaggaaagacttgagaactttaggttttgtttttgtttctaatcaaatcacttaacgtcctaattaattatgcgttgatgtattttaaattttaaatttgttaattcaacaataaatggggatgtgtctttcatcaagtggttaagtccatttgaatccgtttttcctactaaagttgaattctattaaatcacgttactttgcatagtagaaattaattataaatcgaccttctcaaagtaaatatgtcaaaagaaaaaagaattcaacaataagtttgagaattaatatatacacatgttagttatggaattaatctttgaatccgaacataataacaattatgtctccctaaaaattgaaaaattcgggacgaacggtacgggcctaactgggctctaatagacgggccgggccgtttgtacatctatttaccgtttagtttatagcattttctactgtataaagtaaacggcccaaattacaacccggattcaaacccgtacccgatccgagttacaattgccgcctcactgatctctttcttcggccaaatttctgaattctctaatctctctgcaaccaatgactacatcggcgatggatcctcctccaccgcgaaaccctagccatgatatcgagcctcctgaaccaaacagtacatcaatttcccaaagcgatgaaacctcaacgatgaatcctccacctcccagaaaccctaacccacctgatctgaagacaacggaagtagttgtagagcccgagccaatagaggaatccaaggacgattccgtcactgtagacgcggataaaccagttcgtccccgaaccgtgaagcagaatcctgtcccctacactattccagagtggagtggccctccgtgtcaccaatttcagcttgaagttctcaaagaaggcgccattgttgagaaattagacgtgtaagtaaactcttatgaatctattaccctctaaagctttaaggcttctgattgaattaggaaggaaagtgtatgtaattcgtatttgttccctttgcagctataagaaaggagcttacttgtttggacgtgatggtatctgtgattttgctcttgagcacccttcgatttctcggtttcatgcaggtgattgattatcttattgttcatacttcatatcatagtgttattactttcaatttggattacattgttttgtaatgaatcttgccagttattcagtacaagaggagtggagctgcgtatatatttgatcttggaagcacgcatggaacaactgttaacaagaataaggtgctttatttgtggctttgacatttttattctcttgattgagctttgatgaactgacttatagtaatttactatctgtgttttatggtttttgcaggtggataaaaaggtttttgtggatttgaatgtcggtgatgttattcgctttggcgggtgagtgtatatctctgttaagctcatgatgattatcttggtagcttttgctttgattttcctgagctctttcttttgttttttatgtagttcgactagattatacattttccaaggaccctcggacttaatgccaccagtaagatacactttttactttacacaatctaatttttggtctagagtaattttttggcatctacccttaattatttgatgcacctttaatctacttgtggtattgatttttaggagaaagacttacaattaattagagaagcaaagatgagaatggaaatgtcagaacgagaagcttcactgcgacgagcaaggcagcaagcatccatggctgatggtgtttcatggggcatgggggaagatgctattgaagaagaagaggtaataattacaactttatctgttagtgttgtggacctaagtgtctcacgtttccaggatttttgtaatcaatctttctgaacgacctttttttctataatttggacatgaaggatgatgttgaggaaattacttggcaaacatatagtggagaactcactccaaagcaagaaaaaactaaggagaaagtactgaaacggttggagaaggttagtatttttgttcccaatcattttttttcgatgcaaaatcatatatttagctggtacttcttagtgacctgagtctctatatttttctttttttccgtctttctttctcccttcggatgctcattataatttatagactattccaactttcctttattcattgtagatgtttttagactacgtccactttgcttcatctttatagggatgtttacttctgtgtagatcggccatatgaagaaggaagtagcagctattcgagccaaagacatttctcagggtggattgacacaaggacaacaaacgcagatcgctaggaatgagcagagaacggctgaggtaaccactttgttaatctgaagtgtccttactacaatcttagttttggctgcaaaactctttatctgattagactttccatttcaattaactctatgatagcttctggaagaacttgagaacttggaagagacactgaatgacagcatccgggaaagtttgggtgccaaaacagggagaaaacccacccacggaaagaagaaaggaattgtagaagatgaggaagacttgtcgaggtaatctttctcgtgtctcagctattttttctcttagggatctcgtagtattcttacctgtgtttcagttaaaggctgcttcaagtgttcaacctctatatctacatcttcatgcaaaactatagcttgtgtctgttgtttctgattctcataaggaaaattatgttattttcagtgatgaagatgacttctatgaccggacccagaagaaaccatcaacaaagaaaggcagcgaaaaccaaactgtagaaactgttgattcacttgtagataagagagacaatgtcttgaaagaaatagaagcaaagaatgaacagcttttaacagagaagagtaagatggagacagagaatgtcacagaggttacatcgggagactcccttgatgcccttgatgcatacatgaccgggctttctacaacacttggtaatttacttttttttttttttgttgtgtcgtaaaaatttatatctgcgctgtagttcacttctaggaaaaacttcttactgatgtcaagaaattttcctcttattgttgtcagtgcaagataaaaccgcccagatccagcaagagttgtctactctacagtcagaattaagtaggatcttataccttctaaagattgctgacccaaccggagaagaggttaagaaaagggagttgaagtcacaagaattaaaaataaagaaatctgaaacaccttccgtagaaaagaagatcaatatacctttaaaacaagctgatcctaatgagcataaggagaaagaagtggccaaagatttagtggactcagaaaataagcctgaagtagaaaataaagcaagtgaaacagctgaagaaaagaagaccactgtgtatgttccatcaaaaccccaatggctcggttccgctgcaaataaagccataattgaagaaaaaaaccctgagatagtagctgctactactgatagcacagaggatgctgatgggtttgtcgactataaaaataggaagaatattgctctaacagccaccgctggagttgaagttgtaacagggttgataataagaaaacgtaagcaagaagacaagagcgaagaagatgatgattcaaaggaaaagcaagcagaggtcatggcacaggatgcagttgctctcttattgaaacattctgtaggccatcatgtaaacgaagaagacaaagaactcagtaaacaggaagaaaataatcaaggaagtggccaaagtaaaacgaagaagaagaagaagacggctaaaaaagtagttggtcctgataaaccagaatatctggatgaaaccatagattatgattcttgggtacctcctgcaggtaaagtaacgccatgtttagaaacacattgaatcaaatcccgttttagaaagtggctaatgagtaatgtattgacttgaaatgtgcaggacaatctggtgatgggcgaacatctctaaatgaccgtctgggatattgatcagcgatagagtttccagagcaaactataggattgaggagaggtagaagtggcttaaatatctgtcaagttttgcatcactcagtctggtgatttcttggtcacacagtactttgtaaattcatactctaaaccctgagctttcctgattgatatatttttttttgaacggaaattttacttgtgatttatctcataatttattttatattagggtgcggcaattaacaatacttacgtctgtctctctctttctctccgaaaagtcaaaatgaataagccttatcatttgatccattcatagagcttatccaaacgcaatctctcacgaccgtctcctatggcttctgctcgaacttggagatacaacgtcttcccgagcttccatggaggagatattcgtaagacttttctctctcatttacgtaagcagttcaactcaaatgggattacaatgtttgatgatcaaggaatcgagaggagccaaaccatagcccctgctctcatacaagcgattagagaatctaggatatcgattgtggttctttcaaagaactatgcttcttcgagttggtgcttgaatgaattggtggagattttgaaatgcaaagacgtagtgatgccgatcttctatgaagtagatccatccgatgtacggaaacagaccggagattttgggaaggccttcaaaaatagttgtaaaagtaaaactaaggaggagaggcagagatggatccaagctttaatttttgttggcaacatagctggagaacactcgctgaaatggtttgtttgttttcgatcgactaattttggggctttcttttaagttacacatcactttataacgcctatctgatattttgtttcctctcttgttagggaaaatgaagcggatatgattgaaaagatagccaaagatgtttcagataaactgaatgctacaccttctaaagattttgatgcatttgtgggacttgagtttcacattagggaattaagttctctgctatacctagactatgagcaagtgaggatagtaggaatctgtggccctgcaggaatcggtaagactaccattgctcgtgctttacaaagcctactctctagcaattttcagcgaagttgttttatggagaatgttaggggaagtcttaatattgggcttgacgagtatggtctgaagttagatttacaagaacgacttctttcaaagattatgaaccaaaagggtatgaggatagagcatttaggcacaataagagataggttacatgaccaaaaagtgcttatcattctagatgatgttaatgatctcgatttgtatgctttggctgatcagacaacgtggtttggtcctggaagtaggattatcgtgacaacagaagacaacgagcttttgcagaaacatgatattaacaatgtctaccatgtggattttccatctagaaaagaagctcttgagatcttttgcagatgtgcttttagacaaagctctgcacctgatacgattctaaagcttgcagaacgagtaacagagctttgtggtaatcttccattgggtctctgtgtcataggttcatctttacacgggaaaactgaggatgagtgggaaattttaattcgcagactagaaattagtcttgatcgagataacgaggcacaacttagagttgggtatgatagcttacatgagaacgagcaagctttatttctcagcattgcagtcttcttcaactataaagaccgtcagcttgtgatggccatgctccttgacagtaacctagatgtcgagtatgggttaagaaccctcgccaataaatctctaatacatatatctaggaatgagaaaatagtgatgcataacttactacaacatgtgggtagacaagccattcaaagacaagaaccttggaaacgccacatcttaatagatgctgacgagatatgcaatgtccttgaaaatgatacagtaagtattccacgttctaaacttaatcatattgtgaagattcacagatcttacatattgtgctcacgatttcttacctttgtaatattttttcaggatgctagaattgtgtcagggatatcatttgatatatccagaatcggcgaagtttttttaagcgagagagcttttaaaagattgtgtaatctccaattcctcagggtgtttaagactggatatgatgaaaaaaacagagtgcgcataccggagaacatggagtttccacctcgtctaaggttactacagtgggaagcatatccgaggagaagtctttctcttaaacttaacctggaatatcttgtcgaacttgatatggaaggtagcctgctcgagaagctatgggatggaactcaggttagttatcataaattcatatctttaatgatgttatacatattttctctctattctgatgtttctactctaacatctggtttacattcagccccttgcaaatctcaagaagatgtctttgtcaagttcatggtatttaaagaaacttccggatctgtcaaatgctacaaatctcgaagaattggatctgagagcttgccagaatttagtagagcttccttcctccttttcttatctgcataagctaaagtatttgaatatgatgggatgcagaaggctaaaagaagttccacctcatatcaacttgaagtctcttgaattggtcaacatgtatggatgctcaagattaaaaagctttccagatatttctacaaacatcagttcactcgacatatcatacactgatgtggaagaactacctgaatcaatgacgatgtggtctcgcctacgtactctcgaaatatacaaaagtagaaacctcaagatagtaacacatgtgcccctaaacctaacatatctagacctcagcgagactagaattgagaagattccagatgacatcaaaaatgttcatgggctgcaaattttatttctaggtggctgcagaaaactcgcatcattgccagagcttcctggttcgctcttgtacttatcagcaaacgagtgtgaatcacttgagagcgtatcttgcccttttaatacttcatacatggaactcagcttcaccaactgcttcaaactaaaccaagaagcacgcagaggaattattcaacaatcattttctcatgggtgggcatccttacctggaagagagttgcccactgacttataccaccgatctaccggacattccatcaccgttcgtctcgagggcaagactcctttttctgcattctttggatttaaggttttcctcgtgatttcccctaaccatgatgctgaagaaactagcaattctcccttattttgtcctcgcattggcaaaatcggttgctccgatgacgaaacacctatttatattatccccaaacctcgagcagaacatctagttatgtttcactctgacttgcataacaaggaaaaatgtcatgaagtaggcaacgagatactgtttgaattcagcaacatatccgacacctatgagattattgagtgtggtgtcagattctatacagatgaacaggtgaaatcagtgaaaggagaaatgaatatgaaatagaccaagtttgtgaagatgaaaacgattggagctatgagtttggacccgtggaagcattggaatgctctaaaaataatggacataatgatagcctaatctgtacttcgaacgaagacaagatcgaagccaacaaatacacagattgttggagttggctcatcatctgttttgatgtctcccatattgtgagaagcatcggaagtttagtttggggaggaagatgagagaagcaagaaggagaatatcaaagtggagaagtcgaacgaatttgcaagtgaggaaagaatatctgtttatactttacaatgacttgtttggctgcttcactgagttggatatgatgagtagtagcatcatactgtttgaattcggatgcagcaaatattactgaaatgcagtgtacggatcgtgaaaactgacaaaattgatagtagcaacaacagtgaattaatttgggcctgaaactatccgttttaaatgggcttttgagcctttcacattatctatgtaattttcgattttatcttccttttcttttcaccttctcgacgaacacacctacacaaaaatcaatcacagtctctgtctcactcgccggagtttcggtcactgcgccatctccggggtcgagttcgtcgtacttcatcgaactatgaactctcatgatatcgatgatcagttagaagcagatgtatacagtaacttgccttctcgaaatgattcttcaacagggaggagaaatcgaaactcgtgtagatcgaaacactcagagactgagcaacgaagaagaagcaaaatcaatgaaaggtaaataataagtgttcaaagtttgaatttttatcagattttctaaaaagggtaacaagaaagtttcgtaatttgtgattgttggttggtggatacagatttcagagtttaatggatattatacctcagaatcagaatgatcagaaacgagataaagcttctttcttgttggaggttagtaaaatttatagttttgaacagaacatgtgtttcagagaatcagaatgatgtttgcttttatatgttgtctcaggttatagagtatattcactttcttcaagaaaaagttcacatgtatgaagattctcaccaaatgtggtatcaatccccaaccaaattgattccttgggtatattccttctcctatctttggttggttttctgttatattgaatcgtttttgttacatttttttagagaaacatggttattgtgttaagtgtttcatctttcttggtatttttgacaactgtttcatgtaactttgatgcagagaaatagtcatgggtctgttgcggaggaaaatgaccatcctcaaatcgttaaaagcttttcaagtaatgataaagttgctgcttcttcgggttttctcttggatacgtacaattcagtaaatcctgatattgactcagcagttagcaccaagattcctgaacacagtcctgtttcagcagtttcatcgtatctacgtaccgagccttcgctgcagtttgttcagcatgacttttggcaaccaaaaacaagttgtggaacaattaactgttttacaaatgaattgttaacatctgacgaaaaaacatcagccagcttgtccactgtctgctcacaaaggtaagacatatgtagagcaaaataaagctttttttgttcagtaattaattcatttttttggtagaaagtttgggttggtatatagtttctcacggatgtacactcatttccttcctgtctggctctccttaaacagtggcttaccttttttggatactaagagagaatgatataatacaaggttccaatgatgcctcagctatttgcggagacttcttgtttgccttggctatgaagttctgtaggatagagtatgagataaatgctgtaaacttggtaattgttagaggaaaagattttgcataaccataatccaaagtttctcttttgaatagtgcttctctctcctaaataggtagtcattcaaactgaagatcctatctgcttctgtatttggaacagactcagggttctaaaaacggataactggaggaaataaagatggagagatttgattgaaaactcttgtttggtttgattgtgaacagggtacttaacactctaactgaagcacttaagtcatcgggtgttaacatgtcagagaccatgatatctgtgcagttaagccttcggaaaagagaagatcgcgagtattctgttgctgcgtttgcttctgaggtatgcctgtaacatttttacagtggaaaagaaaaagaagtctactactctgcaagtaattcttataaaaacatttctatgtattttaatttgtattttgatgctatgtatctttttcattaggataatggtaatagcatcgctgatgaagaaggggactctcctactgaaactagaagcttctgcaatgatattgatcattcccagaagagaataagacgataagatctggttttctattttctatgttatgacaactgtttgataattttgttactttcggtgagtcaggatcagtaggtgtagatactacttttatcgtgctgcaactattttaaatgatatagtaaaaactaagtagaatgatgtaacaagtttcgcaaatctataacaagagtttgctccatttaatggtactttaagtatatggtctcttagatatatcacttcttgcccttctatttctcacactattaaccgggaaattatttcgtgcttgttgacatgtctgtatcaagtaatgcgtttgatttgcagaaaggagtccttgttttcttgtgtctcaagcttgatttgagctagagtatctagatctttagattcaagaacagatgcaatattctgtagaagttgaaaactcatctttattctttaaccttatgtaaatatgactgtctatacaacagatagttcatctctcgactaaatgtttggtatatatatgtatatattatgatactcttgttcgattaaggaggctgtttgtttgctgaaggagatgaagcaggaggagggccaggtttgtttggtggtggtaggaatgggaatggaggaaatggaaagatcgacggaggtggaggaggaggaggaggaggtggtggtggtggatttaggcctggaaagatcggtggcagtggaggaaagagagaccatggtggaggaggagtgggaagaggaggacgaggctgaaatgggtttggagggaatatcgatggaggaggagtgggaggaggctgaggaggatgaggctgaaatgggtttggagggaagaacgacggaggaggagaagctggagctggaggaggctgatgaaatattggagggaagaacgacggaggagttgtgggaggaagctgaggaggatgaggctgaaatgggtttggagggaatatcgatggaggagcaggaggtggctgaagaggacgaggctgaaatgggtttggagggaatatcgatggaggttcgggaggtggcggaggaggacgaggctgaaacgggtttggagggaatattgagggaggaggagcaggaggtggatgaggaaataatggaggaaatattgatggaggaggagcgggaggtggcttaggaaataatggaggaaatatcgatggtggcggaggacgaggctgaaatgggtttggaggaaagattgaaggaggtggtggtcgaaacgggtttggtgggaaaaatgagggtggtgggggcttaaatggattgggtgggaaaatcgaaggtggtggtgcaaatgggtttggcggaaaaatcgaatgtggtggcgcaaacgggtttggaggaagaaaccatggatgtggggaaaacaacttattgtctgtcgtaattatgtttgctttgttttgcaggtatcttgatgatctcctctttttgtgttgatgatctcttcttcttgtttgcctaatatgtttcagaatccgtcgagtctttgcacatctcacctcagagataggacacaaaacctgaaattctctgtgataactttttgtctcatatctgaaacttggttcttcttgtctgcaatcaagctgacctgcacaaatccactcagaagaagacaaaactttctcagaacagaaaggagaaaagtttctaaatactaaaacttgtttttggtgatgatacctgagactgtgaagaggttattgttgttatattggacagtgtcaggtagagttgtagcaactgaagagtaattactgaattttatggttgaagcaatgaagatgaggataagaagagaagacattttggagctctgttttcgagttgaaagtggtttttgttttgtctctgatattataagacataaacatgcttcttcaaaaagctattttgttcctttctgtctcgtgattcgccattattgttttcagaatttggaagacaataaacaaaataacaaaatcttggtatttatcacattgtttatgatatagttactaaataacaagtattccagtttctgaaaattgatctttgaattttacacgtaatcaaaaaattagttactactactacatagcttgaaaaatgtattctaattaaatttgggtttggtaacaactaatattcctgacataattcttccggtgtggttccattttatggctaatggacctgaaataaagggttgtccaagtaaagaccaacataatccaatcttcacgagagtttaatgtttgagagtattcctcaaaaccctcacggtcgttactcgtacccagtcccaacaaacaagtagttggtactaacacaaaaactctctcaacattcacattcaaagattgaccataaattagaaaaaataaaaagcttacaaagattgcagaaaatgattcatattagctcagactgtatgaaacacaaacctcgtgatacaagactgattaagagaatcagcaacgcagaaatacttgataaatcccacaaaacacaaatggtgaacacacacgaagtaaatacgaaacccgaggaactatatcgacacacacaaagagaaacggttgttaatagagaagaagagttaccattttctttacaaattgtacgtcgaactttccctttttgccaacattgttgttgaatatcagcttcaccagtgtgtataatgagaatcaagagcggcatgatgggtttttacgttcgcaatgattctttatcatagaaggcaagaagctgtttgacatggttttgccaagctgcaacactttgaccatctacagtgacccaatccacaactgttgatgcaggttgttcccaccattcatcaagctgcattcgaaacacaaacaaacaaaaaatggtattaagcttgaagtaaggaaaggtagtgaagaatagaaaaagaactagaaccgtaaactttatttgcaattttgtaagcaactgtcaaatgaaaacctgatttttttcatacgcaagcttaacaagtcctaaaggagactaaataaaaggttgagtagccatcgtaagaggattctaaatcccaaaaacacgcaagcactattaagccatactctgggagtgatatgacttaagaacgtccacgtgaagacacattaagacagtcaccataagttaataggactagcttctaaacataacgtaaaagcatgaccgttgctagaacacacttttttactccacggaaattagaatggaatgtgcttatgatatgaccatgtccatacagcactgagctggggtttagcatattaacaattaaaaaagaagaataatactagaaagtagttccataccaaacccctaacgtatttgcagtgttccgaggaagcttgcgcattctgaactgcagtcctaagttcaggtaaccactggtccgatattgtattctcttgttcagaagctagatctaggcagtagttagttgttctgcatacaagatacacagtatagtggaagtttacataagatagtgtggggcaataaataagataattgtggcctgtgtagaccagagcactgaggaacacgctttacctttcatatttttgctgggcacggaaagcatgatctaacagagaatggccactttcaactagatcctgccgaatatggaccaaatcgattgcctttgctaagtcttctaaaacacatgcttcagaaccacgaactcttaagcagaactcaagagactctaacactgaggccaaacttgcatctgaaccctcaagacctattcaagcagcagaatatagatgataagcaagtcctactaagaagccactaagaattttgatctatgaagatttctaagtattttatataaaaggtgttccactttttatggttgaaaacaacagcagatccaaagcgtggtaatgatatgcaactagtggccatcattaaaccttttggttattatagcattcctcaatcgacgtaataggtagatgaactaacaatgctaggaacttttttttatttttaaaatgtttgttttatgattttgcactgcattgagaaagattgtcattcatgaagcagtgagcaatagtttcattaaaaagctccttgtcaatgcaaataatttttgtccagagagatgaactatacgtccttggatttttgaaaaaaaaacgaagaaaaaaatcttacctgcaggatattgaagggcagcagaaatgcgacatatagatggtattgccgatggatctcttgcaccagctctagccgttaatagagcagcattcttctctgcatatgcaacagcttcaggtcccgtcgatccattagctcccatagattccagaagtccctgattaaaaaaatgttcatataaatgaacagaaacgaggtatttacatgcaagtttgccaagttgaaagaaaatgatcttctaattgcaagttctgttacacctatgagagcaacaaattttaacttgaaccataaactccaaatttttcttatgctgcatgattatttgatttacagaccaaaagaaccttgaagatataccacacttttctatatgcaacttctattgtttatatattattcaacaaatatcagtctacgattatgagtgaaatatatcctacaaattaactgaaatacaattgtatcacgcagaaatggatagataaaatacatcagaatgtcatctgacaacttacacacctggggagttgctggaagcatataaagactgttatcaggactttgaaagaaagcagacacttctttctcaatgaaatcttttgcgctgtttgaaatgtccacaacaacttcactggctggaattacagtggctgatgcatattcccttgcagctagtggttgttgattccagaatgcaacagcatcctatataaaaaggaaggtcatgatacagagtattactcatggtatttatcacttaatcaatttaatgaatgaatcacttgggatattaccatgttggccttgagaagagttgtatatatggtttcaagttcggatctgcgagcatcaaattcctcaattttcttccacttctttttcaaggaatcttcggcttcttttctttctgcacataatttattcagccgttgtatttcagataacaatgtgtttaagctagccctcaaaccagcagcttctctttcctttccccatacatccaactgcaaagataaaatcggatcgtttgttcaagcaagtaaatcagcatatatattaaacataaaatgaactttaatgataactgagaatcagtcatgcagtgcctgctacataacaagtataagagtgtttggattgtaagatttgtacaggaacatgattttgtctttttagattcaagtgaagggaaaaaaactaaagaaaccaagggagtctggcatctacctcaaattgcctaagattgctaccactctgtgttgtgcctccaacaaacgaatgagtagctgtatcagcacttccatgcaaacggttaataaacttgtggcataaatcacgagcttcagctgctttgtttagtgcatcttcagtagccaaaaattgttgaacatgggctttctggaaaaagtagcacaggtgaaagttaagataaacagactttaaacatatagccatacagtgcaacatatacaaatacagcactagaagaccaaaacatatctttctgaattaaacatttgcctgaagcttaaccctcctttctccatatcttcaaattaacaagaagaaaccagcaaaactagacatagaaagcaacctgccgttcaaggagctggttgttagatccttggaaatgagtatctgtgcctatcttcccgtttccattaaactgataactcaaaggggagctcacatcagaagaagaattgtctgttacacggttgttctcaaacttatacctgcaaatagattgacatccaattgcttatgttagtccaaagcaaccctggaacaagaacttaagaaagcagagacgaaaactgaaaacttataagagacagagatacaattatcattgatcagacatatcttaaagggagtccaggaacttcagcataagtactaatttgctatatgagtttcataatcttccacttgtgtgtcaagaaaattagcaaaaatagcatgcaaggtgcatttgggtgaaccataccctgcagaatcaggagtgcacaataacaaagagtggcataagaaggaaagtcaggacacaccttaacatttcagcatctgctctgacatcaatcttctccatctctctggatatcagagtcttaatgcgtaaagtgtatgcagcaatagcctgaagcagcagaggaggacccctcagggaatttactataacagttttcatctcatcagttatttctccatcatactcaaaacccagcttggcagtttccagctctggaagtgaacaaattccatttccttcgtatgcagggaaggagttacgtattctttcaatcatgcgtgatgcaagcaaatcacatactatcctgatatttcgttctcgggttgtttccatgagaatgacatcatctgcagacttagttcctttgacagtggaataaacagcttccctctcactgttagcactgaggctgcttaacacttcattcgatgaattgacagaccgttgtgcatcatttgcttgattaacatagacttgtagccttttgtgatactctgcaaatattcttgttgcttcatcacattgttgatcatacgcttccaacaatgcttgcttgtgtctgaaaaaaggaaaaataaaactcactaaacaatttgaaagatctactgaacataactacaacaaatattttgatttgttgtatgaacagaatcaatgcatttcaacatagataaatgctgttgattgaggttcatgaagagggcaaaaagacaatcaatatcgccatacaaaagtgagaatcttaagaatgggcgatgtggcatatccatgaaaccagagaaacaaaatagcctgactaaatcccatatattccattctagggtatattaaaatcattggagaatcaacaaaacgaaagaagaatacttcagggctatatatctatggctcctgaaatcatagagaaacgaaatcgaaataccaccaaaactctaagcagctaaccatactacacatagcaaccatacttgtaatggttctgttgaggacttaacactaacgataataaagcataacaacaacaagagaaaatattaaatgaacctgagctgagtggtgcaggttatttctattgtattattttacaagtgagaagcaatgtatccaaatacagtattcaaaattgaaagattcaaaacaaacctgtaatttgctctttcatcaagcatcctcttccgctctgcttcttctctagagacctccaacattctagctttcaaatcttttctttgcctcctcactatgttcctcaatctctccacttcctttgcagctaattccctttcctgcaatgcagcttctctatcctccgcataactcgaactctcaccagtcactgtcttatccttccgccttcctttactcttactctcctccttcccaggatttaccgaactcccaatgctagcattactacttcccccatgaaccgtaatattccgcctaattctctccactgtcttctccgatttcactcggtttatcaaaaaattccatataggtatcatattccctctacaaatcttccttatagcatcaatagaaggaacatgagatttgctcgatccattatacggacctaattgcctgtaccccatttccttctgtaaccattctaatatcgcctccggtgtcggagccgagctcgataaactctgcattctctctacaactacaatacctaactcaatccctcaaatcttcatgaaacttccgaaatttctactcatactttgcgccttttcttcaaatccaaacaatcaacgtagagaaatacctaggttactcaaatcgagcgaaaacaggagttcatagacgctataaacctaatacaattcgcgaaatgcagcaacaatcgagcgaattggtactctgatgaacacagagacagaaggaagacgtagacaaacagatctggaatcccgacgactaactcgccggttccggtgacggtagatggaagattgtgacggagagatggatctggataaagagatttcaaatcgaggtcccgcttgtttattggattttcaattaaaggaatcaaactcgaatttttctgcaagtgtcgtcgactgttgaaagttgaaactgggtaataaccgcgtcggactcgggtatgagatgtatccgggtcggactaaggtatttaagtctaaccgggtcgaattgggtaataagaaaacactatgggtcaaaattagaatagtttaaaattacaaccagaacatttagggtcaaagttgaatttatataacactaaagggatggattccgaattgttttaattttctcaatctaaaacccagaggttccttcctagggttttgtttgatactctcaaatcggaaaattttgaaacaatgacgacggggctagtaacgccgggagatgtaatcgggaaagcgacagagtttaaagctggaaaaggagcttacgtcaacgacgccaccatctacgcttccctcacaggaacttgccggattgtttctcctcttcccgaatcaattgatcaggtttcgtctttgttccaagtgattaattcttctggcacatctattcgtaatcgaaatcgaaatcgttggattgttatacttgtttttgtgattgttatggatatataacttattggatgataaaaatggtaagcagagagctattgtggaagttacaggtcacaaggcacatggtcctattccagagactggttctgttgtcatagcaagagtgagtcctgcacttatttcattggattcattgatgttcatacttggaaaaaaagagagtaatttcatcactcactattctctgttattcgtgataggtgactaaagttatgactaagatggctgctgttgatatcttgtgtgttggttcaaaagccgttcgtgaaaattttgctggtgtaattaggtgaatttctcatcctcctttggtgtttattttcaaggtttgttcttttatgtgtcgatctaacttgtgtttgctctttcataggcaacaagatgttagagcaacagagattgacaaagttgacatgcatcagtctttccatgctggtgacattgttagagctatggttgtatccttgcgcttatgtttcacacttattgtctagtagtacagtggttaacattgtttattagaggagagacaattctaagatttgttacattatgccatttattttctctttttacttacatatctctttgtatagtttaatttgaatgtagcgtaggtgtagtctataataatagatgatgttttgggtgataatatctgaagttgccttaacttggactcttaaagctgtctcttggtgatgcacgggcttactacttgtcaactgctaagaatgaacttggtgtggtctcagctgaaagtgctgcgggtaatttttttcctactcttagaaactaaataaagggtaatgagggcaaagattactaattatatagctaatctatcacatatcaaattgtaatacatttctaacttgtagttctcattatggaattatgagtaacaaatattttcgtcctggacttggagtatgttaatgtgtagatgcatttgcttctttgggcagtttataatactatacgaagttaatttccgtttgagtaatcgaaatgtttatgtggtctggtgattgtgcaggcgaaacaatggttccgataagttggacagagatgcagtgccccttgtcgggccaaaccgagcagagaaaagttgccaaggtgggtaattgaattcaagacaacacttggcttctctcacataatgaggtgtggtctctgcagcaagacagacatttgagattattacaattttgagctcttctgttgtttgttatcaagtgtagagataactttagaccaacttgacctttattcgacaatagtcaggatactattattattaggatacttacaacttcttaaactcgaaagacattttgttgttagaatttgaacataaatccataactccaacaatgtggaaatgctaggcttagctcggaacaacttaaaaattcattcgattgtcgcaatttcttggtgagttggtagtataaaaacttagcagaaaatcaagaaacaaacttcctaagagatgtaaatctgtatgcccttggtgctgccgagaaaagaaatggtttttgtatacaaaaatgtatgggtcacaattagaataagtttaagctttataatcgaaacgtttggggtcataactaaatatatgtaaaattaaagggactatttacgaaactttctgtttttccctggttaaatttcgaccaaaaaggcttatggatcaaaaggtagaagaagacaaagacgagagagaaaggatcgctattattcaggaaacttcattttgcactttttcgacgaacctgaaaaatcttcaattttagaattagtcaataccggaaaattcctgggttttctcttgcttctggattttctcaggtctctatcacaaaggtactcatcgattcctctgttttttgttttcctttgaaagtttctttgatgatcattggattttgataccattcattactgatcatctgatgttgatcgatgagcttatgatggtttttgggtttcatcggattgatgctttttatctgaaaggttgatgcttttgctcgtacattaaacaatgaatccttaaaaaaactgtttttttttgctcgaattgtatagttttgtgatgtgtattagcttattcaagtttagttattcatttggttttagaaatgttatatgtttctcttacaggtgattctactgtgtaggaggaacaagagttttgcaccaagaagagagaggaaggattctggtttacgggagctagtgaaaatcttctgtgaaattggctttcctctctcattctctgtgaaatttgaaagtattgatttcgaagatatgggtgctttctgttgttgctttcaagttgatctctttgagagttatgtgaatccaaacacttccataactaggaactgtccttgccttaattgcttcctccagagtttcatggatttggtaatgttcttcttcactttcgtcttcgaatcttttgtttctttgtagttaaaactttatgttcgattttttttgggcagtatgcttcgttgtttagtagagggggaatgcatccaataccttcaactgtagagacagctacagtgatgaattcaacaactgcacttgatgactctctgtctagtgtatatcattctcctccaacaccattgccttacgatgctgatcctaggtactttcgttttgttaagggctctagtcattcaggtgaagaatcagaaccgttaagaggtgatactgaaatgagttctgaagctttgggtgatggtggagccaagtggagtaagtctgattctgaagatggttcgaaagaagtgtatacgaaaggttcatcaacctttacaaagtcgaaaacaatgccggggatagaagtttattatgcagattcggatgatgaagatatttgtccaacctgccttgatggtaatactaaaaaattagtttgatgctattgttattattctctttgaacctattatatgcagttttgttggtaaagagtgtgttaggttgttagtagatctttataagttgctttcttggtttcatttcttcatttagtgcactcctgagtcctgagccattaggccattaatagtatagtttacgtagatgaggcaatcgttgcgagtgcattaaggtaatattggtttcatagttctttgttttaacaatatgcagattacactttggagaatccgaagataatcaccaagtgttctcaccatttccaccttagctgtatttatgaatggatggagagaagtgaaacttgccccgtctgtggaaaggtaactcgtcgctttctacaaaactttaaaacccggatttggtcgaatgttccatcaatctccttcatcgatattaaaagtgcatcattttgtattagaatttgatatccccattttaagtagtggtccatttctcatacaattattggtcatatagagaaccatgagatgagttaactttttggagttaatgcatccatacctaattgtttcactctaatctttcaggtgatggcatttgatgaaaatgaaacttcttagcattgtaataaagacttgctcaaagaacataatggcgtctgagtcctgctcaaaagaataaacagagagaaatcacttgtacataaaactcctgtgaatatccagatgccttttaacagtaaatatgtgatgtctcttaatttatagactcatatatcttatatacatttataaagcaagacaatgattggaaggaaaagtagtttgaatcattcaaaaaattgttatctagaacattgttttgagatcagagcaagaagaagaagagtgcttgaaatcaacttctctgaattattagacaaaccaataaagaaaaatcttattacaccaacttctttgaaaagtcaataacttaaagctcaaacaacagaaacagagaatctccatagatgtaaaacttcaacaactcttgagtacactgattgtgtttcaagccgaggccgctttaaacgcactctggaatgtctcgggcggttgcgcaccactcagcttcaccttcccattgatctgaccaaacaatacaaagcatggacattagacttgaagactaaggcacccttcaaaaatggcgagtttcgccatgaacttattaaggcaatcaatctaaagcgctaaaacttacagtgtaatttggaactccggtgatatttttcgaatactttgccagttcttctttcacctttaaagatcaaaacagttcattcaacattatactacagaggaagaaaaaaacactaatgattagatgatacagaaaacatacctctgtaactccattgttggggtctgagaggaattcttctgctccttctatcccaaccttgttagccgtctctaccaaaaactctctattgatccacaagcatcataagttaaacttgagctaatctatcacaaaataaaactgtttcacatattctgaggacaagagcctagtgataaatacctatcaccgatgaactttccctgcgtaaagtaaccgataaacagttcctcaacaagtgtatgttgcttctccggcgcttgtttaccggtataatgtataagtctatgactatccagactgtttcctctgttcttatcaacaaaacatgttagaagaaaagaaaagaaatctattttcttgattgataaaaggaaactcatggtgcttacgtgagaccagctgtgtcaaactctaagccaagacctttaaagacctgtaatgatgaatcaaaagctcattttcaagattctctcaacaagaacatataagctatgttaaagaatgtgtaagtgaaaaaacctcggacattcttgcaaacattccttgatatctgtttccatatttctgtagataaaactctttcttactcacaccttctttaggtgcagatggatcaaggaaaaacggacgccatcgaatctacattgttttttcgagagatgaatattataaccattacaattgttatacaaaagaaaagagagtgagagagaggtaaacctcgaagttgtattgatctttagatgcttcaatagctttgtcaagattcttctttcctacaaagcaccatggacacaccgaatccgagcttacgtcgatttgaatgagcttttttgaagcggtgttgcttgcagactcagccataatgacttttcctaaccaatttcagtcacagttcagatatcaaattaaagaattcaagaatccatttaaaaactcaaccaaaacaagacagaaacttgaccttcaagtttaagacaacaaaggcaaatggataatctttattcacataaaaagttcatctagaacttctagattcaaaaattcattacactcaaaaactgaacaaaaacatgctcttcaatatcaggtggctcaaagtgtactaattacataattgttcagatcaaaaggatcatctcaaaacttgcctctgaaaaatcttaagattggactcttcaggatttttgaactcatagacaaaaacttatgaatttgattaatctgcaacaccaaactctctaaatcaacccttattttctgattctgtcaaatctttaatcaaacacgaaattgaaaaattcaacacttcaaaattctccaagaaatgagctttaacgctaaaaagtttgtttggatgaaaactttctgattagaagaacaataatatgtcctaattgtacaaaactaagcatatgtgtaagtgtaatgatatgatcaaaaatttaatgtttctttgtttacctggaaaaagattggaggaagaagatcgtgaaacctctaattaatggagagacaagtcaaaatcaaaagatacacacataatgaccaaccatgcacgatgatatatcccaaacttttccatttttttcttgcatatactttgactaataacccgtatgaaaaatatttttcaacatttcttgcatatactttgaccaataacccgtatgaaaaatatttttcaacatttcttgcatcttttttggactaataatttgtataaaaatgataatttaaagattagtaaatatgattttagttttgtagcaaatggcccattagctcagttggttagagcgtcgtgctaataacgcgaaggtcgcaggttcgaaacctgcatgggccatttggttttaaatcttttttgtgacgaagaagttgtgaattgtgataatatttgtttcattggacaatttaaattgaccaactctttaaagaagacaagactttctacaatgtaaattgactacgcccatgagtatcatcatgatataatcatatacatgatctcatatatatgtgcgtttgatgcgttttcctattttgtggttgcttagttaatctcgttgacttttgataaaaacatagcacaagtactagattttaaccctcactataccgcgggacgatttattttttaaagataatatatattaaaatttgtaaattttatttttataaaatatttatattttatagtttataattgttattaagtaacgttatacgacgaatacatgagacaattgttaaaaaactgaagttttaatccttattaaaacaacatattaataatattttaaaattttataaatattgattcaaatacatctaccatataacccaattccaaaataaaatccgttctgtaatttctttacccgtctcgtgattttttttatagtagtaatttttaaaatttaagaattatttattatatataaaatttttgcaacttgtatcattctctaatagatttatattttatagtttaattttatatatagtaacattatatataccacataacatttttggttttatataatcttttctaaattaggatgatttgatatgttaataaattaaagatttaacccgtattgaaacggtggattaattatattttactgtccctccaaattcgtcttgccaaaaagccatttattttattaatattaattttatttatgatatgactttgatttataatctaaacattttagctaataacataggagtgcaccatatttatttaataggggaatgtaccatatgatccgaatgcactttcacccaaatccaccaaaaaagtcttgcaaaaatactatagagataagaaacgatagtcggttttgataggtataagattagcaaatatattagttagcttaaactagttaaaaaatacaaattgaaaaggtatattacactttatttgaatatagtataaaacttatataacacagagatttgataattttttaaatgttgaatgcttttttttgtgctaatttttatgtgattaagatttaattgatttcgtttataaaatattaaattgttttacgaacttatttgtttataatttgataacagatagatatttgaatattcggtatattttgcttcagtttaggaaatctttgatgatccgtttttagatccaataagccttatatttaagaaatgaatattgtagttaaatgagtttggtaatcttaatgacgtcattaaaagattttgtttttgattaaatttttttaatggtattgtcatgtaattaattacaaaaaataaagttacatttaaaatgtacttttcaaataatatagtaagatatccaacgaccaaaactataaacaaaaatatctagcaaaatattagtcgacactttaaaaaaaaatataccatgtaaactgtatgacaaggcatgaaggtgaaggccatgtggctgaataatatgtatcgatgttgttgttgtttttgttgttgttgtgtcataatctaacttcgaatccaattgtgttacactaatacgctcaaaaaatctatttagtgattaatttacgtattagcttggaaaacttaagaaaacaaaattatactatatatcttacatcagcttggcagctaaaccattgttataagtgtttcattatggactggttctgcttggagtcgatcgggtcttttgactggattgggattttttttatattggttgatatagtcgtgtaaagaaacaatcaaatagaacttattttttcttacattttaacatatctaaataaattcatcacattgaccttttgttcgagtcaatgaatagcagcaagtgtaataaatgacaagctaagggaagtttaatacaacaaaatcaacaactaatgtatactgtttttttggttttaaattaatgtatactgttgcttacggttgcatgagtaatcgcgttaacaatttgttttatgttcgacaacaactagtaatatatactactattgcttaggggtgagcaagagcaatgtctggtttatgttcggtaataatttaaaaattatctattttaaataaccctgaaattaattatcttgtattcccataccccgcttaatccccgatttatttgtctaggcgctaggctcatacggaccgtctagatacgacctaccgattttttgaatattggtttaatttgatgttttttttttgctttgatatttgttttttcgtatgtatgttcattggtcaaataaccgactacaacaatattaagtaaaggaaaagaccttcccgagcatcagcatgacgcggactacacctttgaagattattaattagagtgaacaagtgtaattcgttaaaaggtgaagaataataattaaacaaacctttgacgtatgtataacttgttaatcaccaacacttgccatttcaaacttcaaatgcatcatatttcatcataatcttacgtatttatttttattccaatcttacgtttttcaattcaaatattaccatcataaacatagtgtgtggaattaggaaacacaatttacataaaaaaaaaaataacaattcaaacatcaagttcatcattcgtacggactagttctactcctaaacttgtctataaattgagagatatgtctcataaggttatcatctcgccattaaaaccttttttatctcttcgaagaattgcttcaactaatatataaccatgaaaagtttctcatttcttgcagttttatctatcttggcaataacactttcattaagcaaggcttcggacccaagctctcttcaggacttttgcgttggtgtcaacaccccagcagatggtggtatgtatatgttcactccaatactccataatcatttaaatgtaatcggtagttaggaaaagtcattacgttcttacactctttttatttggttataacgttcagtttttgtgaacggaaagttctgcaaggacccgaagctcgtcacagtagaagacttcttttttacagggctccacgaggcaagaccacctaatccaaaaactgggtctaacgtaacagccgtcaatgttaacaacctaccagggttaaacactcttggaatctcacttgtccgtatcgactatggagtttacggacagaacccacctcacacccacccacgtgcctccgaggtcttgtatgtcgcggttggaacacttttcgttgggtttgtcacgtcaaaccccgaaaatcgccttttcagtaaaacactttacgagggtgatgtctttgtgtttccacagggactcattcatttccaagtgaacgttggaaaatatccggcggttgcattcgctggtctcagcagccaaaaccctggtgtcatcactattgctgacaccgtgtttgggtctaacccacagatagacccaagttttcttgcaagtgcattccaggttgaccctaagattgtcatggatctacagaccaagttcataaaaccataatatcgtgctcgaagtgactaagactgaataattaaggatcttgtattatccgattatcataacatgtcatgacgttagtcattgcttttaccttgtttaaattataaatgaatcaataatatctttacgtttttagaattggattcatgttttacatttggaaattcacgaaagctagatctcttttgtgatggatttttcttcaataagaaatctattagcacgtcagtataaatattttctgatgaatttacaaacatcatattatgttatattaatcaagtcgtataagactttgatacaaaaattattgaccgccttatttgtgaagaaaaagtgtcctctgcacaatttatctatattcatgtctaaattatattaaagtctctagctcgttgagaggtttttgccttgaagagttatggaagaagactctaaaaggttcttcgtgtagcggatccaggatcattttttactcaggtcacacatagctaaaaaaaaaaaaatttgataagccaaatatatattttctcataacatttaaataaaattctgaaatttagggaggtcacatgaccctcctttcttgtacatagatctgccggtgcgtgttatcctcatgtgttgcgaaagatctgtttcaaattttcacgtataaacttacattgtgggtcttctgctttgcgatcttttcttagcatgtgttaattacgtatgcatgggagaataacagactctctcgagctagctaattaatgtcatttagcgttttaatcgtacggatgttagcaatagttcttccataaaaaaaaaaattaactgaagagataggcgattgccttggtgtgactaactttttgggacgcttgtggtgggttggtgcttcagaggagaaggatggctgatgaaaactggaatcttccgcaggattttctcaatcctctgaggcggctacgaagatgtgtgctttaattctgccagatctaagaatatggttacactgcagacgatgattaacagaagttgagtcttttttttctagcaagattccagtcagggccggtcctgggctaaagctggtgaagtccatgctttaggcgctaaaaatatatcaagaattttagggcatcattttcgtgagaaatgcatttagtgtagcggtagtgtcttactttcttaggcagcaggtcttaagtttgagactatatgagtgttattcgtaatctatatatacatttttgcagcaactttgtgaaataaatcctggagttgggatttatttacagcggctgccactggcattttaataattgtttttgataattagaaagaaaatcttctaattaaatatttgacatttaacaatcttcccaaaatctctctactttaactacacaattaattactaaaataaaacttccaaaatatttaatatcatttaattactacaaaatatcatttttgatattgcttttctgcatgattataatcatcaaaccgagatatttgatagaatttaattactacaaaattacaaaatatttagacaataattcataaacatatcataaataagatcaacattaataaaataaatgagtttgttttagaggacgggtttggcaggatgttacttaataacaattgtaaactataaaattaaaacattttatagatagatacaatttacaaatttttatatatattaatttaaaaaataaattgtttttgcaatgtaccgcgggttaaaatctagtatttttacatttttgtattagttgggcgaaattttttttttttgtgctttaggcagggaaatacattggaccgccttgactccagtataccgtttttgtaactggattcgctttaataaatatatatttaagaaaaaaaatctagtcaattaaacagtctagtcgcttatctcaaatatcttaaaaacaaaaaaaaatatccatgggctacaaagtttttatcttggaccaataattatttgggccgatgcctttacttctgattattggttatatcattggactaaccctacttggaattgggtctataaacttttcctgattctttttttttttttttggctcaacaacaataattatcattaaacaacagagttttacaacttgtctaattccacaaacgattttacccaatatggcactatagaatacaacttaggatcataattctcaagagaaagagattcctttgctatcctatctgccactccattgcctccacgatgcatgaacacaaactttgtttcctcaaaatgctgaagcaagagcttgatgtcttgtagaatagggtccagaataggcatatcaccgttatcaacaagaatagacaccaattgttgggagtcagattcaaagattacctttcggtaattgagtcgagagagtgacaacaccgcccaacgcatggcttcagcctcagtaaccaaggcggattgagtcattgatagcccttgcacccatccaaagcacgttcttgtcggagtttctaagcacccagccgatgccacacttgctgcgttctgcattccaagctccatctgagttacacttaacccacccatgtgggggttgcttccacttgatcacttgctgctcagatctctctatgtgttttggtagaaaactccgctgcagattttgcctccactcctcaacatcctctacagcccgccgaattacatctggtgcatcaaactgtttccccttaaaaacgaggtcatttcgattcttccacagtctccatagaatccatggagctaccataccgtcatctcccaactgtgggtggtactgattaatgttcaatatcctgtgcatgttttggtatagagaatctgaccactcaccttcaggcggggctgggatgggggatatagcccaaacaagtctagcaaaactattcctgattcttagtttttctgattcttagtcagcggaaagtatagcccaaactttttctgattcttagtcagcggaaaaacaatttttccggaaccaaaacataaaccaaaactattgaagcaaaaaaacaatttaaggcataaagccataattaaaataaactcaacaaccgaaactttaaaatgaatccttaattattttccactgagaagcaaatcacaacacaaatacttttttttcaaaaactgaattttgttgatgatgatggtaaataccacaaccggaaaatttggaactacttgtcctcatttagttagtgcttaaaagacttatgaaatcaaaccatctacttacaaactccagtttgacaggcttcgttgaagaaactttagaaacatagaaaacatgctgagatcgataaagtcgagatatgtttaatagggtctataagctaggaaatatgtttttatataaataaataaataaataaaaaaacgacgtacatatgactctcatttctaccgatgatatgatatgatatatttttgttacactttccattttccgcgttaacttcatcactatgatttctttccaattttatttaccaattattgttacaacttagacgaaagtgtgtaatgttatttggatagtttcgacgacgaatttacaaccgttatatggttcatatttatgtaagaaaaagaaaaaagtaaaattttccctaaaaaaattagttatatatcttaatctctatactgttcccaatatccattatactttatatttggtttatatagtcgtgtcttatcatctaagaaacaatcaaccaattttaaccaaaaaaaaattattaaacaaaaccagcaagtgttaacattttaacacaccccaacacgatcaaattgaccttctcttaaagtcagtgatataaacgacagataaaaggaagaaatcattaagaaaaaaacacacttgccatttcaaatttcaagtgcatcatgtttgttggagaaataatatatataaacagtttataatgttcaattaaacataatgggttgaggaaagaaaactaaaactttattagaataattgttatgaatgccttttcaacattactctttttccaatactatccatttttatttttcattttcatttataccctctcttaatgtttaatgaccattttacctctatttggaaaatgttttagataaacaaaatgaaatatttgttttttcccgcccaaaatattctgaaaataaatttcccgccaaacgttttccgccaaaatgtttttaaaaaaaaacatttttcaatttcaaaaaaacaaatttggcggaaaatagattacaagggattttaaaagattttaaaagggctttaaaacattttcaagagattttaaaagattttaaaagggttttaaaagatttacaagagtttttaaaagattaacaaggtttttaaaagattttcaaagaatttacaagggttttaaaatcctttaaaaactcttgtaaatcttgttaaaactttttgtaaaggttcacaagagttttaaaatggttcaaaaattattaaagggtttaccagggtttttaaaagatttttaactggtttaaaaggattttaaaggatttacaagggtttttaaaagattgaaaaaacatatacaagaatttcaaaaccctttaagaactcttgtaaatctttttaaaaccttttgtaaggggttcacaagagttttaaaatggttcaaaaattatttaagggtttacaagggtttttaaaatatttttaaatggtttacaaaagttttaaatgatttacaagggtttttaaaagatttacaagggtatttaaaattcttgtaaatcattttaaaactctttaaaaacacttgtaaatcttttaaaatcattgtaaaaggtttaaaatgatttacaaaggttttaaaaagggtttttatagtatttacatatataaagactttataaagattttaagaggttttaactgatttacaagggtttttaacaaatttacaaagcttttaaaaaactgtacaaggttttttaaagagtttttagagggttcttaaaacttttacaaggatttttaaatgcatgtttttagctgggacttttttgtcgtggagaaaaaaaattggagggaaaaaaaaaatttggcggaattttgtttttgtcgggaaaaaaaattttggcgggaaaatttcagtttattattacatattctcgttagatgagtgtaatttggtcatttgctcaagagaagtgggatttttaaaaatggacaacataaaagggtattgttgcaaaagggtagtagaaaaagggtatttttgcaaatctctaaatatattaaccaagtcaaatatcaagttaatgattatttaatttcttagattatttcaacacctaaactcatctataaattgaagtctatggaacataagttattttatctcttcaatacaatcttattccacagacaaaaaccctcttcctatctcgttaatggcaatgaagagtctctcatttcttgcagctctatctctcttggctttaacacttccattaaccattgcttctgatccaagccaacttcaagacttttgtgtcagcgccaacagctcagcaaatggcggtatgtacatgatgattgcaaaacatttttactcatattattaataatttttctcatatcttaataacactatctccttcttggttacaattttcagtttttgttaatggaaagttctgcaaggacccaaagctggtcacagcagatgacttctttttcccagggcttcaaactgcaagacccataacaagtcctgttgggtcgaccgtgacagccgtcaatgttaacaaccttcttgggttaaacactcttggaatctcccttgtccgtattgattatgcggttgacggacagaacccacctcacacccacccacgtgccacggagatcttggttgtcgaactaggaacacttctcgtagggtttgttacatcaaaccccgataatcgcctattcactaaagttctcaacgagggtgatgtatttgtgtttccagagggactcatccattttcaagcaaacattggcaaggcaccagcggttgcattcgccgctctaagcagccaaaaccctggtgtcatcactattgcaccaaccgtgtttggggctaacccagccatcaacccaaatattcttgcaaaggcgttccaggttgacccaagggttgtcatggatctacagaccaagttcaagaaataataatatcgtacttttgaattgctatccctttatatatttgtgcctgaataaggatcgtgtttctccgtccatcctttcgtgacatgatctgtttctttgcttcaccttgattcaattctaaataaattaatatttgcacatatgtttttaaaaatgtattcatgttcctaatgtcagtttggaaattcacaagttatcactattctggtggagttttcttcaacaaaacaaaaacaacaacaaaaaaaccatattcattcattacaaaatatatcaaagtctctagctcattgagagatttttgccttcagaatcccttaacaaaaaacagaaaaaaagaagaagaagagatgtttcgccttgagaccatccacattgaatagcctctcatgttgtcttaaatactaaacatagttaaaattaaagacatcctcctttttggatgtcaaaaatgtctttcctatgacattttagacactcaaaacagaaaatgtctttaattaattaattaattaatttttatttatttttttaatgtctttaattttaatcatgattaaactatttttaccatggttagtctttgagacatccatgagaggttatgcaatggagatactttgaggaattaacgtttttagctaaagaagttaaagactaatcacgtgccatgagcatgggaaattttactcggttttaaacaaataacttgctttgatttatgttttttcttcttctccatcttgcttgttcaatttgtatcaaaagacaaagagaggaaaattcattgatgtggcacatatatatggctagtgctctacgatggatttaccaccgaaatacgggttcggatttatgtggaaaaggtaaaatatactccgaaaacattagttatatatccaatgatcaaaaatcgatatatagacggtaactaaaacatttgataagagtctggggccttattagtataaatatgggttagaatattaccatatatctaaatcctcaatatatttaggtttagccggcgcctaaactatcttgtaatataaatattttcctctagatcaataaagattcaagctattctctcaactttggcatgctagcagagccaaacactaatagagccaaacactaattgatccaaacacacaaaactcttctctcatcacatagattttcactatggtgaaccctcctccctcaccaaactccggtaaaagtacttcgacctccggaataactaaagattcttctcaaatctcaaactctccttattacttatatccatcggatcaccctcatcaagttcagttaagatttgctcactcaaaaacgtcgtctactttttcttgagaacaaaccacacacaaaacacgaacaagaatatgctttgttttcgaaacagaatattgagaacatagaaaatgtgaaaccggaaaagatgcaagatgaaagtgcaagaagtaagaacagagaacacaagagcaggtttgataacctagttcactcccaaaagggtagctacgtctcggccgagactgtgctcggaatccactaaatcagagatagtgtttacaaggagaaatacaaatgaccactcgatacctttcactagtactcaagttcactctgtatcactctccttctaatccagttttccacgagcgtatgaaacacattgaaaacgactgtcatttcattcacattgagctcgtttcaggaaacattgcaaccgctcatgtgggcactaccgagtagctaacggatctccgtactatagcatttggatgttaacaatttcagtatttatttcgcaaattaagcgtttataacctgcacggtccaacttgagggagagtattaggataaatatgatttggaatattaccatatctctaaattctcaatatatttaggtttagcctaaactctcttgtaatataaatactctcctctaaatcaataaagattcaggctattctctcaactttggcaggcctagaacgagagtttaggcagaacggagcctaggccttaagaaatttattgtatttagttatatacatgttaagattttatatatcactaattatatatacctgcctccattttgaaaagaaatctaacaatacattcccttatttcaaatttaaatttgaatttaacatagaagaaaaatctaatatcataaagttcaaacccaaaaaataattaataaacagttaaaagctaaatgtcgagatgatcaattgaatcctttttatatccgaatatttagttaaagtacgtcgtatgatacgacataagcattaaacaaaaaaaaacttaaatattaaccaatttgagcaattttggccaatttgaactgatttagactgcctgaaccggatttctgatttttcccagtgatacgatgaaaatcgtttcggttgagaccacctagactgcctaaacgggccctttgaacgttttttttaaaacattaattatatcttatctctatactattattctcattatccattaattacatttggtttatatagtcgtgtcttatctaagaaacaatcaaacagatacaccaaatgctaacaatttaacacaccccaacacgttcacattgaccttcccttcgagtaatcactcaataaatgtatatcaaacttcaagtgcaccacgtttcgttgggaaataattttttttttttcatcaacttgaattttgaattaaacataatttgttcaagaatgtttttttaaatacttttaaccaagtcaaatatcaagttcattgtattacttaatttcttggattagttcaacacgtaaactcatctataaaattgaagtctatgtctcataagtttcttatctcttcaatacaatcttattccacaaacataaaccctcttcctatctttttaatggcaatgaagagtctctcatttcttgcagtgctctctctcttggctttaacacttccattagccattgcttctgatccaagccaacttcaagacttttgtgtcagcgccaacacctcagccaatggcggtatgtacatgatgattgcaaatcattttcaataaaaaatttcatatcttaataacactttttcttcttggttactattttcagtttttgttaatggaaagttctgcaaggacccaaagctggtcacagcagatgacttctttttctcagggcttcaaactgcaagacccattactagtcccgttgggtcgaccgtgacagccgtcaatgttaacaaccttcttggattaaacactcttggaatctcccttgtccgtattgattatgcggttaacggacagaacccacctcacacccacccacgtgccacagagatcttggttgtcgaacaaggaacacttctcgtagggtttgtcacatcaaacccggataatcgcctattctcaaaagttctcaacgagggtgatgtatttgtgtttcccgagggactcatccattttcaagcaaacattggcaaggcaccagcggttgcattcgccgctctaagcagccaaaaccctggtgtcatcactattgccaacaccgtgtttggggctaacccagccataaacccaactattcttgcaaaggcattccagttgaacccaagggttgtcatggatctacagaccaagttcaagaaataatgatatcgtgatttgagttgctttccctttatgtacttgtgcctgaataaggatcttgtatttccgtttatcatatcatcatatgatgtcttttttgcttttaccttgattcaattctaaataaacaatgattttccgttcttaataagggatacatgttttgtacaccatctaaataatagagaagcatatggttactcaagcatctacatgaaaaccctagttcagatgctgattacaatgtgtatactttcccttgtgaattctcaaaattcatttagcatgaatttctttttacaaacatatctcttttagcatgttgaagatactctgccaagaaagttacgtaacgttctctcatcttgaaaattgttaagtattaaacaaatttggaaagaaataataaaaactaactatgatgagcaccgcatattcaacgatagataatctattggttgaaatttatgtgacaaagttagctattatgtaataacactagattttgaatcctttttttgataaaacctatcatctgatacggtcagttttggtaaaaaagtatcgcagtgttttagagtggacttctccctgaaggaccaccacactatatgtcatgagtttagaatttataatcttgagctcattgaattttatcatcgattttgattgacatacatgatacatgtagttggtataattgttcgtgcctactcacttaaagaaacaatcaaacccaactaagagttttatattgacatttggttgagtcaacttagctgcatgtgcaaatgaaatattgtcaaaatgagcacgtatagattcatgacaagttgagaaaatataatcatcaaacaaacaaacatattttgtgtaacttgtcaacacttgccatttcatacatcaactggatcatttttcatttgaattaaaacttcacttatagtttcttattgtatttagctagattgaaatatgaccactataaacatggtgcgttgagggaacacggtttttttaattaaaaaatcttaattatttcggacttgttattgatacattgtagacttttttggaccgagatcttggttgtccatcaaggaacactttttgtagggtttgttacgtcaaaccaagtcggaaaccgtctcttcaccaaaacgctaaacatgggagatgtttttgtgtttccagagggattcattcacttccaattcaatgtgggacgatctccagcggttgcattcgctgctttgagcagccaaaaccccggtgtcatctctattgtcaacaccgtctttgggtctaacccaccaactaatctgaatgttcttgctaagggattccagttggaccctagggtggccatgctcatggatctacaagccaaaattctgatcatgaaatacgaaatagtgtgttgctattttatttcatccatgcatttgtttaaataaggaccatgagttaccgttcattgtaatgccacgatgtgatagttgcctttactttcaagtgtcttcatgaacttatgtttcgttgaagtggtgagtgaaattatttacagattcaaaataacattttattagcatgttttgcagacaatgcattcatataactttctataatactttcttttttttaatagtttatggaaaaaaaaagattttagtctctttgcatacacgaacggtagattattacataactttgatcaatttcgttgtctgataaaatagcatattatcaattttaatctatctattttttcacacattcatatttaggtgggccttatctagtggcgatataattttggattgaatatgagtatttgttattattttccttgtatgaatgtaaaattatattcaaacaaaaatcttgggtgcaataaatgcacttatttgctttgagagattaataacagaattagaaactgaaaaataaagttggagagcttaagatcgtgactgaaaccagatgcagagatcatcatctagcgtcttcgatctaagccaaaaatctggttgcggacagtacagtctataatatagagaatctgatcaaaagatttagggatgtcgtcgtgccttcttctattcctctcttgccaaataacatggcttgtgagttgaaatatatatcgaaggatgaaccttatggtgcctttgaaagaggagtcaaagactagtgaaaaaattacactaaaagaggttgtgtagcgctgatggaggaatttgtaggttagagcctctcataccttagccgagaattacaaaaaaagaataggtgattttgggattccaaagggccttggtagaacatacaattcgaaatcactcgagcattccaaattttcatttgatctcatgtagttaaccgattatgtgtagccagcaacaaaaaaaaaaaaaaaagagaatttagacgtcgttccagggaaccaattatccttatgtcaatgtcttacttcactgacttgtcggatttgctattgaatacttattattcagtaggttaaaagttgggtttaaaatagattaattaacataatttacaatgactaatattgggctcaatcgatgccaaccaatggttattgtttactatttagaataaatcaagatatcaaaattcataaaatgactcaaataccttaaagagaatgtaatttgtaacttaataatccaagattaaggaacaaggcaattataatataaattcataatgttagaatcttttagtttctctttaaggtatttgatgctggtaatgttagtattcaggatctctatatcacgttcaagtttggtacaatccttatgtggttaataatagtacattaaacctaaaccaaaaatctaataataatgacatggatttttaagtcaaaccaaaaatcattaatttcggtttggtttggtagggttttgagatacggtttttttgtccaagccaggtactctattccaattttcgatatgggtttatccaatcgtggcatgttataacttataacttgaactaaaccaacaaattaacattgacaattgttcgagtcaacttaacagcacgtgcacatatgcaattgaatttttttttttacttatcaaaagatctcattttgcaaatatgcaattaaccctctttaactttttttaatatcaaaagatctcattttgctttttaagtattaaaagatacttttattttagtgtaggatattattttctaatttgtattggtttttgcttccatcaattaattaaaagcaaattttacataatgtatatattatctgaaattgttctctttttttatttatttataaagtgtcactcaagatggaaaaatctcatttttaatattatttaatttgaactctttatatatcttatatgtttcttaccctcttgattaaaactctttcttacatctaaaaaaatcacgtaacttaatatgaacatgaagaatctctaccttgcaattttatatctcttggcggcttcaacacttccatttgccattgcttcggacccaagcccccttcaagacttttgtatcggtgtcaacaccccagctaatgctcgtatgtaaatgttgattttgtaatcctacttaggctcatcgtttactgatcatatatatatatatatatatcacttaatatttattttatgatttatttggacactatacaatttatattctacagtgtttgtgaacggaaaattctgcaaggacccgaagcttgtcacagcagatgacttctatttctcagggcttgacaaggcaagaactactgaatctagtccagttgggtctaacgtgacaaccgtgaatgttaatcagattccagggttaaacacccttggaatctcacttgtccgtattgattatggaattaatggacaaaacccgcctcacacgcatccacgcgctaccgagatcttgcttgtccaagaaggaactcttttcgttggttttttctcatcattccccgaaaatcgcctattcaacaaaacgctcaacaaaggggatgtatttgtgtttccagagggactcattcatttccaagtgaacattggaaaacaacccgctgttgcattcgcttctctaagtagccaaaaccctggtgtcatcattatcggtaacaccttgtttgggtctaaaccgcctatagacccgaatgttcttgcaaaggcatttcagttggatcctaaggtgatcattcaactacagaaaaaattcggataaaatgaaaaattattgtggtttcaattgctttcatattttttctaccttagtccgtataatgatcatgcatgtatatatcatccgttcatcaataacgtgacatgatgcttggtcaatgttttttcctttcatttgattgtgataaaataccctcaaactagttgtaatgatcttttcttagttatgccttaagcaactatattccaatttcttctaattttcaacattgattagacttacatatctggttttcagtcgtgacttgttttgtactgaagggacaatcaaaccaaaccaacaaattcacaataacgtttcttcaactcaacagcacatgcaaatgagaattaggaatattatcaaaactagctagcacgtataaattacaagttgaggaaatgatatgatatcattaaacatatcgcatattcttcacataccatttcaaatttcaaatgcatcatttgaaaatatttcataaatatatattttatttttcggttcaatagaaatattaccaccataaaacattggccggtattgagacttgagaaacacgactaaattgttttataaccattttaaatgtctagttcagaaaaagtcgcgttttttatttcgttttaactgtatatggactggctcaaaacctaaatcatctatatattgagctctatgtctcatatgtttctaacctatgtgtatgttttggcatttgcaccttttagcttgattctttttgcttgaaactttcttactcttaagtttaattaaaataccagatcaaatggtacccaaaaaaagtctatgtattattgctggcccatgggcttcgccagtcttaaaagttataactaacagctatatgttttcgatggagaagttatttagggtttaatatagtagaacatcatcaagaaatagccagagatatacttcaagttcaaatagagttatacagaaatagatatataataagattatgctgcttatggttatgtacatatgaccagaagactcttaaatgagaacaaaaatatgtgtcaaaaaaaaaaaaaaatttataattatcttctcttgtttcttcatatacgtcttctgtatcctctgcgtgcataaaatctatattattttatttaaaaagttagaaattagtagggtgaaatcctaagatggaagccttttggtgcaaaaactctcggaaacaccattaattcatcccctcctatttcctcccatctgccattataataatacatcaaaaaggattttagtattaacacaaacttctcaaatcaaacaacaataacttcaaacaaaacaaatacattagatcatcaccatgaacacacctgtatctcgtaacaaagtaatggagaaagctcgagatctcgacaatccctagttccttaccaggacaaagccttgtcccacctccaaacacaaagcatgagttttgtgactccaagctcttcttctgcattaaaaatttgataaaaccctcattttcattcaaaagtttgcactcaaagaaaaacaaagcaaacgataactacataatagtctttccattttaaattaagtttcgtttataaatttatatatatacaatgtaagagattgttagaatgtacattttactcttaataatccacgatcattttgtctgactaagtcctaatattatctttctagttaataagttttacaagtatagtaatacaatcgtaaatttggtttaattagcattgataaaacaaaacgtcattgaaacaaacaaaaaaaacgctaaaatgacctttcatattaaactctaaaacgacttaccatccatctccatggattaaagatcaatgggtcttcataaagatttgcatcgtaattaatttccctcgtgtatacataaattctccatccttttgggattaaataacctacaattattaaagattcatgatcagagaatactaaaatcaattaaagagaacacaaaaaaggtttatattctgtcaaaattattgcaactgaaatacccaaagatggctcacacaaaagaggatgctttcatagctggatttggttggtattcataatacactctaaatcattgatatacttaaggtccaccacatgctcacattatttctctccttttctttcataaaattataataaacccgacaaaggaattttgataaaaatagatatattgtacgtaccgttgatttccaagtcacgagtagttttccttaggaccccattaacgatcgttgccaatcttgatgtctcataaatcacctgtaataaatcatttattataatgaatttctaacgagtaaagactaatgcttagttattgttaagtataacattgatgtttaataatactcacagctcgagtgaacttcattgacttcacgtcctcaagaccgagtggttcgtcctgtcgttttctttccctgaatgccaaatgctcagcctgtattttccaaaacaatcccaaatcaaaaaaaccgaaccggattaaaccagataatcgaaaaaacagttatgtttcttttcttagggacatactcttagttcttgaagagcttttgggtgatcatgaaggtacttaagagccatcattgaggtcgtagagacagtttcgtaacccgaatacaaaatcgtcacaacttggtctcttatctcttcatcggttaacgggtatcggttaccttccttcttcatcaagtaacctaacatgtctgtgaatgtttctccagaatctctacgttcttgcatcagctctcttagcaacctatcaatgttatttcttgcctgacaagaaaccgagaaaagttcagcttctgtaatttttctcatttaaattcttattgaggtcgagtcgagtatttttacttggattccgcaacgataatttgtgcccggaagatcaatcggaacggataaagtcccaacaacaagcttgaagaatgcagttttgaattcttcaacaaatggttttcttaagttcccagcgatttgtgtcagtgaagataaaaatgccatctgaaacccacccaagaaaaaattacttaaaaatacacaaaatatacataaataaacaaaagcaaatctgacaaatattcttggatataagcgaagacaaatattctcaattgtttactattatacacccatccatataagattatcagtttgtttatcagtctctatcagaaactgtaaattttctttacttaaaaacagagaatttctaaataatcattcctaataaaatcactaatcaacaactacttcattttttaaaaaaaatttctgacatataaaaacagtgtagactgaaaaaacagagaaggtaaaaaaagtaaaaacagagaaatgtaaaagataaaaatacacatacatgtttggtcttatcttggatatcaataacctcaagctcattccactgatcaagatagcttctcatgaagtgatcaactttaggcaagatatgatctctcatcatggtcgagcttatgagagacagaagcgagcctctcataagccggtggctcgaaccgtgaaccgcagccatgttacaagtcccaagtatatcaagcatcgattgtgggtaaccaggaaccaaaccttttgattcgttctttaaaatgtatctgtttacttctgagtccattgagattaacgttggacaacctagaagatgagatttgaagaaactcccgtatctgttgattctaagttaatttttagcgtagagaaaaaaaaaatcttgatttgagtatttttcttaccggagtctttggtttctcatgaagttggggccttgtttgagaaactcggtggtttcgccaaagattggccagcccatggttccaggaggaagaccattcttggtatatcgcatctgattccatcgaaggagagcggaacagagagacacgatgatcaagagaagacccatcatcaccatcattgctcccatctcactctgttttctgctctgttttaaaacagatcactctgttttttctttctcttgttgtctctattattatgtactatgttttgaaacagaccagagaaagagagaaagagtgagagggagagagagatggctatggaatgtggttgagactaggaggatgtgtttgcaagtgtttatatagaaagctaagtcaagtcttaagtgcagcatgctcaagagagaagattgataaatgaacttactagagaaaaaacaagaaattattacaccaactctatgtatatttcttattctatggcttcggatagtatgtgggaaaacatgacatatttgtcacttttgttgtctcctagcatgaaaataagcatgatggtgttcaaaagagttatttcaaagcataatatatttttttatcacgaattataagtcgtttgtgtaatattgggaaagtgtcatgacaaaacacggtaatatatgcatgtgtgaattctagagaataaatttttgatagtagtacaacaaaatcattgatcatattgtagagatataataatatagaaacgcgatcatatacgggattcgaatttggtgttcaaccattaaatcttttgataactaatactagacaaaagaattttacaagaaaatgctagacgccaacaacccaatgtctagcgtctaaaatgcttaatcagaacataaaacagttttaggcactttaagcgtttacaacaaaacatattctaaatatgatattatagacaaaaatcatataaaactttctattataaaattaaaaaaatattaaatcgtaaacaaaaattagataaaaataaatattttaatgcatatcaaacaatataggaaacttaagcttataatttaaatttatgtagttggaaattgaaaatttacaatgaaacaaaatatatatgattttaggcgaccaaaacagctagctcctaggcaaccgcgtaaaccgctttttcgaacacatgtttttctgataagaatttttctatttgtttataaattggttacaaatattaaatacaattcagtaaaaagttgataacggttgattagatttttcaactaaatatcctttttaaaaataaattgaaatgatctagtcttgtatatcttcttacattttagattagcagtacaatttcattatataaaaaaaactgaagatcaagtgaagtgtggggtccgacaagtttgatccagtttgatccattaacataaaaataagtagattcaatttttatttcttaggtgaatttataaaatcctaaaaaggtataaattaaataacattgcaattttttattttaatactagaaaggtgaaaaagtaggaagtagaaagagtagattttaaagttaatttctcaagatctttgacatgaatatgttgttcggtagttggatgaggaagattcctctgttcatttcatattaaagtttgtgctttataactgaatcgtgatgggttttcttataaataaagaatttgttattaaagtatagttggatagaaattaatatttagatatcatgtacttcaattatcgctgtgatagagtgataactttgatcacgatttgtattttgactattttcagttatttggttaataaaaaaaggtttctaaaaaaaccaaatttgattgctttgggtccaaacggattctcggcgggatctttcacttttagaggctgattggttcttctttaccatttataaatgctgtgtttgcggatggtaccggtcattaacgattgaatattttaaattaaataaattctgtaacaagatgcatagtacttgacgatttgtggcatcgtcgactaggacatttttctactagtattttactttctttaccagaatgtcatcttttttgtaaggttttgacaagattgatagttgtgatacttgtttttgttctaaacaaacacgacaagtttttcctattagcaataataaaacaatgaaatattttctttaattcatggcgatgtatggcggtcgaacagaactccatccacatcaggtgctgtttattttttcacattaattgatgactattctcattcggtttggacatatctcatatctttcaaaactgaagtttcgcaacttattcgtaacttttgtgcaatgtctgaacgtcaattcggtaaacaaggtaaagccttctgcaacgacaatggaactgaattcatgtgtctcacctcatacttccaaacacacggcatccttcaattttagtccatttcaagttgcttttcaggccagcttctgatttcaacattttactcgatttgatttttatgttgtcattgttattcccgtgttctcgtgtcgtcggaaaataaaaatcaccaaagaagtaaaagaaagcaaaaaaaagggaagagaagttgtaggggtaaaagtatttaaatgatgttgatccaatcatccaactaataatcaagttcatggatactaatgataataccctttttctttcttttttaactaggttaaattttatttaacttacgaataactcttatttagtcatatatttaaaattaggtactaatagaactaaataaccacgaaattttgtttatttggaaaaatgtataagtggcaaaaccttaattaaatagactttccgtgatgtgtgggctgctgcattctttcggtcatcacatgttgtgtaagaattttcctctaaggtgacgaccgttgtgattgggtccatgtaggtgattattgtgaagtcaattctctaggggggaaaagtaagaagagcataaacacaaatggcctaaaatgggtaagcgtgcgtccatatggcgttaagagtcaatggcggaagacgggaagagtcgaggcatgaaagtcgatgatgtgagtctaacggacgtgagagccagcgcccagtggtgtgtgttgtggtttcgtatgttaaaggcaaaactctccattatcaacctatagcgtatgtagaaatgttatcgtgtttaataattactttttcactacccaaatccaacaattattagttttaaaatcagtttttcaactaacaatgatcccaaaatatgtcaaattatgatattctctaactttctttgttttcataatgaatgccaatattttttatttctttttatattacatggaaaaaattaggaatctaaaataaggaaaaaaagaattgttactgatttataatcacaaaaaaataaaaacataaaaattgtgaaccttgaaccttcagaaattggatcgatttcatgttctaacttgatttaagatcggattcaaagaaaacgtaaaagagacacacgggaatttatcgagttcaggctccgatgtggaaccctacgtctcgccggagatgtctccggaattcactaaaacacttagctcaaactcgagctctttctctctacaattgttctgttctctctcttactctctctcgattcaatacacttctgaatcgataatgaaaactgagattacagatgagtacttaatgaaacagaagaagacgagttctcggataagataattccgttagagatggacgggccagattgctccacgtgtcgcaatctccttagctcgcctaaaacagacttctgaaaccttctgattctcttagagtgtttctgagacttagcatatagatcaacaatcttcaaaaataaagaataaaaagttaaaaatagtataatagtgttgaatttttttaaataaaaccactgtatactgtaaaaactaaatgaatattaaattattaggtaaagtaaagagaatatgacatggaatgtaaagtaggatgttgaaagagtaaaccattgtacataatctaaaagggtacaacgtttttaattgaaaataattaatgatataaaattagtaaaaaaaggcggtacaaaataacaatatgagatatcagtgcacgaaagttgaaatatcacttttaaaagtgtttttaggaacatttttatgattcgtaataatcaaagtggtatatcacatcagtacatgattaccaatcaaaaccaataaacaaaaaaatgacaccgaacaaaaacttagggggctaagacttttcacgagagtgtcaacgatcggtattagagtccaccaggggtagctgcaccctctcctacacccacataccattgacctgggtcagctaaatatgttacaaagtattaataacgtcaatgcgtcatctataattaaaataaactccacaattcgtaattaagtattctagattactttatgagagatggaactggaagaatgcatactagaaacggttttatagttttacttttacggttttactatcttcgtcaccatcattgaggcttgctcacaagtcacacaccctctcgcacatattattattcttttattaatcagttacacatttcatcaaaataaacaaactagtagtcagaaaataaacgaaatctatacctggaaaaaaattaattataagataaatactaataaaataataagaagaagaatatgcataaaggtgtacgtatagttgtgccttgtgatgattgagcgcacgtgtgggtatggccattggtgtccgtgtctacattcactgaagttgacttctttgtctcccccactcttttgctcttttgctctaggcataaccatgattacggttataattatacttactatttactaacagttaagatacatgtaatctaaatcctctttctccttaaacctaatagtcgctcttcaactttattgtcttggccacgatctgaccagcgcgtgatggctcccagagtgtcggcttcgatcctctccttcttttattgtctttgttttcttcgggcttgaaagtatggtggttttagcaagttggtttgagttgttgttgatggagtttggttctaggcgatcaaaatcgaaagggcttttggtcaatggtgatgatggagtcgtcgttctcactatcgcatctctgtgtggtgcctcttcttgtccctaacctcatgcttcattgtgtttggagcatctttggctttttctgatctgaacagcggttttgtattctcggtgacccaattctcctatcgtctctcatgcttcttttttttctttggctcttcattaattgtgtttggtttagatcttctagtttgagtcgaaggtttagttgatgcttttgggttgggcagagattaagttatgcttattttgggttctaactcttcggattattgtatggctttgcggtgctttccggattagtggtttgcttgctttaactctctgctttgggttcctagttcttcttcgctgtttgcttcctctcaattgtgcgtggactctggtggactagtttcgtgtttggagtttgtctctcggatgatacatcgatgcaggtgcatctactagttcttttctggagccgtcttcggttttggttgttgcgttctaagcgcgacaatggtttcattcactagttcttctcttgcgagatcgtgaccgattcatgtgtgtaggtgacattgattgttttaaaattttcataaacaaaagtataaatgcaatgcttcgtctgataaatggagctccaaaagtcgctatagcaaactcataattcgaaccatttccaacgagtaaaccacagtacagtcacagtcccttgagagacctaagcttacaaagggagcaaagatttccatagttaaagagctcatttagccataaaggatgaccgtgagtgatatatgattagaacctgttttcattagtcacacactcacacttcaactcttcatactccaaactcgactcattagatatgagccaagcctctgcgactttcatagataatgatactggaaagaaggccaagctctaacttattatcaaatatgtgattttgatatttttgatgacatgtaaagtgttgtagttgcgacccaatcaagactgatttttattttttacaatatggtttagcaaaaaaattaagagatcatttataatgaacctgcaatattaggcccatatgtttattatgatttcttacatctttaggcccagattttaatcgtccaggctcaatattaggcccataacgttcggtttgtagttgtacaatcgcaaaaaacgtaggtagtcccgctagttcagctactgttacttccactaactatccttcgtctctacagagcatcaaagacttccatgtctttacaattcagtcctcacgacacctctgtaattacccttttgccctctgtcctccataactatccttgtctctcttccctctctatttctcgcggcttcaccaaaatcaataccccaagcgttcggatgatgatcattttctctttttattactatcatacacggccgctagtcccgctactgttacttccactaactgtagcatcaacagtagtgggcttttactattttaacatcaacttcaactaaagataatcgacaagttgtaataacgaaattgtacaaatgtttatgtcagtatgtaataaagccacaatattctctggcgaattattggtaaacaacaaaattgtggcaaagaaaaagtgatcctgttacagttatttggaaagttagaaaaaaaaaataaaaaaaatccatgaacaaaaaagaagatggctggcgttttcattgaaaaagtgatttgatttgatttttcttttttaaaataatactttgaacgtaagttaatgaataacaaaccattaaaaaaaaaagtaaaaaccaatatgatctaatatcttataaatatatataatacattaaattataaatgaacctcaatcttgatacctaaatctatatcactagattttaacccgcggtataccgcgggacgatttattttttaaaagtaatatatattaaaacttgcaaattttatttttacataatatttatattttacagtttataattgttattaagtaacgctataccatgaattcatgagacaattgttaaaaaaactgaagttttaacccctattaaaacagtatattaataatattttaaaattttataaatattgattcaaatacatcaaccatataacccaattccaaaataaaacacgttctttaatttatttacccgtcccatgattttttttaaagtagtaatttttaaaatttaaaaattattttttttatataaaagttttgcaaattgtatcattctctaatacatttatattttataatttaattttatatatagtaacattatacatacgacataacatttttggttttatataattttttctaaattaggatgatttgatatgtttaatattagtggtcttaaaaataataaattaaagatttaatccatattaaaatggtggattaattatattttacttttttattaatgttgattcaaaaacccgcccctccaaatccgtcttgccaaaaagtcatttattttattaatattagttttattaatgatatgactctgaattataatctaaatattttagctaataacataggagtgcactttatttatttaataggagaatgtaccatatgacctgaatgcacttttatccaaatccaccaaaaaagtcttgcaaaaatactatagagataagaaaacattgatattgcgataaaaaattaaaaactaatttttatgtgattaagatttaattaatttcgtatataaaatattaaattgacttatttgtttataatttggtaacagatagatatttgaatattcaatatattttgcttcagtttaagaaatctttgatgatccgtctttagatccaataagccctataatctagagattaacctgcagtataccgcaggtaggcttatattttagttaaactaaaaacttttattgtaaagatgatttaaaaatatatgatactattttatttgattttaaatgtatagtaaactgtgagttgtatatgttttgttgatattatctatattgtttagtgtttaagattatacacttgtagtttgattgttaatttaagagtttcacctgtagtataccatcttgtattaatatcgatctaaacccgttaattctaggattttccagattgtattaaaaattgaatcacatctaatatgttattaattattgtagtatataagattataaattttctatataatatgtatgaaattgaatattaatatttcaaattatgtctcgttactcagtagaaagttttcttaaatctatttttcacctgttataatattatttcatgtattgaacagtttatattcgtttttaaaaattcaaattatggcatatgcgagaaaactctaattatttttttataatgatgatattatttttctgcaaaaatagaatcatataaagatgagaagtgaactataataattaataaaaaaattaatatgataatttagataccaaatgtaatttgttgattttaattggttacttttttggaaattaataatgtatttcgtttttctaattaaattaaattaattaaaatttagatatcacatcttatatgttgattttgattggctattatttttgaaaattaataatgtatttcgttttttaattaatttaattaattaaattagtatttgactttttaatccttaaagagataaattaatttattctttaaaattttatttctaatggcatacctatgtaattacttacaaaaattaaggttacatttaaaatgtacttcccaaataatatagtaggataattataaaaaaaaaaaacttaacaaaaccaataaaaatgtgtattatatatttgttttcaaataattgttttcgctaggggatcaattattttgtattaaatatggaccaaccaaagtaatcagtctacccctatatttacgttccctatccattatcgacaaaaagcaatcactcctcaagcaaatcactcctcacaccacagaaaaacaaataattgaagaaatgaagtcaatagtcttcttcttcctcctcctgctctttgccgtagcaacctccgataacgtgataaatggttggtataatctcacagccgtccatgacgatgaagtgatttggagttcttttgcggcgccaatgatgaaaggtggttcgtcgtacataacctatccggtcttgcgacctcagcaggcatgtaatccttgtagtggagccgttaaatatgccaagaagaagaattgtcttgtctacaccagatgcaaacgctttcctaagggcatgtaacatactccttatatattctctatgtttcagtttgtgtcgttctaagcgtttgggaaataacttgcttgtaacaaaatgtacggtgtctgtttgttgccaaattattgagtgttgtttcttaataattttctttaaagtcagcgaagtaattattctataaaaactaagagttgctctatctagatatatatacaattgtggactacttctttaaaaattaaataaattggtaaagtttaaaggtacgtctcccaagcagaaactgaactaaagaattcaggaccaaactcctctgaagggaaacactcaaaaaacaaaaacaaaaaaagattcatttggtaaacataataatagtgaagaaaatataatatgccaaaagtgggttttgaactcatgtccttatggaagtgcaagtttacgtattaatgtattattcaagtgtactaatcgcaagtaagaaaggacgagaagttcagaagctgtgttcgggatttgttgcttttccttcagtgtctctagtctgttttagttctcggatttttattggtttatgtctaagtgttgtacgtagtctacttattctaattttagatcgtgttgttttagtgtttcttgctagtctccgaagtttctttattcggctttttctcctgagataccaaagtatattttaatatgtatatgttggctttgttttattcgtgttcttcggtcctttgatgtatgttctcagcctttcgacaacaaatccaatatataacttagatgacaaagaaaagaaataaaaaacctcatatccttatatactatctgaaactagccatttaaacaaccttcgctatttattttacttaagcgatgaatggtaattgatgtacaaaatcagacaagtagtaaacttaggggtttttagtaagcttagttcgtatcgagaatcaatggacgtaactttgaggtttaactctcctccttaacactttttatgatatatcaaatcaaatatatttttttactaagattggtgttcttcaattaatgtttcatctcttttaggttctttgcacaataagtttttcatgagctatctaagttcttagcttattttctatcttaataaagctttcaatcattgttataaacataattttcctcttttaaaataaacgtatatgtaaataagtaatatattcacaaataaatataaaactttaaaactaagatactgaaaaatatttttgatagttttataattaaaaatcaatctctttttatatctcaattgtaaaaaacactgcaaaacaaacctcaatataaacaatattagttattttccacaaccaaattttacattacaaatttacaattatatcttctaggcttgctaagtctaactaactgaagctcatagcatgtggtttgattttaacctatttactggaaccctctaaaatgaacccaaagctctaaaagagtcgagcttttttgggtttgagtctgagggtagactaaaacaacaaatgagtcaatttgcgtcatcttttaattcttggaccttaggcaaattgaccccacggaagaaaaacttcatcgataccttcttgttttgcttgacctgaaaagtcaatggttgaccaagtgagtcactcaccacccattagtctcttatcttctcaaaattcttcaattctcttctcgtttttttttttttatcaattccaatgatctgtcacgttttagtaattttcactattctcgtttccgccgtcgtcgacgcaacggcgtcgtatgagcccactgatgtctttctcatcaattgcggcgatacctccaacaacatggactacagtggccggaactggacgacggagaatccgaaatttatgtcatcgaatgcagttgacgacgcgtcgttcacttcatctgcgtcataccaagaatcagggattcctcaagtgccgtacttgaaagctaggattttccgatatgatttcacttacagttttccagtctctcccggctggaaattcctccggttatacttttatccgacccgttacggatccgatttcgacgccgttaaatccttcttctccgtcaacgtcaaccgtttcactctcttgcataacttcagtgtaaaagctt

SEQ ID NO: 791 - DNA, 66237 bp, Arabidopsis thaliana
ccataccggagtcaagttctctaatcaaagagtttatcgttccggttaaccaaactcttgatctcacgttcacgccctctccgaattcattagctttcgttaacggaatcgagattatctccatgcctgaccggttttactcaaagggaggatttgacgacgttgtaagaaacgttggtagggacgttgacttcgagatagacaactccacggctttcgagaccgtttatcgggtaaacgtaggtggaaaagtggtgggcgacgtcggagattcgggaatgttccggcgttggctttccgatgaaggtttcttactcggtattaattcgggagccattccgaatataacaggtgtaaagatcaactacacggataaaactcccgcgtacgttgcgccggaagatgtatacacgacgtgtcgcctgatggggaacaaagacagtcctgagctaaacctgaatttcaacctgacgtggctctttgaagtcgatgccgggtttgcctatatagtgaggcttcatttctgtgagacgcaaccggaagtcaacaaaacgggtgaccgcgtcttctccatcttcttcggatatcaactggccatgcgtgaaatggacgtgtttcggctgagtggtggttttcggctaccgatgtatctagatttcaaggtacttgtcgacgccgacggaactagccagagacctagtcttcgagttgacttgacaccttacaaagaggactatccaacctattacgacgctattttgagtggtgtagagattctcaagctgagtaattctgatggtaatcttgcggggcttaatccaattcctcaactaagtccaccaccacaatctataacgccactaaaaggaaaaggcaagtcatcacatgttttgccaataataattgcagtggttggttctgcagttgcgctagcgttttttgttcttgttgttgtcctcgttgttatgaagagaaagaagaagagcaacgagtctagtgtagataccacgaacaagccttctacgaactcgtcatggggtcctcttctgcacgggacaggctctacaaatacaaaatctgcctcatctcttccatcagatctctgccgtcgattctccatctacgaaatcaaatccgccacaaatgatttcgaggaaaaactaatcataggagtaggcgggtttggttctgtctacaaaggacgaatagacggtggagccacacttgttgcggttaaacggctggaaattacatcgaaccaaggtgctaaagagttcgatacagagctcgagatgctttcaaagcttcgacatgtacacctcgtctctctaatcggatattgcgatgacgacaacgagatggtacttgtctatgagtatatgccacatggtacacttaaagatcatcttttcaggagagacaaggcctctgatcctccattgtcatggaaacgaaggctagagatttgcattggagcagctcgtggattacagtatcttcatactggagccaagtacacgatcatacatagagacatcaaaaccacaaacatacttctcgatgagaacttcgtcgctaaagtatctgactttggtttatcaagagttggtcctactagtgcttctcaaacgcatgtctccaccgtcgttaaaggaacgtttggttacttggatcccgagtactatcgccgtcaaatcttgaccgaaaaatccgacgtgtactcttttggagttgttctgttggaggttttgtgctgtagaccgatcagaatgcaaagtgttccaccggaacaagcagatttgatccgatgggtgaagtcaaatttcaataaaagaaccgttgatcagatcattgactcagatttaaccgctgatatcacttcgacctcgatggagaagttttgtgagatagccattagatgtgttcaagaccgtggtatggaacggccaccgatgaacgacgttgtttgggcgcttgagtttgctcttcagcttcacgagactgctaagaagaagaatgacaacgtggagtctctggatctaatgccaagtggtgaagttggtacgaccacggacggagaagatgacttgtttagtaggactacaggacacgttgggaaatcgaccacgaccgatgactctgttctagttgttggtgatgagaggagtggttcgagttggggagtattttcggagatcaatgaacctaaagcacggtagatttgatggcttggtaaacaagtatcacattctggttagggttgatatatatttgtgtatgtataattgttgaataaacacattattgtatttaaattacattttgatgattatttagcagcttaaatttagatattatatacttgcttttatttgaccagagataaagttggatttttttttggcggttcgtaacggttgagaatatgtttgacatttgtctcaaaatgcaatcaaaaaagttttgcaatataaaattttgttaaatacagtcgttaaaaaaaacaaaattgttaaataagttccttcgccatttcacgtggctcttaagtcataacctagttatgaaaaatgaaaaacacctaatcttttctttttcaacttcaataccaaatgatccgtcacgctttgttaatattctctattctcgtttccacccccatagtaggagaaggagcaacgtcgacgtatgaacccaccgatgtctttctcttcaactgcggcgacacttcaaacaacgtcgacgttagtggccgaaactggacggcggaaaatcagaaaattctatcgtcaaatttagtcaacgcttcgttcactgcacaagcgtcataccaagaatcaggagtttctcagattccgtacatgacagctcgaatattccgatctgagttcacctacagttttccagtcactcccggttcaaattttctccggttatacttttacccgacccgatacggttcccaattcaacgccgtcaaatccttcttctccgtcaaagtcaacggcttcactctcttgaacaacttcagcgctgacttaacggtaaaagcatctaaaccgcaaacggagtttataatcaaagagtttattattccggtttaccaaacgttgaatctcactttcacgccgtctttagattccttagctttcgttaacggaatcgagattgtctccatacctaaccggttttactcaaagggaggatttgacgacgttataactaacgttggtagttccgttgactttcacatagaaaattcaacggcttttgagacagtttaccggttaaacgtagggggaaaaacggttggagattcgggaatgttccgacgatgggtctctgatgatgagatcatactcagtgaaagttcaggaatctctccgatcgtaccagatataaagattaactacacggagaaaactccgtcgtacgttgcgccggatgacgtgtacgccacgtctcgctcaatgggaaacgcggatcaccctgagcaaaacctaaattttaacctgacttggttattcaccgttgatgctgggtttagctaccttgtgaggcttcatttctgtgagactttgtcagaagtgaacaaagagggtcaacgcgtcttctctatctttattgaaaatcaaacggctacgcttgagatggacgtgtttcggatgagtggtggttcttggattccgatgtatctggattatactgtgattgcgggttcgggaagtggtcggagacatgatctaaggcttgatttgcatcctttggtgagcattaatccgaaatattatgatgctattctgaatggtgtggagattctcaagatgaatgatcccgatggtaatcttgcaggacctaatccagatcctctagtatcaccagacttaataccaaaccgtgcaacgccgcggattcgaaaaaataagtcacatattttgccgatcacacttgcagtggttggttctttagttgtgctagcaatgtttgttgttggtgttcttgttatcatgaagaagaagaagaagagcaagccatctacaaactcgtcatggtgtcctcttccgcacgggacagattctacgaatacaaaaccagcgaaatctctgcccgcggatctctgtcgtcgattctccattttcgaaatcaaatccgccacaaatgatttcgaggacaagctaatcatcggagtaggcgggtttggttctgtctacaaaggacaaatagacggtggagccacacttgttgcggttaaacggctggaaattacatcgaaccaaggtgctaaagagttcgaaacagagctcgagatgctctcaaagcttcgacatgtacatctcgtctctctaatcggctactgcgacgaggacaacgagatggtactagtctatgagtatatgccacatggtacacttaaagatcatcttttcaggagggacaaaacctctgatcctccattgtcatggaaacgaaggctagagatttgcattggagcagctcgtggattacagtatcttcatactggagccaagtacacgatcatacatagagacatcaaaaccacaaacatacttctcgatgagaacttcgtcactaaagtatctgactttggtttatcaagagttggtcctactagtgcttctcaaacgcatgtctccaccgtcgttaaaggaacgtttggttacttggaccccgagtactatcgccgtcaagtcttgaccgaaaaatctgacgtgtactcctttggagttgttctgttggaggttttgtgttgtagaccgattagaatgcaaagtgttccaccggaacaagcagatttgatccgatgggtgaagtcaaattacagaagaggaaccgttgatcagatcattgactcagatttatcggctgatatcacttcgacatcgttggaaaagttttgtgagatagccgttagatgcgttcaggaccgtggtatggaacggccaccgatgaacgacgttgtttgggcgcttgagtttgctcttcagcttcacgagactgctaagaagaagaatgacaacgtggagtctctggatctaatgccaagtggtgaggttggtacgaccacggacggagaagatgacttgtttagtaggactacaggacacgtggggaaatcgaccacgaccgatgactctgttctagttgttggtgatgagaggagtggttcgagttggggagtattttcggagatcaatgaacctaaagcacggtagatgatggcttggtaaacaagtattacattcttgctagggttaatatatttgtgtatgtataattgtggaattaaaaaattaatgtatatatatatattattatgagttacatgcgtagcaggttaagttaatcaaaaaacaaaaatctttgtaattattatgtctctctcttccttgactcatgtgataagatattatcttatcaagtttccagttatcatgagtcatgatccttgtagatgattaggctaagcaaaatgacattaagaactaagacgtttgtctaatctagagtggtgttaacatttttcgcctaatgtatgtgacaatataggattcgccaaatcctttatgacaatttttaatctgtacaaatctgatcatcatcgatcccgatacacaaaaactaaactaaataaccaaggactcggcacaaagaacacaagtcctgaagtccaatatcgattagctcaacattgaccttgatggggataaggaaaaattaattcaaatcttggagaataaccgagaaaaaggagaaaattttcatatccccattcgaggaataaggaagttaaacatatctcgaagtgaagactccctcgtataaaagtgaagttcgacagccagccaatagatccacaacttcacgcttaggaaccctacatttagttattgctaagaaccttaacttgctcttcaagataggggaaaatccttttgtaacaatctaatttaaacttgatttttgtactcttttctattttcagtttacttgtgtgttttactcgaacagtcacaactacaaatgtttttaacagattataacatttgcttatgtataaatattctttctttgggtagtcggtacacataatcttttgtttaactactacggttctcgagtaaataaagattgtttatgataataagattttatcaaagacgataattttttattttttaatgagaaatttaattttcctttttctctattttaaaaatatttagtgttaaggctaagttgtagtagatagatgtttatttagagaatagcataaacctaaatttaattatgacgtatatgtatattttacatgaagataattactaacgccaaatcgataaataactgttttaattattatttttcttaaaacatgatattgataacaatctcatcaattaatatctttcaaaaacaaataaaatataatattcgtggaaatttatcaaagaaatctagttacgttctatatatataaagaggcaaaataaataatagtctcgttcgaattaagttatatttattttttaaaggattaaacgccgccttcatataaaaaaaaggaaagtactaattatcaaaaaataaaaagaagtacacactatatatatctaagactttcaaaaccctaacacaccaaatcttaaaggaatcccaatctcatattacttttttctcgatgataaacttggagaaagaagccaaagagaagcagatcttgattcgtgacggaaaaagaaaaatcgttcatcacgtaaatacaacgctactcgtgaagatttatgaagcatccgcaatcgatgacagacatctttttctgaaaccttactatggcccacctaactactatttcatcaaggcatggttagacgacaccaaagaatacggaacatatgtggtaaaagactcttttaaggttaatcaaccaccactgaagattcctttaaattttcctgcacaatatctttacgtagaattgcttaaaggaatgtcgtatagagatcctggaacatccaacagaactgttgtgatgggtcgtgcaaagattcgattgtctcctctgatgaccagctataaggagagaccgatctccggtggcatcgatctcgtcggtttgaatagtgatcaatgtgtcgtgaaaaagggttacctaacatatgctatgaaacttcataggtctgcggattaaactaccttcttcgcaattagggtttttgtttttaattttttttggggattattttaaagattatagtaaaagttttttataacttgttgatttgatatgatctaattctatcacatctcttctttatatttagtcgctagcaacatcataaagaacaaccctatgtagctatgtttatgaagcatagcaaaatatgcattatttttgaaatttgtatactgtttaacatattgttggagcggtagactttactatattcatcttaagcattgtgccaaaagagaaacataacatatcgttccatcacacatacaaccactagcacttcagacaattattgaatcagactatttgttttgctttgtcagtcaacggttgacccattgactcgcccaccatccatgacttcttcagcttaagttatgcactcatcttttatctccttcttaaaaaaatctgatgaactgtaacgttttgtttcttctctctgttctcgtctctgttacggctggagttacggcggcgtaccatcctaccgatgtctttctcttcaactgcggcgatacttccaacaacgtcgacaacagtggccggaactggacggtggaaagtcgtcaaattctgtcgtcgaatttagtcaacgcttcattcacttcagaagcgtcataccaaaaagcaggggtctctcggattccgtacatgaaagctcgaatattccgatctgagttcacctacagtttcccagtcactcccggttcgatatttctccggttatacttttacccgactcagtacaaatccggttttgacgcggttaactccttcttctccgtcaaagtcaacggtttcactctcttgcgaaacttcaacgctgactcaacggtacaagcttcaataccgttgtcaaattctctaatcaaagagtttatcattccggttcaccagactctgaatctcaccttcactccctccaagaatttgttagctttcgttaacggaatcgaaatcgtctccatgcctgaccggttttactcaaagggaggatttgacaacgttttaagaaacgttagtagcgacgttgacttccagatagacaactcgacggctttcgagtccgttcaccggttaaacgtcggcggacaaatagtcaacgaggtcgacgattcaggaatgttccggcggtggctttctgatgattcttttggaaactctggatccattgtgaatgttccgggtgtaaagatcaactacacggagaagactccggcgtatgttgcgccgtatgatgtgtatgctactagtcgcttaatggggaactccagcaacttgatgttcaatctaacgggtatgttcctcacagttgatgctgggtataactaccttgtgaggctacatttctgtgagactcttccacaagttaccaaagcaggccaacgtgtcttctccatattcgtcgaagataagatggctaagaaagagacggacgtgattcggttgagcggtggtcctcggattccaatgtatttagatttcagtgtgtatgttggtttcgaaagtgggatgatacaacctgagctacgacttgacttggttcctctcaaggacactaatcaaacgtattacgacgctattctgagtggtgtggagattctcaagctgaatgattctgatggtaatcttgcaagaccaaatccagaacttctagtatctacggactcaacaccagatgattctaatgttacaccaccaataaaaggtaagccacatgttttggtgataatcctcatagtcgttggttctgtaattgggctagcgactttcattgttatcatcatgttgttgatccgtcagatgaagaggaagaagaataaaaaggagaatagtgtcattatgttcaagttactactgaaacagtacatttatgcagaattgaagaagattacaaagtcgttttcccacactgttgggaaaggagggtttggaactgtatatagaggaaacctttctaatggacgtacggttgcagtaaaggtcttgaaggatttgaagggaaacggtgacgatttcatcaacgaagtcaccagcatgagccaaacatctcatgtaaacattgtttctctgctaggtttttgctatgaagggtccaaaagagcgattatatcagagtttctggagcatgggtctttggatcagttcatctctagaaataaatcattgactccgaacgtgacaacactatatggaatcgcgctaggcatcgctcggggattggagtatttgcactatggctgcaaaacaagaattgtgcatttcgatattaaacctcaaaatattctgctcgatgacaatttttgtcctaaagtcgccgactttggccttgctaagctttgtgagaaaagagaaagcattttgtcattaatagacacaagaggaactataggttacattgcaccagaggtggtctcaagaatgtacggtggaatctcccataaatctgatgtgtatagctatggaatgttggtcctcgacatgataggagcaagaaataaagttgaaaccacaacttgcaatggtagtacagcctattttcctgattggatctataaagatcttgaaaatggagatcaaacgtggataattggagatgaaataaatgaagaggacaacaagattgtgaagaagatgatattggtgagtctttggtgtattcgaccatgcccatcagatcgtccaccgatgaacaaagttgtcgagatgatagagggcagtttggatgctcttgaactcccccctaagccttctaggcatatttccaccgagttagttcttgaatcttcttcgctttctgatggccaagaagctgaaaaacaaactcaaaccttagattctacaattatttagcgcaaaagtctatttttgtttttgatagtttgatcgaaagaattataaaaaaaatataagaaacattttgaaaacgttttttccgatccattaataataaatatgaaaaactatatcaaatcaataaagtcagaattctatagaacacattaaaatagaatggtgataatgtaatctccaaaaatatgattgcatcattccctccaacggcacaaagattcaataataaattatgaagtttctctacaaggagtcttgctgaaacattacacttatgcagaattgaagaaaattacaaagtcatttaaccatgcctatcagatcgtccaccgatgaacagagtcgtcaagatgattgaaggaagtgtcgatgctccttcaatcgtgagaattatacgtttcaacattaaacttataaaattttgttaaaataaaaacagagtatgattggtacgttggagctggagacttttcaatattcatcttagcattgtgccaaaaaaaataagatcaaagtcatatccagaaatttcaaccactcacgcttcatacctagactattgaaaatcagcatttattgcatcagacaagaatgaataattcgattctaataactcgtcaagaagatggttcgtatgagatagtttgagctgatagaaacatctcttatcttcttcttccttcattaaccttttaaaaaaaattccgatgatctgtttcattttgtttgttttctcttttctcgtttccgtctccgcaacagcgccatacaagccagacgatgtttttctcatcaactgtggagaaaccgatgtccccttcgacaaccacggtcgaacttggacgcaggaggagaagaatattcttccgaagaattcagacaacgcgtcgttctcttcagttgtatcatacaaagaagaatcagggattcctcaagtgccttacatgactgctcggattttccgatctgatttcacgtacagttttccagtctctcccggctggaaattcctccgcttatacttttaccctacaagttacaaatccggttttgacgccgttaactccttcgtctccgtcaccgtcaatgatttcactctcttgcaaaacttcagcgccgatttaacagtaaaggcttcaataccagaatcaaaatctctaatcaaagaattcatcgttccggtttacctgactctgaatctcacgttcaggccgtctaataattcgttagcttttgttaacggaatcgagattgtctccatgcctgaccggttttactcaaagggaggatttgacgaccttataactaacgtcggtagtttaattgacttcgagatagacaactccactgcttccgagaccgttcacaggttaaacgtaggtggacatatggtggacgaggtcaacgattcagggatgttccgacggtggctttctgatgattatgagttcttaattggtggagtcagtccatatatgccagatgtaaatatcagctacactgagaaaactcccgcgtatgttgcgccagcttacgtgtactccacgtgtcgcatgatggggaacgcccaagacacttatctaaacctgaatttcaacctgacctggctctttacagtcgatgccgggtttagttaccttgtgaggcttcatttctttgagaagtacctgaacaaagccaatcaacgcgtcttctccatcttccttggaaatcagatggctagggaagagatggacgtgattcggttgagtggtggtcctcggattccgatttatctagatttcagaatatatgttggttccgaaagtgggcccagacctgatctacgacttgacttgcatcctctggtgaaggataatccagagtattatgaagctattctgaatggtgtagagattctcaagctaaacaactcaggtaatctcgctatcatccaagacaatgaactaaaaccaaatcctccactatcatcgaacttgacaccaaaccatgtaacgcagcagatcaaaggtaagtcttcacatcttctggtgaaaatcttcatagccgttggtcccggaactgggctggcgactttcgttgttgttctcatgttgtggatgcgtcagatgaagaggaagaataggaaggaagaaagggtcgtcatgttcaagaaactactgaatatgtacacttatgcagaactaaagaaaattacaaagtcattttcttacataattgggaaaggaggatttggaactgtttatggaggaaaccttagtaatggtcgtaaggttgcagtaaaagttttgaaagatttgaagggaagtgctgaagatttcatcaatgaagttgcaagcatgagccaaacatctcatgtgaacattgtttctcttcttggtttctgcttcgaagggtctaagagagccattgtgtatgagtttttggagaatgggtctctcgatcagttcatgtctagaaataagtcattgacacaggatgtaacaacactatatggaatcgcgctaggcatcgctcggggattggagtatttgcattatggctgcaaaacaagaattgtgcatttcgacattaaacctcagaatattctgttagatggcaatctttgtcctaaagtctcagactttggccttgctaagctttgtgagaaaagagaaagtgtattgtcattgatggacacaagaggaactataggttacattgcaccagaggtcttctcaagaatgtatggcagagtctcacataagtctgatgtgtatagctttggaatgcttgtcatcgacatgattggagcaaggagcaaagaaatagtagaaactgttgattccgccgctagttcaacttactttccagattggatttataaggatcttgaggatggagaacaaacatggatatttggtgatgaaataaccaaagaagaaaaagagattgctaagaagatgattgtggtaggactctggtgtatccaaccatgcccatcagatcgtccatcgatgaatagagtcgttgaaatgatggaaggaagtttagatgctcttgaaattcctccaaaaccttctatgcatatctccactgaggttattaccgaatcttcttcactctctgatggcggggaagatgtataaaaagaattgttcataattattagcatgaagatcctattcttgtttgttttgttgatcggatagaaagaagtgtaaaagataaaatttaaagttgtcacagtaaaaccacaaatattcttccaattcaaatcgcatttcaatctttcttcttgcggtaactaaatagactctccccaatttcttagtacattaatctttgaacaagatcttgcatctatgaatttccgtggatagagcattttcaacacaacactcgaaaccttcacatacttatagaactaagaaaataattaaaaagagttaatgtttgactcaaacatgtatattagattgtgttttgctctgaatagatactattattcatatatatatatatatataaacaaaaacctttgcccaaaaataaaataaaaacagaaaacctaaattaaaaatctagattggactacgttagtaatatacaactacaaataatttatttaagacctaaaataattgaaagaaaaaaccaaaaatgaggtaccacttgtaggagtatgtaatcttaactagtatgaacaatgagaagtcagacactcagaccttaaataattgaaagacaaagccaataatgaggtatcacttgtgggagtatgtcatctttactagtatgaacaatgagatatatataatcgcagaaaaacatattggtgttattttcgttagtgactgctccgatctactaagatggtgtatgtgaatgtcggattcgcacactcaagtatttatttattttgtgagaaagattatttttgagggcaaaaatcaaatgtaaaagctagagattaacactcaaatgactatagtatgatttagaaaaattgtgtgtgtgttagatagtcccaaacctctactacttatactaaaacatcgtatttactctcaattatactccataattcttcttttaatgcttccgtttcagtcctcgggtttaatgcctcaatgttcgaatttgaattaatttcgattctcatgggcttctcagttcggcccaacaccccaggccaaactatccccaattcggctttgtcaccatctcgtagtgtcgacacctcgctacatctctgaccatcattccgggtttttttttgggccatacctctcgtgggcttcctccctgcttacgtgacaatctttggttggttccggactacaggtgtgggatccgacaccaacagcgtctacccccacataatgattagtcttttaagatttatctaaaaaaagtagagaagagtaagaaagtgttctcgtcttttactattcccctgtttttcgtaacactagtgttaaaacggatcttttaacacggaacgtccgtgttgtattatgtatgcaaacaatatatttttcaattaggtttccaaatcctctatatgtatattaaaatagagtatatttgatgtttatatatcaagctcacaattattctcaatacagtatttttatttttctttatttaattataatatctttcttatcaaacattctcatttcctagtaatacatattttgattattctaacactaattgccaaacattcaagaatcctaaatttaccaaaattaattattttagatatttttatacgtacaccggagtttaatgttctaaactattctctctctttcacaaagagtgttattcttgttttttttttttcacaaagagtggcattctacattttcaatgtgatacactaagtttcttgatttacctttacccaaagctattttattgaacttcaatcactaatcatgtattaattagggcatacatatatagttcaaaatttcttaatttgtgtaaaatatatcaaaatgacactagttgtgaaacggaaagattacaaaaaatatttttctaaaattaaggaagtgtactggtttaaagattttagagaatttggtgaattttacatattttgagagattttgataggtatacggatgatttgctagatttcatatttaaaaataacaaaataattggtcatttggtgaaatttactaactttcattttcaaatcaattgttaatgtgaagatcgatcttgtatcgatccaatgactctaagcatttcctatttcacaattaaatctctgattctgatcagcttaactacgggtatctgtagaagagagctaaaccattcacgatgttaatcacttttaaattgcaatcatctttgagttgaagttgggttagatgttgatcaattagactcgtcaccgtaagctctctgactacattcaccattgttttttatagactttttttttttcaatcctttcaaatactattttagaggcgtgattgtttactcttatttttcaactaaaaaatattcaaagtctctcaaaatcatttttcattattttttaaaaaagttgttaagcttgaataatagtggattggatatggttttaataaatctattgaataacaagtgattgtgaagaattttgaatgattttccacaaattttagtttcaataacatgaaatttgtgaggacattttaaaatcacaaattgaataaccagtgatttaaaaaaaaaaaaaaaaccaaaaccttcaaaatcctagttccaaagtctatataacaaattttaatacttttctactaaataaacataagaagaaatagtattgttaattagtcacaatccaaatttacagaaccaaatacaacaactttgtaatttcttaatgtattaaaaattttaaaaatttccattagagatagattctgatatataaaacttggataaaataaatatcataaaattcacaagtgcataacacgaacacttgcctagttttcagttaatatacatatgttgaccaaaaaattaagtcttaaaaaaaagaaaaagtaatagtttatacctttattggcttaccaaataacgtctgacgtgtaatcttgactcttgaccttaacttaaatttagatttcatttgatactaattaaactattccctaaattaccaggaagtaaccaaattgtggagagaacaaaaacaccaattcgatattttcattcatggcttagaaataagaatcctctaagttctcctctctattgaaaacccaaaacaaaagttgagaacttttcatatttcagatgggcaacaagaaactgttgactggtgggtcaagcaaaactcatggtagtggtagtagctacagagatcctctgttgcagaatcaggtctgtttcattaaccattcttgtgtcttactctcatgtctgatgattcttgcttgtaaattttcgttatcgatgtaaagtttcgacctttactcagaaacttgagggaatttatcagaaatttcttatttaagaagaattgtggtgtcatgtgacttgaaattacttgtttaattcgaagagtctggttagtttttgaagcatagagttctcatttgacatgtaatcatttgattcgaactactggattgttacaacagaagaaatgttcttaaagtttgattcttgattcttgattttgccaatttatgagttttctaattgttagtttgtttattctgtctacgttaccgtattcaggaggataaaccgaaagcgaatggaagcgagaatggtttgaatgatcttgagcatggtgtagttgaggtatttgtttgtgctgtttgttttacagaaacttttcatttctagaagtgatgttgtcttaattggtttttttttcaggcggcaaatgttggatttggcagagtctttgcgttggtgagtgtttctttgtattataattgtatattattcttgtgtaaagatatgccaatactcgagtattatggtttcgcaggcaaagcccgatgcgggaaagctagtgattggtaccattgctttgttgataggttcaacaactaatctccttgttgtatgtctcatttcttgatcttcaacttcctatctattttagtttctttatcatcattttaggagtttatctctgaagtggtagtgtagatggattcatatttcttgttagaactaagaaagctgaaacttttatgttatgcagccaaagtttggtgggatgattatagacattgtatccagagatgtcaagacgcctgagcagcaaacggaatccttgattgctgttagaaacgccgtagtaatcattttgcttatcgttgtaatcgggtaattacatcttcacaaaattatcattagtcttcaagttttgattctgtctaactcttctatctattggtttcattagatcgatatgcacggctttgcgagcgtggctatttaattctgccagtgaaagagttgtggctcgactgagaaaggatttgttcagacacctaatgcatcaggttaaacatttttcaagattcttatgattttctttatccattgccattattcttttagtgagtctttcatgcattattcgtgacttttgatgaccaatgaactaacttttatctgagaaagaaactgaaaacgaaaatgtttttgttgttctgtgctaccaggaaatagcattttatgatgtcacaaaaaccggagaactcttaagtagattatccgaagacacccagatcataaaaaacgctgctactacaaatctttctgaagctcttcgtaacgtaacaactgcgcttataggagttggtttcatgtttacatcatcttggaaattaacatgtaagaagcttctttttatctttaaaattatttggtactagtagatggaatgaatacacaaactgacatatcttcttgttcatcaatcatgattttagtgttggcgttagtagtagttccggtaatttcagttgctgtgaaacagtttggtcgctatctacgtgaactttcacacacaactcaagctgcagctgctgttgctgcatcaattgctgaggttttaactctgcttcttttatacattgcttatcgatatatactttttcagttcattacttttaaattgattggatcaatgtatactatgtaggaatcttttggtgcagtccgaactgttagatcgtttgcgaaagaaagctatatggtatcacaatattccaagaaagtcgatgagactctgaagctaggactcaaacaagctgtgagtttttgtggaataaaccgtttcataaaattaaaacttttttggatgtgtctttgagaggatatatctgattttgtttgatgatttaggtacttgtcgggttgttcttcggaggactaaacgcagctttcacattatctgttattacggttgttagttatggagcatacttaacaatatatggttccatgaccgttggagcactcacttccttcattctttatagcctcacaggttttatttatatacgcgtttcttgatctgcaacttttgaaagaattatttgtactaaactaagatattgttttggcagttggttcatcggtatcttctttatcgagtttgtacacaactgcaatgaaagctgcaggcgctagtagacgagtttttcagatcttggaccgtgtttctagcatgtcaagttcaggggataagtgtccagtcgggtgagatttcctctcatactatccttaataaaaatttatatatgaaaagaacagaatcggtttatgtcccggaaaaattatggttgcagtaatcctgatggagatgtggaattaaatgatgtctggtttgcttatccttctcgtcctagtcacatgatactcaaggtaacactaaatctctgtttgcttatccttcaacttataaacatttagcatgcttgtagaagtttggtagaacaaatataggcttggttggttgtagttcttttactccagagttacaaatatagcagattcttgaaccatgactaaatatttctgaggatgatgactggattcatacagctgttacaactttaacgattgcttaaaacccaaaatttacagggaatatcgttgaggttgacaccaggctcaaaagttgcactagtaggaccaagcggtggaggaaaagtaagttcagatcatacggttttcgatttggatcttttggtatttaaatagtgaatgtttttcatattttgcatttgccatatgcagacgaccatagctaatttgattgagagattctatgatcctctcaagggaaagattttgcttaatggagtttctttgatggaaatatcccatcaataccttcacaaacaggtaaatattatgtttcttgaataattcatgtttatgcttgcatgtttggtagaacccaaaatcttgaaattttcttatctcggcttgtttcatttcagatcagcattgtaagtcaggaaccaattcttttcaactgttcagtggaagagaacatcgcatatggatttgacggtgaagctagttttaccgatatagaaaatgcagcggtaagcacattacaagtctctttctttctccattttttgttgtgctcattggcacatagggctattcagtaaactgcctcgatccaaaaaccgataagtatttttctaaaacccaaactgaagctaagggattgaacaaccattctgattggaatcaaaatgaaacattgtcagaaaatggcgaatgcacacgagttcattgaagcgtttccggataagtacaacactgttgtaggagaacgtggattacggctctcaggaggacagaagcaaaggattgcaatcgcgagggcgcttcttacaaacccgagtgttttgctccttgatgaagccacgagtgcactcgacgctgaaagcgaatatcttgttcaggtaataaaacataactttggaatcaaaactcatatgactcaaaaacatagaaaaaatcttactcctatcctaattttctgaatctgtttgcaggatgcgatggactcgttaatggcgggaagaacggtgttggtgatagctcataggttatcgacggtcaagactgcagactgtgtggcggttatatcagatggtgaggtggctgagaaaggcactcatgatgagcttctcagccttaatggaatctacacaaatcttgtcaagaggcagcttcagagttcttcctctgttaccaccttgtgagataatatcattcttctgactacaacaacaaaaagaagaaatcatcattccattcgaagactaaatttgtataatttgagtttgaaccctttcaatgcactagagagttctctgacataaaattgtaatgagacatttcaattcagttatctaataaaaataaatatgagccattgagaatgttcgtctagtcttgtgttgttggagatgagagttttgttatcgtaattttaagttttttaccttatgcaatagtttacataactattagtgttccaagcattcaaaggtattgtctttctagacgttagccacactttacagctgaaatatctgctgatatgtctatcgtaggtgtgtactccaatggacgatcttttagtgtgattgggacaatacatgctaaatgatctaacatctgcaatataaccaaataaaatttcgccccaagcaagtcccttatggagttatggtccacaaaaatattgcatgcataataaaaaaagtattatctatatacgaacaccaaaataccacaactgctttgtctcatggattataggttgcaggaaaacatagatgaatcaatttgatatgctttggaccaatttaatattttttggaccaaattaagtaaacttttttataatggaaatttgcttgtcacaaatttgaaggatcgaattttggaccaaaaagatatatgtcttttgtcatcttatgaatcgactccatcatctaggatcgaattttcaagtttcagtaattcaaaatctattctgacctcgtggatgctccaacgatggttctcttcaactacctagaaactctttatattagggctgttttatgacttttcactctacgttggttctatccaattaaactctctcaccacttttattgcggtgaaatttaattttattaattatttatgatttaagaaaacataaattggaggttaagaagaaattagcataacaaaaagtcaagaacaaataaaaaaaaaaagttagctatgaaaaaagtaaaaagtacttttaggactattagagaatttaagtatgattgagaaaattagacttcaaaaaaaaaaaaattgttccacaacctaattctcttttttctcatgcctttgaaataaaaagaatcctttttcacacaccaaaaagaaaacaaaaatgcatgatggtccactagcttttctttctcaaccctatcaaaagaaggtcacgggaaaacacctttatatatgtaacattttttcaaatggataaatcgcatagaatgctatcattattgaaaatagcaccatctacttcattccaaaatttccaacggaaatgactttggttataaaaaaaagtttctagtttcaaaaaagctctaattttctgttaagcaaaaagacagaaaatatcatcctacaaaattgaatcatcgtccaaatggaagacgtaagaaaccatcttttcaaccctaaacgtcacacgtacagacgtacttaatacttttcttttactatttcttttcttggtttttttttaaataagtgtttacgaatgaattgtttttcaaactttgtttggaaatttatttgattttataaattttatataaaatagaaaaaaaaaatgcgtagataatatcttgtcagacgcaagaaggttccaaatgacattaatggcaaaatccagagtaaagacagtcaaagaatccaaatttgctatgaactctactttcgtggataacactctaccataataccatttcaacgtcaattgcgtcatatcttacgtcatatttttctaacacattatctcaagattacatatacccatactagctagtcagagaaaattgctaataaagcacatcacgactttgatgtcctcaaaagtttaaaatgtgaagaccatttattagtgcaacatcgatcgattgaactatagagaatgtgacatttccaacgaccaaactcataaaaaaaaaaaaaaaattcacaaatgcaaataagatcttaactaaaattcataaatagataataaaataattaagtcgagaaaaagttgcagtgcgtaaattttattcacggtcatactctcaaattttatttattttctgattataactctttgtttcttcggtcggggtttccgtcgatttggatgatgatgaggatttaaagactcatagttcttcaactgtaatatgttgtattagtggagaaaagaagctttagtctcacaccgacgataagagttctaccggcagtgtagtaatacatagtagaagacggagatctaagatgaaaataacagagacaagaatttgatcaagggaccgaagattcataagatttcatggaatctttgtcgataggggaggtagactccggttcggcgagctgagccaccatcgaaggtctattttttactccttagtatttctctctctcacgatcgaacaagtatctcctcgacaatgacaatatcatatatcttcttccttctcaaaacggctatatagtggtgggatgacagcggatcttggaaaatcatcatcattcagctcacgtcgcccaggttcattggatgtcctgttccgacgagaatctgctcacattggacggcgtcttcaattgtgttctatgatcagatattagaatttcaatatgtaaccggtttagttcagttttgtcatggacatatatctggaaatattctattgcacatttatttataaaaattgaaaatttttaacaaaaaaaaaaactaaaattcataaatgcatgcataatacatactctaacgcatgtttatatgcaattatgtacagtatattattattagtatataccaaactttgatttgtcttttcaaagtccaaaatttaataatactttgataagtcaagtcggcatgtgatgttcttttctttcacaaaacaaaaagttgggtgggttatgcaagtagacaacgatgtggggaagatgatggtttacaatttgtcttagtgctatcaacaaaaacaaaaatcctttttttgtcattatattacccaaaaaatccaatgatccttattattactaagaaaattatattactaactggtcgttttaactatattttctttttatcatctacaacttacataaacaaatcaaaattaattttgagagaagaataatacaaacaagtactattcatatgtcttgatcaaattattttgtcatcactctattatacactccattaagctatttctttcaacaaagtatgattccatctatttctttagatcattaattttgttggtcaaaataagtaaatatagaatttccacttaacatatgcatgggcagtgtaaattaggtcgattaaactgtaaagagagggattaaatttataattacaacttaagaccaaaattatgtggaacataatagataaagtgatagtgagtagacaatttttgacattctgtttgatagaaatcacaaatttgatgtacaataacttaagtatgaaaagaaaattaaaactcaataggatccatagaaaacatatgtatacaaaagactttattaagcatatgttttcatgatattcgacaaacaaagcaagcaaatcaaatgacaaatttcatgtatattaggcagatagctaaaaaaaacaacaaatataacacactaattatcagtatcatactttagccgaatatgagataattcagatgtatatcatcatataaatggtcaaaaaaatatgtggtatatgaattgttcaatgttagattttatgaaaactatgggtaaagtggggtttggcatgttagctttccctaatatgtcactggaatagaaagctagcacgtcattagaagaaaccaaatgttaaatgatccttgacctaaaccaacagaacaatttatctaaaactgttattatttaaatccattaaaacctggtaaataaactatttactattatggttacatttatcctaaaaatcaattggatgatataaacgcgcggatcatcttctaattaaaagaaaccacgtcactagaatatttgcatgaataggttagtgtaattatgcttcttggaagatgcgtttgctattctcaccaccacctggtatatagaaaatgatctgattcgttatgcagttgattaattgtataccctttaccaatattctaagctaacaccaatgcgggaggacatttattctgatgatgtcctttcaacggatcggatttgagtaccatgtgtcacattatggtacattttgattcttgaaatttctctattacattaatattttaagtgtatacataccacacaaacataatttgttttaattaaattaatttcataaagaatagctttaatggattaaaagtatataatgtaaaaaggccaatccaatcaaatttgaagtatctacccgaaaaatggatcatatgataatttgttttaatggatttaccttttatttatctaaaaaccaaatctgaatttgaacctaaccctaaaatataaaaagttattcaaaaattaaattattaaaaaggtatatattaataaaaaaggaaacaaataaatttaattctcattttgaaaaatcaatactattgaccagcttgcaaattcatagtaccatatttttctacaattttttgtcgacacaatacatgactctcttttatcatcctttcaaaaattattttttcaaaatatattactattatccttcttctctttattatccgagtcaaacgccgaattctcatattctacataagacatggctctctttattatccttcctgtatattttttccttcataatatattactatccttctcgtttattaatacaaacttgaattcttcttcttcttaactttgtctgtcaattcacatatatatagtaccaccatcacataagtatctcataacacatcatggtgaacgaagaaatggagtcatcacttaaagtcatcgacgtggcacgagtcacaccatcaaactccgactcgtccgagtcactcactctcccactcaccttcttcgacctcctctggtacaaacttcacgccgtcgaacgagtcatcttctacaaactcaccgacgcaagtcgtcctttctttgactcagtcatcgtcccaaacctcaaaacatctctctcctcatccctctctcactacctcccactcgccggaaaactcgtgtgggaaccacttgatcccaaaccgaaaatcgtctacaccccaaacgacgccgtttcattcaccgtcgccgagtcaaacgcagacttctcacgtttaaccggcaaagaaccgttccccaccaccgagttatacccgttagtccccgagttacatgtctccgacgactcagcttccgccgtgtcgtttcaagtcacgttatttccaaaccaagggttttgcatcagcgttaatgcacatcatgccgttttagatggaaaaacgacaaccaactttctcaaatcttgggcacgcacatgtaaaaaccaagattcttttctaccgcaggatctaatcccagtttacgatcgtacggtcataaaagatccaatggatttagatacaaagatcttaaacgcttggcacagagtagccaaagtgttcaccggtggtaaagaaccagaaaaccccaagagtttaaagcttttatggtcgccggagattggtcctgacgttttccgatacactctcaatctcactagagaagatatccaaaagcttcgagagagactcaagaaagagtcttcttcttcctctgtttcctcatcacccaaagagcttcgtttatcaacgtttgtgattgtttactcttatgctttaacgtgtttaatcaaagctcgaggcggtgatccgagtagaccagtcgggtacggattcgctgtggattgtcgaagccttatggttccaccggttccatcgagttattttggtaattgtgtatctgcttgtttaaaatgtcgttaacggcagagacttttatgagtgaagaagggtttttagctgctgcgagaatggttagtgattctgttgaggcattggatgagaatgttgcattgaagattccagagattttggaagggtttacgactctttcaccaggaacacaggttttgtctgttgccgggtcgacccggttcggagtttacgggttggattttgggtggggtagaccggagaaagtggtggttgtgtcaattgaccaaggtgaagcgatttcttttgcggagagtagagatgggagtggtggtgtagagcttggcttctccctcaagaaacatgaaatggatgttcttgttgatttgcttcacaagggactagaaaattaaatcatttttttctttcttcagaagagtaaaataatataagaaataaaatttattgtggaaaattgtagctttctattgtcaaataaatctagtttagagttccagcttcaccaggaaactcaatctttgaaccacatataacctcactatgcgttaaattggatcttaagttaaacttatatttctcaagaatacgatatgtagtattgcttttagaagtgtcaattgggctgtccaaagcccattggtcatgtccacttggatcatttttttcatgggttttattggttggtctttaatggacaatggtttgaaaatttgtccaagaccattaaagaccattgtccaatggtcagcccatggtcagcccatggccagcccatacaatgatgtttatatacaatgatgtttatatacaatgcattttcacacaatctcgttaaaagctctatttataaaaccataacatcaacatgaaatcaaaccaaaatctgtcatccaaattgcaaccttagatcggataccatcacaacctataacaatctgtcaaagacatacatcatcaaatcagccatgtactgagaataataaacacataaccataggctcagagcttaagagaacagccatgtacctgtttcttcccagtcttgaaacgttcatgcaagggtggtgtttgtgtcctcttgaccttggatctcatcagtttctacaataagaaaaaccgagctattaatctaaaagttgcagtccaaaagccatataagtttactattataaacgagttcaagatgtgaatattaccaacgtcttgaaatccacgaaaccagtttctagtacataggagggcttgcacattagtaggtaaaaggcagcttctatatttgttaagcacacgactacctatactaaaagctgattccgatgccacggtagtgatcggaatgcttaagatatcacatgccatcgatgacaattctttaaaacgcgagacattgtttttccaatatgcaataacatccatatctctaaaagagaccatatctaacacaggctcttccaagtacatatctaatggtgattttccagttccatttctttgagaaaagtaagagtaaaacccctgaaatatgaccaacaaaagaaaatatgaccagccgtatagttcaacaatcacaacagacaacccattctcactaagtataagaatgcattttcatagccactaactatcacaacaaacaaacatacaagaacaatactgtaaacacacaaaattagcaacttacatcatatccaaatgggatatcctttcgtgaagattgagaagtgcttgctgcaacgttgcatgtggttcttttataagctccaaatagttgaaccatcttatcacgcacatgagtcaagttttccttactggtcaatggattcagaatattataacaatattctaaagctgagaatttcaatcttggatcaagaactgcagccatcgcaagaatgtcgctgaaatcttcccaatatttatcatatttctccgtcatatcttccaccatttcacgaatagccctatcatgagaatcatcatgatctcccagccaacatttaatcgcccatacttgcataaaatacacgtttgctgtcggataagacgaacccgaaatcagctttgtaatctcagcaaatggtttcaaaaggtcacatatcagttctgctctttcccactccacagcagatgggaaactcttataacccctatctacttttacaagactacgcaatacatccttaaactgaattgctcgtgagagcatatgataagtggagttccagcgggttgagacatctaaaactaaacttgcctcagtttgaattccaattgtatccatacagttctgaaataaattttctcgagtctcagatcctttcacatacttcacagtctctctaattttctccaaagctccagatatcacttccaaaccatcttgaactatcaagtttaggatatgtgctgaacatctcacatgaaagaattctccgctgcagacaagatctttttgtagctttctctttaaaatgctttgcatagtatcatttgcagaagcattatctacagttaaagtaaaaactttcttctcaattccccaatctttcaacagctcactaagcttcattgctatagctactccagaatgtggaggcgggaaagcacagaaagataagatcttcgttttcagaacaccatcaacatctacataatgagctgttaagcaaatatagctgttaagcaagtttggtgtgggatatttctgtcctctatcgaagtttttccagcatgcagcacgaaatctacttacactacttttacctctctcaactgtccctgaagaagcagtgtcatgaggtagtatctgatccatttctggatcttcatcgtccatttcttgatcctcaagattaaagttgtcttcatcaaccaagttttgagtatccaattccatatttctgacacaaataaagacataaacacgtttagcagtgataaacaaagactgaacagaggtcaatgggctagctccattagaaaagtacataacatgtgggaatatcttatccactatggataaaaaaagaagaacaaggatccttaaacaaaagcaataatctagtgtttaaacaaggatccttaaattagcttacaacacaaagggtctctacatattgatgtgcttcaattcataatgaaattcgaaatggcgaaccataaacaaaatctgaaaagtgcccatttgctagctagctctcctcatatccaaaaagctaagattctttcagaaacactaacaattgaaatttggacaaacccacaagctagtagaactaaccggagtaggagttgagagagaggtcgagcttggtcgtcgccgagagagagctttgtcgccgggagagagagcgtcgttgccgagagagagagaagagaagaaaattgatgtgttgaaaaaattgatgggccaaccataaaccgtgtgggctagcccattaaacccatggacaaaattggtctttagaccatatagcccgttttcattacgggccgaccatggactgtccataatgttgtggactgggcttagcccatggtcagatgaccatttgacacttctaattgctttcatctttatttgttaatttggtccattagctccttcgatacttgtacaagtctccattccgatttaaataatatctcttgtctcaaaaaaaggactaaacttgggcacaaagaaaccaaccctttttaactactactagaccaccatcatgttggtgtattgctctcatcttacttgagtattagagcatcctcattggacaactcttgatgtgtgtctttagtaataaaatcaaagataccctctcttttcggtgtctaaaatgtttttctaaagacacaaatctaaaattaaagacacccttcaatttattttatatttttttaattggttttatatttaaagacacccacaagaaaataaccaatgtgggctcttaagagaggtccggcctagtagtctggtactagagagttatcaaaagaataaatcgttttcttctagagacttcccaaccatattgtctagggatgttgtggtgggtaaaaaacctcagcccaacccaaaccaacaaacctgcccataaaaaacctagattaaaagaaacccgaataagatttagtacttgtgggtaaaatccagaaaaacccatgtaattcagaactaccagtggatacccatacttttattatgtctgatatgtatttaaatttaatcatgtattttatattttgtaaaaacaacttaatttgttacccttaattgattttaattctttactttcatcaaagtttctaacaaatttataaactcaaaatccactcaaacattaataatttaaaagattatacaaaagaaagtttcatcaaagtttctaatttaaaacagaaatacaaaagtagtgaaaaaaaatctaaacaacttcttctcatactccaaagctacttgctatcgatgtagtatcttcaattccatcattaaagtattcttcaatgtcacctacaatttgaagatataaatcaacaaataaaaaatattaagtataaaaaaatagactattcttttttttaccttccaactctacaaaaccatgcaaccagtttttagtacataacaaggcttgaacatttctaggaagaaggcggtttctgaaagggtttaaagcccgacctccaatactgaatgatgactcaactgccactgtagtgattggaatgctaagtatagcagaaactagagaagctaaatcaccaaagcgttgtccatcacctttccaatagctcaaaacctccatgtctgtaaaagacctcaaatctagccttggatcatccaaataattttgcaaattggactttgtgttgtcagaaccaggttgtatgctcctctcaagctcaaacacatcttgtagtttgcaaacggctttaaaatgtcacaaatcctctctccacgatcccactcatcctcagaaggcaatgacttgtagtttctgtcacactctttcaaactagcaaatgtcatacgaaactttaaggctctagcaaacatgtcataagttgaattccaacgtgtagggacgtctaaatacaatccagcaccactcctaatccctacactctcaacacatgctgcaaatgcatcttgtggaagaagagatccgcgaaggaagagaggagagaagaggagagagagagaagagagaaggaggagatcgttttagtaaattaggtttagttagaaaaaagtccatgggtacccataaacccaacagagtaaaacccacataacactctatttaaataaaattcgtccgttttaaacctactttaattttaatacaaaacatgaatctttaagctttaaattttaagcgggttttggatacccactagacttttacctatcattaacatccctaatattgtctgaaactcacaagagaatgtcaccataaaaaaaatagagtttagagtcgtgtgcggctagccacgagtatgggatgtcatgcgtagccaccggtgaaacaattaatggatattaaatgcttagtcggtcttctgatttgatattgtagtgcaacttgtcgaaagcattcggagggggaccatcctctgatctcttggcaacatgttgatatgattttttattagctcgaaatgggcatttgctgaccttctaaattatgctaaatactatgccataaaacgttttcgagctataatttcagacgtagagttatatgaaaaattgtaaaataaatgaactatgaaaaactcgatatatgatcctctaatttactaaacagaaccatgtaaacagaaaagtcttaattaatcgaatgcatgtgtcttaattaatgctactcgacaaacaatgttggaaaatctacgaatatcatgtgatatcaaccacattaaatttatgttatccttttccttatcctttctagtaattagatttatttttcattttacttgttttttttaatacatcgtatactatctatttataggatcatcaccggttaagtacatctcttaccacaagattgttggagaaatggtttcatcacttaacatcatcgaagtggcacgagtcaccccttcaaactctgactcggccgagtcactcagtctcccactcacttatttcgaccttatctattataaacttcgcgccgtcgaacgagtcatcttctaccgaatcaccaacgtaactcgccctttctttgactcagtcatcgtcccaaatctcaaaacctctctatcctcatgcctctctcactatctcccactcgctggcaaacttatatgggaaccacttgatcacaaaccaaccattgtctactcccaaaacgacgacgtttcattcagcgtcgccgaaacaaacgctgatttctctagtttatccggcaatgaaccattcccctccaccgagttgtacccgttagtccccgcgttacaaagctccgacgactcggcctccattgtgtcgttccaagtcacgttatttccaaaccaaggattttgcatcggcgtaagtgcacatcatgccgttttagatggaaaaacgacaaccatgtttctcaaatcctgggctcacatatgtaaacatcaagatttttctctaccgcaggatttaatcccaacttacgatcgtacggtcattaaaagtccaacggatagtgaaaacaaagttttgaatgagtggcgctctttcaccaaaatattagctggtggtaaagaacctgccaaccccaagagtttaaagcttaatccatcatttgagattggtcctgacgttgtccgatacactctccagctcacgcgtgaagatatccaaacgcttcgcgagagacttaagagagaagtttcctcctcctcctcctcaacctcatcctcaaaagagcttcgcttgtctacatttgttattgtttactcgtatgtattagtatgcataataagagctcgaggcggggaaccacatagaccggttggatatgcgttttcggtggattgtcgaagcctcatgaatccgccgactccaaattattttggaaattgcatcgctggttgctctagaatgatgctgacggcaaaaatgtttatgggtgaagaaggacttttggctgctgcgacaatggtcagcgattcgatcgaagaatgggacgagagttttgcgtggaagattccggattttgtagcatatgcaactcttccaccagagacacaacttattttagtttcagggtctaaccgatttggagtatacgagttggattttgggtggggtagacctgataaagtgatggttgtgtcgatcagtccaggcaatgggatttccatggcggaaagtagagaccaaaacggcagtgtggagattggcttctcactcaagaagcacgaaatggacacattgattgatttgcttcattgtgaactaactatttaaataaacttttctttacatgaataaaattgattctctaaacaatatctttaaaacgataacaccaacttatctaatcaaattatttttaggaatacaatttgtgagatgatattataactgaaagttaacgccgtgattgtttggttgacgaaaacttaacgatattatgccttaaataaccaaatcaacgaaacttgatcattttatcaaaagtcaaactaaactttatgatttaaatgatttttcgaaagtttatgtttttttcgtctcaaatttaaaaattcgtacttttttcgatatttttcctatttattttctaattaaactttaaataaatgaaaaagtcaacacagttaattctctctcttcaattttatttgattgtttgtctaaatctcaatcatttcaaatgttagtaaatgttagtcaaaatttataattatcattatattcacttacgtattataatcatcattttccttcgagtttatataatgatcatatggtcaccgagaaaataatcctttctcaccaaaaaaatgaatccatcactaaacttcatccacgtgtcacgagtcacgccatcaaactctaactcgtcggcgtcactcactctcccgctcactttctttgaccttctctggctcaaacacaaagccgtcgaacgagtcatcttctacaaactcaccgacgtaaatcgctctttattcgactcagtcatcgtccccaacctcaaatcctctctctcctcatccctctctcactacctcccactcgccggccatatcatctgggaaccacatgatccaaaaccgaaaatcgtctacacccaaaacgacgccgtttcattcaccgtagctgagtcaaactcggatttctcccttttaaccggaaaagaacctttctcctccaccgagttacacccattagtcccggagttacaaaactccgacgactcagcagcagtcgtgtcgtttcaagtcacgttatttccaaaccaagggttttgcatcggcgtaaccacacaccatgccgtttctgatgggaaaacgacaaccacgtttctcaaatcttgggctcacttatgtaaacatcaagactcttctctaccggatgatctaattccgttttacgatcgtacggtcataaaaggtccaccggagattgatactaaagtcttgaaaatttggcactctattcataaaccaaaaagcttgaagttgttaccgagaccggagatagaatccgacgtcgttcgatacacattcgaactcactcgtgaaaacatcgaaaagcttcgagataaactcaagagagagtcttcttcgttttcctcggttagattgtcaacgtttgtgattacgttttcgtacgttttcacgtgcttaataggatccggaggcgatgatccgaatagaccggtcgggtatagattcgcggtggattgtcgaaggcttatcgatgatccaccgatcccgttgacttatttcggaaactgtgtttactctgctgtgaaaatcccgctagatgcggggatgtttcttggtgaacaaggtttcgtggttgctgcgagattgattagtgattcggttgaggaattggattcaaatgtggcttggaagataccggagcttttggaaacgtatgagaaagctcctgtggactcacaatttgtgtcggttgccgggtcaacccggtttggtatatacgggttggatttcgggtggggaaaaccttttaagtcgttgttggtgtcgattgatcagagaggaaagatatcaattgcggagagtagagatggaagtggaggtgttgagattggcttctcgctcaagaaacaagaaatgaatgttttgattgatttgctacacaaggggataaaatgataatggaacaaaattaagatttaattcagtgtgtctctcttgttagcttgcatcgatttggttcgtaacattaatgtaaactttgtcattgttgatgttcaatattatgtatgtatacgatacagtattatcaagctaaaccttaaagtctaaaaactaaactaatgagaagcatgatctatggaaaacatgaaaccatttaggtatgctctggatttttacaagaatatcgtaagtaataacgatgattattgaattgtgtatacgtatatatatacatatatatatatatatatattatattgtgtatttgtggtggttgttctctgctctcttttttcacagaatgggagcttaaaaacgtacgtgaaaaagtgatgtgaatttgatacattgtcacgtacatttgatatttgttgtggttgttctctgctctctttcatagacaagatgggagcgttaaaacgtacttgaaagtgatgttaaattgataaattgttactttcattgataaattgtggtggttgttctctgctctctttttcgtagacaagatgagagcttaaagcgtacgtaaaagtgatgtggaattcataaattgtcacccccaatttatgaaagtgacttgtattttcattttcttccaataacatcgtacttttcatccttattcttccatccattttcaccgtattttcagtttcacacacatgaataatcatcatccgtttattttatttttgtttttattaattgcatgtctattcatctcttcttaagttcaacatgcttacacacgacactagcttatgcatatcaatctcagcatttgacacaacaataacagaaaaaacatctaacatgtggtctccaagactctccggtgtgtcaactttgtttttggttttgtcggcttaatttcgagaacttgggacatatgttcaaagcctagtctccttctacattctgtcccaaaatgtagatgtgtgaaaatgggtcttatgggccaaatgagtagatcagtctaatgagttgggttaaaaacacgttgacaagtcactcattaaaccatacattttgtttttaaaaactgaaccaagcccaatcaataatcatctgatttaaatgtgtaaactgtaatcaatagaccaatgattgaatctaacctaattcaaccaaactttatctcactaccattttcgtttatcgtcaattgaatccctcatcttcgttttctctgaaagtaaatgagaaatcgaaagatatttgtttatattgctttcaactttttaattttggattacaatgaggctgctcttatatagagctacatgatttaacctaatgtatccttggctgcgaatttgtctcttggaatttggttaagcgtcatcacgcgctgcgagtgcctcaaatcggttttgaacctttagctccgtactgtaaggcgatagggatcgttctgcaactctgtttttgtcttgtgttgcaggtgaccgttgtacgtctgtgggctccggtttgggctgagcgtttggttttgttggattgggctttgttgtccgaaagcccaattgagaagtaacgtcgttttgctgtttagctttgacactccccctcaaacgtggagtcgggggaaaacagacaccaagtttgaatcgcagagactcaaatggagctgcagccagggattttgtaaagatatcggcaagctgaaggtgagctgggatgtgattgacaatgagttctccaaacgcaacctgctcgcgaacatagtggtaatgaattccaaaatgcttggtgcgggcatgataagctggattggcggtcaggtacactgcagagagattatcgcaaaagagttctggagtctctaattgagggacactgagacttcgaagaagattaacaagccaagtaatctctgatgctgtattggacattgatcggtattcggcttctgtggagcttttggagacagaaggctgttttcttgaggaccaagagatgagattattgccaaggaaggtacagtagcctccagtggatcttctcgttctatgacaacctccccaatcactatcgctgtaagcccgcaactttgtatctgttcgtttattgaaagaaatccccattgtgatggtgcctttgatgtatctaagaatcctctttaacaggaaaaagtctgaaacggttggctcatgcatcttctgacacacataattgacagagaactgaagatctggtctagttagtgtgaggtactgcagtttccctgctaggcttctaaaatatgttggattttcgaacaactctttttggtgaggaactttgttcagttgaagcggaagcggtgttgcaactggggaacagtctgacattgcagcaacagtcaggaggtcttctgcatacttctgttgagacatgaagagaccatcttcatggaagtgtgcctgaattccaagaaaataatgcaactgtcccatgtctttcatccggaacttcttattgagttcactgagaagattggtaagaagctgagagttgttacctgtaatgaccatgtcatccacatataggagaagcatgataacatttttgtttctgacgcaaataaatagtgaagggtcagaaaaattgtagataaaaccaaatgcaaggagaaaggtactgaatttgtcaaaccatgcccttggagactgctttaatccgtataaagatttgtgtagcagacacacatgatcaggcttttctgtatcaacaaatccagcaggctgcttcatatacacagtctcagtgagatccccgtgtaagaacgcatttttgacatccatctgcttcaattcccaattcatgattgtagccaaatgaagtacagctctcactgttgctgttctgactacgggactgtatgtctcaaggtaatcgattccttcttcttgattgaacccctgagctactaatcttgctttaaatttatccagagacccatcagcattaagctttactcgaaaaatccatttagatcccaatacatgcatttcaggtgtaaatgggactaaagaccatgtgtttgtttctgagcagtttccaatttcctctttcatagcctcagtccaatatggatcctttaaagctgcagtaacagtcttaggcataggatatgttactctatgtgtaagaagagcataccgttgatttggtttcgttattccagattttgatcttgtagccattggatgaataggttgaacaactgtcggtgaatgagtaggttgagcagcagaagcttctgattgttcagtcctaggagatgatgaagtagtactgttgccaataggatcaagatcaatgcttgccgtacactcagaacactcttcatcactcataggacttgaatcagtagacgctgttgcagtgatgtgaagtatgttctccccctctgcatttattatctgaggatgaggttctgttataaccgttactgattccacgggactgatactaggagcagtggttgaggtgtgagtaaaagtttcaggtgctgaagcaggaaaactcttgagccaagcagcaagtaatggtgtattggaggagttggtgtagttactatacgtatcagtaaatggaaatgaggcttcatcaaatacaacatgcctactgatgtaaacaagacccgtaggcggatagtaacaccgatagcctttgtatttctcagtatagccaagaaagatacaccgtagagatcgaggatcgaacttgttgatggcatagtctcgaagtgtgggaaaacatgcgcatccaaaacgtcttaaggctaagtagtctggagctttgttaaagagaacttcataaggacttgctttagtatccagagcagtggttggcagaagattcgagagaaagttagctgtgaaataagcttctacccaaaatctctgaggacacttgctttgaaagagaagagtaagacccatttctgtgatttgcctatgttttcgctcagctagaccattttgttgaggtgtgtgagggcataagatgtattgttgtattccagactcttgtaagtgagacagaaatctttgacttgtaaattctccccctccatcacattggaatgtaccaattttggttttttaactgattttctataagactctggaatttaatgaaaatatcatagaaatcagacttcttcttcaagataaaaccagcaatatcttgagaaattatcaatgaagactacataaaatctgaaaccctgaacagaagttacaggagctggaccccagagatcacaatgaagtctttctaggggtcttgaagcagtaaaagcagaagggaaaaatggctatcttgtactttttccaagccgacatggttcacagagcttgttggtactcttctttattttaatcgccttgttggaagataaatgttggagaacttgatcattcggatgccctaagcgtctatgccaaacctcatcagatgttgtgatttgcctagtagagtagaacatttgaaactttggattctccaacgtgtaaagcccatcacttgtttttccgagagtcagaactttgtgtgttgctttgtcctttacaacaacaccatcagaatcaaaagtgaagcaacaaggatagtctttggtgagctttgacacagataacagtgatttagcaatatcagggcaaactaaaacatcctttaaaggaagcatacctgacgtggatggaagttttgcagagccaatgtgagtgattggtaagaagttaccatcactagccattacagtatctgttccatagtagggctgagattgactgagacgttgagcattgttggtaatgtgagctgttgctcctgtatccggaaaccagccggcatcatctgttacctcactaatgtgtaaagcattgaacgcagctgctgcaacatcggactcctcttggtaactgtcatcgaaacggtgccaacattgcagagcaggatgacctcttttaccacaaatttgacacatgggtttctcagtgttgggatctccagaagatgaaccagagaactgttgatgaaaaccgcgtcctcttgtggagaagtttccactaccacggcctctgtttcttcctccccttccagaggactggccacgaccacggttagaagatctgaaagtgttgaaggctaagtgaggagagacgtcagatgtgaccgcatagcgttggagacggtcgtcaaaacccttgagactatagacaatatcttcatagggtggaccagggaaagcatccagagaactttcaagagaggtgataagcggttcatattcacgagtaaggccgtgaaccatagcaaagacctttatcttctctgcaactggacttcccacagatgcaagttggtcacatatgataaaccatgtagacgacgttgaagctcaaaaatccgagaagatgagatgcgattgaagtgcttagctaggttagaccataccgcgtgagatgttgcagacccaacaacgacactaaggatgtcttcagacaacaagccaaggagccacgccataaccacctgatccaagcgcagccaagcttgatgctccggattcgagacagcttcggtgacaccattgttttgtggtccaggaacggtgctgagtggagcagagacggcgccattgacaaacccaagaagcccttgaccggacagaaacgattcaaattgggatttccataagatatagtttcgttcggtgagtttcacagtgacacagtttgagatgtttagagatggaagagagtagagttccatggattgttccatggctctgataccatgaaagtaaatgagaaatcgaaagatatttgtttatattgctttcaactttttaattttggattacaatgaggctgcttttatatagagctacatgatttaacctaatgtatccttggctgcgaatttgtctcttggaatttggttaagcgtcatcacgcgctgcgagtgcctcaaatcggttttgaacctttagctccgtactgtaaggcgatagggatcgttctgcaactctgtttttgtcttgtgttgcaggtgaccgttgtacgtctgtgggctccggtttgggctgagcgtttggttttgttggattgggctttgttgtccgaaagcccaattgagaagtaacgtcgttttgctgtttagctttgacattctctatttcactcacatacacacgatttttttcaatcctctcttcttcgtcattgactcaagctttcacttggaagagtagaaaggttatggcatttggtttatcttactgtttgttatatgaattggaaatgatctccgaatcaatttttgatttttagttatgaattttcaaagtctgtgttttgttgtttagacactataaggcgtgcctattgaatattcatgcaaaaacttgtattctcctgatcatcacataaagagatactatataggatctccttcattctctattgcttaattttggaacagagttcgaatgctttaagtgtctcttagaattttcatgactttgtagctttgaggtatatattaaaactaatggcctagttaggatagttttttttttttgggtctaaatttaagatagttttttgcatggaattagaagacttctccacaatttttaataaacgtattagtagagaaacaaaaaaaacttcaattcaacaaaactagtcacactaattattttagagaaatttccacaaataccaccaatattttataacttatgcattcattattttattactataaacactctaacttatgtaacggtcaatttaatttatgtattaaaaaagaagtaacgtcaatttaacattgaaactcatgcattgaattttcataattactagaaaaacaaaatctgacttaagggaacaggcaaaaaaaaaatcgaacttacgtaactgtcaattaaatttttcaaaaaagaagtaacgtaatataatattaaaaatataatatatttatttatttctttatctaacaaatataatatatatatatatatatatatatatatgttgacaatttactcgggagtcttggattgagagataagctctctcttggactaggattagatctcggatttcgttttcattttctgtgaatactctaaactgttcaattttgtatttgtttttgtcattttgtttgaattgtaaataaacttttggttgcccacatcgatttcttctctttaggatctaccgggaaaaacaaattagtatatgtcactcactgaaaagatgatagaagtaatctttgtacgtatcagatttcaagtggaatcaaatacttttagtccaaaacaaattgaggacatggcggatttttttgaaggtattgaaattttggaaagaaaatgttggggttacaacaaaatgttaacatttcaaaagaacaattagcactagccgaccacaaaaaaacataaaatagcactagccatttacgagaactttgaaatactaatgacattattatggatgtagtagactaagatgatgttattttagtgttgaaaccaacgtcagtattatatatggttggagactaaaatgcatataaactatttgcttaaggtctatttattttgctgtaaatgattaccatttattgtttgcaatcatatgctgtttactaccaaataatgaatttttttttttaataagattttattttctatccacaaaaataaactattatagttatgttatatcattatatatggttcatctgctaattttctaaacattgaaaacaatgtgcaagaagtctcacgacatgccgacccaaaaaaaaaaaaaaaactctcaagacaaattcttgtaaaagtcaaaaaaatttctttaatagtctatgatgttttatgtaatttagtagcaaactaatgctatatatatgttatcgctttctatttgatggcctatgtttcctaaccttttttttctttttcttttaacaactcttaaagacttgtttaaatatctaaaaatattgtaatacactgaaaataaaattatgtaagcctgaatcaaatatagagaaagtaaacatattaaatatcaaattaggtgaacaacacctttctttattatattgagcataaatctttaactcttgttacatcattacttaagtgttacaaccataaacactcgtattgtggtgactagatttagtttctaaacttggcctcaagatcctcgacaatattgacatctaattgaaatgcttgagctaaaatatctggattaatcggaggcgttgacccaaacacagtatcagcgatcgtgataacaccagcattctgactactcaatccagcgaaggccaccgcaggcgttttcccgatattcacttgaaaatggatcattcctatgggaaacacaaacacgtcacccgggtacagaactttggcgaatagacggttattgtcttgattggaagagacaaaaccaacatataacgttccctcgataaggacaaggatctcagtagcacgagggtgcgtgtgaggcgggttttgtccatatggtgcatagtctatgcggaccaaggatattcccatagtgtttaaccctggaatctggtcgacattgactgttgtcacgttggatctgactttattattagtgcttcctgcctggttgaggcctgagaagaagaattattctgccttcgcttgcttgggatccttacagaactttccattcacaaaaactgtaaaaacctttatttattacaacttcaaatataatcgtaataaaggagaacagtaattagtagagagttagagaatttgagttttatacgcaccaccatttttgaggtcatcaatggccacacagaaatcttgaagtggacttggatcataagcttcagcaaaggaaatgaccaaagccgataaggtaatcaggatgagagacttggaaaccctcattttgaaacaaagggatatgctaatgcttttcaaagacttttatatgtgtgtgtgttgtttgtgaattgtgaagcatttgagctcagtatttatagggcaaaagcgcatgtcatatttgacgtggtccaaagatattctatatacattgttttaaattggcagtttaaaaaagtttaacaagtctatcgatgacttcatatatctttaattataaatggatttgcatgcctatataaataaagccacgaccagagcttatattaatttattctagatttaagaagtttcctagctgttttgcagttggaaccatgcctagaaatgacttgttcaaaaaaaaaagaaaaaagaaaaagaaaagaaatgacttgttcaaattaattaacaaggaatcggatcaacttaagtgacttggagactaccatacacaaattgaagggtggcaaagaagccatatcttccccaaatcagagaactcatagttacatccaaaaagttaacatggtagtgcatggtcgagcctatattgatttatgatgactatcaaacatgtgctaacttttttagtactttgagtgataaccacggtttttttttttttggcatgaattgtttagttcaacaaaacttatcaatatacaattgttctaaaaactttttcatttagtttgtgaacggaaaattctctgttgtgctaccagtgaaacatctcagacatagtaattgcaattatgccattttttaactgttatgatgactatcaaacatttggtctaatggttttcataagagaggaaaatcattattcgagtgtatttgcgaaaaggagtattcccaaaacaaaaatagattaaagactgtttttgggtccacgaatactactagagcctatgttcgaattccatgctaaataaaaaagaaaagatgtcttgtttatcactatttttaacattttattttgacaataaataaaattattattagtcaacttgtgacttgtgagtcacaacagaaccgccatctgatccaaacattatatacaagaagtcaagaagccaaacaaatatttcattttccgaaaacaaatgttaagattcttagcagatttatatctttgtttagatagaaatacaacatatgacgtaggtaaaattaaagcatactttatgtaagttttctatgactacgtcaaatttaagtttaccagaagacttgcttaatcccttgataatcatatttacaacaaacacgaacaagtcttcgatgtaaacgtctgctttacttttagatcgaatgcaatacctagaataatagtatagtttttgtacgtgcactgtgttggctattttcgaaatccattgttcttctgaatagttttaactcataaaatgtaaagactaattcaatgttgtttattgggggaaaataaaataaaaagactaattcaatatatataggaaaagtaaggttaatacgaaaatatcaaattaagcgatttagtaggtaaatcttagtcttgaaccactgcaacaaggacaaaagcaaagaccaaatttccatcatatatgtgagaaggtctcataaaaaacaaccattataatttgtgtgtatatttttccaacaatgcacgctttgtaaaactcatgcttctttcaaaatgatactttgattttatgtacatccatttcgtattaatcgcatgattaatatttatatccttttaaaaagaaatgtattgcatgatttatgtggttttgggctttattttaaaagattgaagttatgttgtttgtttaccaagatagattaaagttatgaagataaaaaaaaaaaatcaatagtgaaattatcatgtcagttttcccttgaaatatatgaatagttttataagtttagatgtgatttagcagtaaattgatgcaaatatattaatgtaaatatttatataatatgttttgttttcgttaaccttatttgagtagtttgatcttttgtaccaacttttcagacctcattacgtatccatgaaaaatgacatcaccatgcaagactgttaagacgaaattagcagatttatgacagatttatatctttgtcttctagatatatcatagatagaattacaacattttttgcaaatctgctttgacgtaggtaaaactagagcatactttatataagttatctatgactacgtcaaatttgcgtttaccggaagacttgcttaatctgccttgataagcatatttacaactaacacgaacaagtcttctatgtaaacgtatgcttttactgtagatcgactgctactgctagaataatataacaaagtttacgtgcattgttttgattattgcgaaattcattggtcttttggcatatagttttaacttatagtatgcaaagactaattcaatgttgtttattagaaaaaatattaatttaatgcagtgtttgaaaaccgatttaggcagtcgcataaacctcgacgagacgctaggttctcggacagcgcctagtcgctttgaccacctacaatcgtatagattttgttttagtattttatcaatttctaactaagttttatttatatttatatagttataaatgttcatataaatttaataaatgttttgtttaactttatttacgtattaacatttttatccaatttcctaataaatatttttatatatttattatatgtaatatcatatttataatgtttatgttaaaaacgcttacatcgtctaaaaataatttaaacctcgattaagcgttttaggtgctagacattggattaccgcctggttagcacctagcactttcttgagtaaaaataatgttaacactaaaataacaaattaagcgaagatagttggtcaatattattctttaaccactgcaacagggacaaaaggaaggacggaatttccaccatgtatgtaaggtcacatagaaatcaactattataatttgtgtgtatattatttccaacaagacatgctttataaaactcatgcttctatcaaaatgataatttgatttatgtatatcaatttcgtatcagtcacatgatttatctttataacttataagaaaaagagaaattcttaaaaagaccacattttcaaattttgtttcaaaaactattactcttagtttattgatgtaaaaatactatcgaaagttttagttttccaaaaatatcacaaacataaaaatttaagtttgaattaactatttcagattcaggatatagtttttagagtgtcagagttagcgttcagagttttagaataccaccgaaagtttttgttttccaaaaatatcacaaacacaaaaattaaagtttgaactaactattttagatttaggatagagtgtttagagtgttagagttagcggccagggtttagttttgaaaattaaaagttaattttagttttgtggtattattggaaaatcaagacttaagtggtatttttggaaaaccaaaactaaaagtggtatttttgataaatgtctttaaaatatatatatattttttagtagaaccttaaatatatattttctttgatggtttgtctttattttttttttttgttcattttaacaacccttaaagacttgacggaatatccaagaaaatgttaataccccgacattttaaaaagtggtaagacagaattctatatagaaaaagtaaacttattattaaatatcaaattagtgataacacctttttattttattaagcataaacctttaatccgtgttacatattccttagatactacaacgataaacactcaatattgtggtgactagatttagtttttaaacttggcctcaaggtctttaacaacattgacgtctaactgaaacgcctgagccaaaatatctggattaatcggaggcgttgacccaaacacagtatctgcaatcgtgatgacaccagcattttgactacttagtccagcaaaggccactgcaggggtcttcccgatattcacttgaaaatggatcattcctatggggaacacaaacacgtcgcccgggttcagcactttagcgaataaacggttgttgtcttgattggaagagacaaaaccaacatataatgttccctcaacaagaacaaggatctcagtggcacgagggtgtgtgtgaggcgggttttgaccatatggcgcatagtctatgcggaccaaggatattcccaaagtgtttaaccctggaatctgatcgacattgactgttgtcacgttggatttgactttattattagtggttcctgcttggttgaggcctgagtaaaagaaatcttctgcctttgcttgctttggatccttgcaaaacttaccattcacaaaaactgcaagtagaaatattgaataaaaaaaacctcttattacaacttccaatttacaatataataaaggagactaataattagttgagagttcaagaattcgagttttatacttaccaccatttttgaggtcgccaatggccacacaaaagtcttgaagtggacttggatcattagcttcggcaaaggaaatgaccaaagccgataaggtaatcaggatgagagacttggaaaacctcattttcaaacaaaaggttatgctaatccttttttgagacttttataaatgtatgtgttgtttgtgaattgtgaagcatttgagtttagtatttataggacaaaaaagcgcatgtcgtatttgacgtggtccaagatattatctacatatcttgtaactcgcatgtttcaaagtggcagttcaaaaatgtttaacaagtctatcgataacttcaatctatatattttaattaaattggatttacatgactatactagattttaacccggtacaccgcgaaaacaattttttttttttaaatcagtatatataaaagtttgcaaattatatctatttataaattatttttattttatagtttactgttgttattaagtaacgtccttccaaacccgttccgccaaacccgtcccgtaaaaaaactccgcagtacaccgctaatttaaatatataatgaaaataaatgttttacgggattgcaattgtattttagtttaacaaacaaatttttgttttaaatagttgtcgaaatctagttcaaattttggagaaataagtttagtgaattgataagaaatgaatttaagtgtgttttgctcattttaagggattgcaattgtattttggtctgtcaaatattttttgttttaaatagttaccgaaatctagttcaaattttggagaaatttgcgtgatatatgggattgaaatatatttggaatgttttttatttgttaattaatttattgcaaaaaaaattcaataattaaaagtcagtggcagccattgtaaataagttctaactccatgatttatttcacaaaatggctgcaaaaatgtatatatagatacacaaaaccacagccatagcttatgttgatttgtactagttcaaaaagtttccgagatacgagacacgactatttccactgcaacaaatggtagtttaagtaacatagcaatggatcaactgatgtgacttggagattaccatgacgcgaattgagggcgccaaagaagccatatttcctccaaatcagagaactcgtagtttcattccaaaacttaaaatggaagtgatggttaattataaacgagccatgacatggatctcaataataacaccaattataggcttgttaagcttctaatgatttatagtgactaatatgtacttaattttctagtactttgaatgataaacaagaatttttggcaagaattgtttagttcaataaaatttgtcaatatacaattgtttttttttgggtgcaaattgttctaaattttttctttgagtagtgaatccaaaattatctgttgtgctacgagtgaaacatctcaaacatagtaaatctagggtgttcacgaaaacgagaatggtgataaactacggtaattgcagttgtgacatattaactgttataaatgcaccaagtggttcttggtgtagtggtttccgtaagagagaagcatcctagttcgtgtcacctgcaaaaacaaatatttttgaaggaaatagactaaagactatttatgggtccacgaatattaggatttaaatggttgtggcggttagggcaaacaaatctgtttaaagtttagaccgttttttgtttattattcacaaattttagtccgtaatagtaaattaaaaaaaatagaacaagttcgcggcgtactaactacataccgcttttatatagagaaaaacttggtccttagcaatttgttctcaaaatagagtggtctactctgctagcggtttagtcagctttatccatagcatctattcaaaattttagagtctttaacattaaaaccaaaaaaagaatataagagtttctttcttcctggacaaaaaatactagagcctaggttcaaatcttggaaaaaaaaaaaaaatgtattgtttgtcaatatttagtctaatgttcaaaaaagcggtatacgataaatagacggtgaatcattgcctaatgtctataatgtctaatcgaaatctaagcgatttaggcgtttataacataagcatattagatattacatataaaaatttatcaaacaaaattttagccaaccctttcttttaatgtatatcaaataatatatgaatacttataattaatgtatgtaaatcaaatttagttgaaaatttgaaaaaataaactaaaacaaaatttatgtaattttagtcttagcggtcatctacacatcgtctaaacgtctaatcaagacctagacaaccgtatacggtatagactgcttttgaaaacacttggtttgtctaataacgttatcttgaaaataaataaattattattagtcaacttgttagtaactacaaaaccgccatccaaaaattatatacaagaagccaaacaaagatattttagcagatttagacaactcaactacccacgttatagaccatgcaagactgttaagactaaattagcagatttatgacatatttatatctttgtcttctagatatatgatagatagaattacagcattttttgaaaatctgctttgacgtaggtaaaactagagcatacttatctttgaccacgtcaagtttacgtttaccggaagacttgcttaatctgccttgataagcatatttacaactaacacgaacaagtcttctatgtaaacgtctgcttttattttagatcgactgctactggtagaataatataaaaaacgtttacgtgcattgtgctgattatttgcgaaattcattggtcttttggaatagttttaacttatagtatgaaaagactaattcaatgttgtttattagaaaaagagagtaattcaatgtagtgaaagcagtgctttaaaatccgatctaggcggtcgcataaacctcgagtaggctctaggttctcggacaatgtctaaacaaccatgtgctttgaccacttaaaatcttatatattttgttttagtttattcatcaatttccaactaagtttttatttctatataaatagttatatatgttcatataatatttgatataaattaaataaatattttgtctaactttgtttacatattttttttttttcattttctctaatagatatttttatatgtttattatatttgtagtgtttatgctataaacgcataaaccacctaaactttttctaaacccggattaatatagttggcattgaatcaccacctacttagcacctgatactttcttgaacattgagtaaaaataatgttaacactaagatatcaaattaagcgaatatagttggtaaatcttattctttaagcactacaacaaagacaaaagcgaggccaaaatttccaccatgtacgtaaaggtcacatagaaaccaactattatataatttgtgtgtatattgtttccaacaagacatgctttataaaactcatgcttctatcaaaatgatactttgatttatgtatattcatttcgtatcagtcacatgatttatctttataatctataaaaaacaaagagaaattctttaaaatatcatattttctaattttgtgtcaaaaaatattactcttagcttattgatttaagaataccaccgaaagttttagtttccaaaaatatcacaaacacaaaaattaattttggagtattgaggatttacaaatttaatttggattagctattttagatttaggatatagtttttagagtatcagagatagtattcagggtttagttttgaaagttaaaagttaaattttattttatggtaattttggaaaatcaagacatagcggtatttttgaaaaaccaaaactaaaagtggtatttttgaaacttgtcttaagtattttttatttacttaataaccttaaatatatattttctttgatggcttgtctttttttttcgttttaacaactcttaaagactgaatatccaataaaacgttaatatccggacatttaaaaatgttgtaagacagaattctatataggaaaagtaaacttattatgaaatatcaaattaggtgataacacctttttattttattaagcataaacctttaatccgtgttacatattacttaagtgttacaacgataaacactcaatattgtggtgactagatttagtttttaaacttggcctcaaggtctttgacaacattgacatctaactgaaaagcttgagccaaaatatctggattaatcggaggcgttgacccaaacacagtatctgcgatcgtgatgacaccagcattttgactacttagtccagcaaaggccactgcgggggtcttcccgatattcacttgaaaatggatcattcctatggggaacacgaacacgtctcccgggttcagcactttggcgaataaacggttgttgtcttgattcgaagagacaaaaccaacatataacgttccttcaacaagaacaaggatctcagtggcacgagggtgtgtgtgaggcgggttttgaccatatggcgcatagtctatgcggaccaaggatattcccaaagtgtttaaccctggaatctgatcgacattgactgttgtcacgttggatttgactttgttattagtgattcctgcttggttgaggcctgaggaaaagaaatcttctgcctttgcttgctttggatccttgcaaaacttaccattcacaaaaactgcaagtagaaatattgtttcgaaaaatcttttattacaacttcaaatttagtcattaataaaggagaataatagttaattagtagagagttaagaaaccgagttttatacgcaccaccatttttagggtcatcaatggcaacacagaagtcttgaagtggacttggatcatatgctttggcaatggtgaccaaagcccagaaggtaatcaggataagagacatggagaccttcattttcaaacaaaggtttttttttctaatgctttctagatatgtagtgtgttgtttgtgaattgggaagcattcgagctcattatttatagggaaaacgcgggtgtcatatttgacgtggtccaaaagttattcctatacattttgtagttcacatgtttcaaagtggcagttcaaaaacgtttaatcagtattatcgatcgacaatcaatctttatttaaaattggatttgcacgactatatacacaatccaatgacaagagctcgtagtttattgatttgtaatattgttgtctttgtatcatgcaccttctagattcaagtcaggtagaatatgtgtgtgtgaataatttctattactatcttttttctaaatgccatcctaagtattgtaaatgcacctcaccattcataactttttttataagttgtttactactaaataaagttattatttacttaccaatgaacaattaatagcttcatttattttcaaaaataccaacctttatcacaaaaatttcatgtttctaactaataataaagtcaagcatatatatgagatattttgagatatttctgacaaatttaggcaaagcaatctcaagcgatgagtagagcatatcttatgctcattatattttcggtagatatattacgaatttatttcatgtttgcaagatatatatttacaacgtactttgcaaatctgctataacttgacgacaaaaataaaacaaaaaatctgctataacttatgtaagttatctatgcttacgtcaatttaccagagacttgcttaacctgtcttgataagcaaatttacaacaaacacgaacaagtcttctatatatgtaaagcctgcttttattttaaattcaatggtatagttagaatatttcaaaaatctttaggtgcattgatcttggttgttttcaaaattcactggtctttttggaataatacttatatcttataaaacgtaatgactaattcaaatcaggaaaagtaggttaaaactaaaatatcaaattaagcaaaagacatcatttagttggtaaatatcttagtctctaacaactgccagaaagacaaaagtagtgaccaaattcctagcatgtatgtgcgaaggccttgtagagattaaccattttaatttatgtgtatctttttttcaacaagacacgctttataaaactctcaatcaaaatgatactatgatttggggggaaaataataatttgactgtctttatcgtatttatctcatgatgattcacctgggatacgagtttgggtctgttttgaaggattgaagtgtgtttgtgtacccaaattgattccagtaaatatttgatgatgaaaggtttttttttttattactttccccttcaacaatagttatattttatgattttagatgtagttttagtctttgttcaaaataaaaaaagatgtagttttagtagtaaattgatgcatttctacgaaagttaatattttatgttttatggctcgtttacactaaacggttttttaattcgagtagttttatcttttgtagcaacattaaaataaagacatgattaggtatccatgaaaagcgacatcataaagacttgatttgaaaattattaaaaaaagacttgatgttaagttacgttgactagtattttatccatgtaatttttttgataatactttaacaacatataaaattttgtttataaatatttgtttatggtttcataacaacaacacaaacacaaaccactagattacatgtgtcgattattcttgtaattttatccgattgagtagtttttgctgctcttagacaacacgtcgtacaatttctcatctactttatctttggaaagtgaggaaaaaaaacatgcaaccttcaacgcctgagaccatttttagagcaactgattgcaacttttaagacacatatttagcaaggagggggtaagacaaaattcaccgattcattgcaaatttggcttcacagcactattaaagttgttatattataatatagaaataggtacataagccatttttactttgttacataaatatttcatagtagtgtattcctttaatttgtgtttcaatgataaacactcttaaacgacttagatgatcagttcatatggacccaaacttggcttgaagttctttgacaacatttgcatccaactggaacgccctggcaagaagctctggataaatcggagggtttgacccgaacacagtgtttgcaattgtgataacaccagcgttctggctactcaatcccgcaaaagcaattgctggaattttcccgatatttaactgaaaatggatcattcctatggggaacacaaaaacatcaccggggtgcaatactttggcgaataaccggttgttatcttgattggaagagacaaaaccgacgtataatgttccttcgacaaggacaaggatctctgagccacgagggtgcgtgtgaggtggattttggccatgcggtgcgtagtctatgcggaccaatgatattcccatggtgtttagcccggggatctgatcaacattaacagtggtcacattagagccaacttgattattggtgttcccgggcacattgagacctgagaagaaaaaatcttttgcatcgactcgctccgggtctttacaaaacctaccattcacaaaaactgcatgtagaaatataatatcaaagagtatatattatattactacgtcaaagttaatcataaggagaaaagtagagaaatagataaccggagatttctttacgtaccgccttttaggtcatcaatggcaacacagaagtcttggagtggacttggatcataagcattgacaaaggaaaggaccaaagcaattatggcaaaagggattagagattgagaaaccctcattattgctcgctctaaatttgttatgcatgtatacttggtgaatcctcagtgctttaaaatttataggacaagagcataagtcatatttgacatggaatggactaaataattaatgtttaatgaaattacacaagtttggtacggacttttagttacaagagagcatttaaacaaaaatgaccggtagatggaattcctttagaaagattagccaaatgttgatgagtagatgtcaaagaacgtaattagagagtccccacccacctattagatgaaatcaaatttgtattattatttaacacacgatcaaaagtttcataggaagaatataggttgcatatagtgtgaatggaataatcaataatggactgaccaaaaaaaacatagattataacttacgttcataattatataaaagtattaaacacttgaaattttaaccgactaagaaaaatgcttgttatgttataaaaatagcatatatacagaatttgtttttttttttatcactacattgttttcatgtatttgggagggaccaaatttataatttataaagcgtatatatgctaaataatatatagaaaatatttacagaatactttattttttcattccatcgacacattaagattacgtagtatctgaatttcgttacataggaatatataggatacaatcggtaattaccttgtctaatgtctcgcgtctcttggacagctatgacctaaataattgacatgacaaagagtaataacctcaattttttaccgaaaaacagagacaacaagaaagccaaccaccagcaccagcaccagcaccgccctgtttcgaatcatccgggtacaatccggtcttcgagtcaagtcttgatagttctctttttccactttcactcttcgtgtttagtgatgtctttcgctcttgttggtactctcctaatctacaaaggattttaaaaataaaccaatagacctcataagcacaactcaattaattaaaaccgagttttcagtccaaccagtctggttttaaccgagcaaattggcatggaagattagagaacgacttacgtgggaaatgcgaaagaagttgtactgttattacttgtttcggagtgacaagacttggttggagaaataggaatctgttgtcgtggatccggtttaggaacattggttaagccatctcgattaccggtttttggtccggtttccaccatggttatattgacttctttggttccagcgtcagtcggagcaattttgttatcaatgttattgttatagtagctaatatagggcgaagcagtatattcgaaattggtgagttctccagatttatacatcttggagaaactatggtctcccatgtaaatacgatgttttagtataagtagtagaggtttgggactatctaacacacacacaatttttctaaatcatactatagtcatttgagtgttaatctctagcttttacatttaatttttgtcttcaaaaataatctttctcacaaaataaataaatacttgagtgtgcgaatccgacattcacatacaccatcttagtagatcggagcagtcgctaacgaaaataacaccaatatgtttttctgcgattatatatatatctcattgttcatactagtaaagatgacatactcccacaagtgatacctcattattggctttgtctttcaattatttaaggtctgagtgtctgacttctcattgttcatactagttaagattacatactcctacaagtggtacctcatttttggttttttctttcaattattttaggtcttaaataaattatttgtagttgtatattactaacgtagtccaatctatgcatcgtctaaaacaaaatttatgtaattttagacgattaaagcggtcatctatgcatcgtctaaacgtctaatcgggacctaggcaactgtatagtgtatagactgcttttaaaaacacttgttttgtctaataacattttgttttgaaaacaaataaattatcattagtcaacttgtcagtaactacaaaaccgccatacaaaaattatatacaagaagccaaacaaatatattttagcagatttagacaactcaactgcccacgttatagaccatgcaagactgttgaaatgagcagatttatgacatatttatatctttgtcttctagatatatcatagatagaattacaattttttgcaaatttgctttgacgtaggtaaaactagagcatactttatataagttatctatgactacgtcaagtttacgtttaccggaagacttgcttaatctgcattgacaagcatatttacaactaacacgaacaaatcttctatgtaaacgtctgcttttattttagatggactgctactgctagaataatattaaaaagtttacgtgcattgtgttgattatttacttttggaatagttttagcatatagtatgcaaagactaattcaatgttgtttattagaaaaagagagtaattcaatgtagtaaaagaagtgctttaaaaaccgatttaggcggtcgcgtaaacctccattaggcgctaggttctcggaaaacgtctagacaaccatgcactttgaccacctaaaatcatatagattttgtttttagtgtattttatcaattttcaactaagttttgtttctatacatatagttataaatgttcatataaggtatgatataaatcaaataaatgttttgtttatgtattaacatatttatttatttttctaatagatatttttatatgtttattatatgtaatattatatttatagtatttatgttataaacgctttaaccgcctaaaaattgtataaatcccgattaagcgttttaggtactaggcattggatcaccgcttgcttagcacctataaacttttttgaacattgagtaaaactaatgctaacactaaaatatcaaattaagggaatatagttggtaaatcttattctttaaccactgcaacatggacaaaacctaagaccaaatttccaccatgtatgtaaagatcagatagaaatcaactattatagtttgtgtgtatattgtttccaacaagacatgcttctatcaattgatattttgcccacattttcaaatttctgattcaaaaaatattgctcttagtttattgatttaagaataccaccaaaagttttagtttccaaaaatatcacaaacacaaaaattaattttggaaaatcaagacttaagtggtatatttggaaaaccaaaattaaaagtggtatttttgaaattgtattaagtatttttatttttatttttaatagaaccttaaatattgattttctttgatggcttgtctttttttttttaacaactcttaaagacttgactgaatatccaaaaaaacgttaataccaggacatttaaaaaagttgtaagacagaattctatataagaaaagtaaacttattattaaatatcaaattaggtgataacacctttttattttattaagcataaacctttactccgtgttacagattacttaagtgttacaacgataaacactcaatattggggatttagtttttaaacttggcctcaaggtctttgacaacattgacatctaactgaaacgcctgagccaaaatatctggattaatcggaggcgttgatccaaacactgtatctgcgatcgtgatgacaccagcattttgactacttagtccagcaaaggccactgcgggggtcttcccgatattcacttgaaaatggatcattcctatggggaacacgaacacgtctcccgggttcagcactttggcgaataaacggttgttgtcttgattcgaagagacaaaaccaacatataatgttccttcaacaagaacaaggatctcagtggcacgagggtgtgtgtgaggcgggttttgaccatatggcgcatagtctatgcggaccaaggatattcccaaagtgtttaaccctggaatctgatcgacattgactgttgtcacgttggattggactttgttattagtgattcctgcttggttgaggcctgaggaaaagaaatcttctgcctttgcttgctttggatccttgcaaaacttaccattcacaaaaactgcaagtagaaatattgtttcgaaaaatcttttattacaacttcaaatttagtcattaataaaggagaataataattaattagtagagagttaagaaaccgagttatatacgcaccaccatttttagggtcatcaatggccacacagaagtcttgaagtggacttggatcatatgctttggcaatggtgaccaaagctgataaggttatcaggatgagagacatggacaccttcattttcaaacaaaggtttttttttgttctaatgctttctagatatgtagtgtgttgtttgtgaatgaggaagcattcgagctcagtatttataggaaaaaggccggtgtcatatttgacgtggtccaagttattcatatacattttgtaactcacatgtttcaaagtggcagttcaaaaacgtttaaccagtctatcgataatcaatcttttattaaaattggattttacacaattcaatgaccagagcttgcagtttattgatttgtaatattgttttctttgtatcatgcaccttctagtttcaagtctggtagaatatatgtgtgtggtaataatttctagtactatctttttcttaagaaaaaaaattagagtagtgtagcagtttaatggtaaatacgtaaattccatcctacgtattgtaaatgcacctcactattcataacattttttattagttgtttatcactaaataaagttattatttacttgttaatgaacaattaataacttcatttattttcaaagatagcaacctttaattacaaaaaataatgtttctaactaataataaagtcaagcatatatatgagatattttgacatatttctgacagatttagcatagcaatatcaagcgatgagtagagcatatagcatagcaatattacgaatttatttcatgtttgcttgatatatcttgtcaaaaaggagatgaagatgtaaaaagacgtttcatgttgatacgtaagagaggcaatgccttatatacaacaacatgatttaacctagtgtagctatacaatctaagtgggctcgggagaggcctcatagcccaatacccccccgcaaactggagtatggagattacaaatacccagcttgagaagaaaagcgtcaaactcacgacgacccaatgctttagtcataatgtctgctagttgagatgtcgtggagacgtgtttggtggcaatggtacctcgtataatttcatcacgaacgaagtgtacgtcgcgaccaacatgctttgtacgtgcatgataaacaggattggcagctagactaatagccgaaagactatcagaatacaacatgatgggttcattacacgagatacctaaagctggaagaagagcccgcagccaaagaagctcgctaacggtgtcggccatagcacgatactctgcttcagctgaggatctagaaaccacatcatgtttcttggttttccaagagatcggagagcctcccagttgaataaaccaacccgttagagacctttgtgtaatcggacaagaatcaaaacctgagtcacaccaaccagtgagtaccaaaggtgtattggagcgtaaaagaataccttgacctggacttgattttagataacgaacgaccctgagagcagcttccatatgatcggctttaggatcactcatgaattgggaaagcatgtgaattgcataagacaactcaggacgtgtggtgccgaggtatataagtctgccaacaagacgacgataccgagaaggatccgagatcgtgtcaccaaaagctaaagcaagcttatggttctgttccaaaggatgtgatgcaggccagactccaagcaaacccgtttctgtgataatatcaatggcgtacttacgctgacacaagtaaatcccggcgggactcctagcaacctcgattcccaagaagtatcgcaaaataccaagatccttcatgtagaaacatgagcttaaataccctttaaacttagtgatgacatcgagagaagagcctgtgatgatcaagtcatcaacatagacaagaatatgtaaacggatgccgtttctctccatggtaaataacgaataatcagagatgtcttgtatgaacccgtaatcattcaaagcagtagtaagtttggcgaaccaacatcgaggagcttgttttaatccatacaaagctttgcgcaggcgacacactttacgattatcatcactaccaaaacccggaggaaatttgatgtaaacttcttcatcaagatcaccgtgtagaaatgcgttgtgaacgtccatttggtgaacttcccagtctaatgatgctacttgttgaagaaaagcacgaacggtgaccatttttgcgacaggagcgaacgtttcggagtagtcaatgccttcggtttgtttattaccgagaaccaccaaacgtgctttatgtctttcaagcgtaccatccgatttgtattttagtctaaacacccatttgcagcccaatgctttcttaccaggaggtaggtcttctactgtccatgtaccaagattttcaagagagacaatctcatcagacactgcacaacgccaattctcatcaagaatcgcttccttgtagctctttggttcaatacccaaagatatggcaaaaacataagcttgataagcagcagagaattgagagcttgatacatagttgtccagtgggtatggagtcactgacgggtgtggttggtgaagtaatgtagtggcataatccgcaagcctcacaggttgtgttttcttgcgttttccttttccaagtagttcaggttcaggttctggttctgctatttttggcagagacggagagggtgctgccggtgatagaggtagagacagtgatgccggtgataaaggcagagacggtgatgccggtgacaagaacggagatgattcattggtagttggagaattcaaatcctcattgtcagacatctcattaacagagcttgattcgtcggagggaatacgaaaattatcatcgttgagattggtagaggacgatgactgtgttaattccagagttgtagtaatactgaccggtgtaggagcttgtaattctgatggtaaaaaaaatgactgatctgcgttggagggtgagagctgcgagtctggcgtggagtcaaaaacagaggctggaaaagggaattctgtttcccggaaaacaacgtcacgagagacagaaatcacacccgtttcaaaattgtatactctccagcctttcttcgcaaatggatatccaagaaaaatggatttgttacttctactctcaaatttgtcacctccatgcttttgattatgaacatagcaaatacaaccgaaaacccgaatatgattaaccggaggaggacgattatatagaagctcaaatggtgtcttgccttgaagtaatggagttggagttctattgatgaggtaagccgcagtgagtgcgcaataactccaaaattcaataggtaatctagcttgaaaacgaagagcacgtgcgacattgagaatgtgtctatgcttgcgttctactctaccattttgttgtggcgtccccacacaagaagtctcatgaataataccgtggtcaacaaaaaatgaagagagacaaacaaactccgtgccgttgtcactgcgaattgtctttatcttagtagaaaactgtctctcaaccagagatatgaagtttttaagatgcatcggagctgtttgtttcgaaggtaggagatataaccagacagcccgtgtatagttgtcaacaagtgtgagaaaatagttagaaccgcagattgatgtagtcctatatggaccccaaagatcacaatgcaccatttcaaaaggagaacttgttttattattgctcaaaggaaaaggatcccttgtttgtttagctttaatacaaatctcacaagtctttgaatcaaaagcatgaccagtagaatctgaaaacgataacaactttaaaactttggaggaaggatggccgagacgacaatgccacaactgagaagacgagtccatgcgtgtcattgatgccactgtttccgttcctcgaaagaaatacaatccattttgctgcttaccagctccaatcagcgttagagtgatgcggtcctgaataatacacactttgtcagttatctgaaaaacacaactctttgctctagtcaactgtgaaactgagattagatgacaatgtagaccgtcaacaaaaaacacttcctgaagatccaaagatgagcctaaataaacacgtccgtgtttggtagatgttgtaagccttccgtcgggaagtttaatcataatcggaggcatgtcacaaacatcacgcaaaaattcaagagtaccggtcatgtgatttgtcgcaccggaatcaatgatccaagattcaagaaagaacttactggatttggtattggtggaattgaaatttcgttctttaagcatctgtctcaattgcttccattgttcatcgttcaggccacttattccgacacggtcagcttctgttaactgagaaccagacatcgagcttgttgcagcagtcgtactttctccgatatttgcgacatgattggctgatgcaccacgaccaaaactctgttttcctttgaaagatgtggcgggtacaacagaggagccacgacccatgctggcagactgatttcgtgaggaagaagtagcattccgacgcattttctcttaagccaaggaggatatcctactagtttgaagcagttttcggcgagatgaccaagacgcccacagtgagaacaaacaattgcagaatctttgtttttggtgaggctgcgggtccttggagtagtttgaaccgcaaaactcacaccatcgtttctttcatcatgtaaacgacttaaagactttgattcttcgtcttgagtcaaggtgttgt

SEQ ID NO: 792 - DNA, 68889 bp, Arabidopsis thaliana
aagcttcctcgagtgaaggcagtggtacccgagagagaagagcggacttgacggctccatacatggattcgtctagacccatgagaaattgatgcagcttgtcttcctcacgctcttttcttacttcctccattgttttagcttgttgataatctgccaagcttctccacaattgagagagtttcccgtagtatgtctcaatgggagttcctttttgacgacatgtagctaactcggttttgagtctttggatgcgctgtccatttttaactccaaaccgtttttgaatgtgagtccacatatcatgggaatcgtcgaggtgtgacattgaggtagctaagctttcatgaatggtgagtttcatccatgaaaccacaagagcattgttagcaatccaatcatcgaagtcaggatttgtttcgtcgggctgaggaattgtcccatctgcaaatccaaactttttccttgctttcaaagccaaacgtaaatttgtggcccattcatcgtagttaggtccacgtaagagaggttttgaaattagggtgcctggattgtctccggaggtaagatcgtatggtgagatggtacggcgaggttgtgtggtagtcgaggaagaggtggtaagagccaactccgtactcatcgtgagaaaagtttgtcaaagaagtggaaacaaacgaattttagaaacaactataacttgcagcggaattgacagatcacagaatcaagaaacaaaaaccctttagtagtttaggttttgctctgataccatgtcaaaaaggagatgaagatgtaaaaagacgtttcatgttgatacgtaagagaggcaatgccttatatacaacaacatgatttaacctagtgtagctatacaatctaagtgggctcgggagaggcctcatagcccaatatatcttagattatatatttacaacatatatactttgcaaatctgctataacttgacgaccaaaaaaaaaaaactgatataacttatgtaagttatctattcctacgtcaattaaccagagacttgcttaatctgtcttgataagcaaatttacaacaaacacgaacaagtcttctatgtaaattttcaaaatcctgcttgtattttaaattcaatggtatagtgagaatatttcaaaactggttgtttgggtaggaaattcattaggtgcattgatcttggttattttcaaaattcagtggtctttttggaataatacttatctcttataaaacgtaatgactaattcaaatcaggaaaagtacgttaaaactaaaatatcaaattaagcaaaagacatcatttagttggtaaatatcccagtctctaaccactgccagaaagacaaaagtagtgaccaaatttctagcatgtatgtggccttgtagagatcaaccatttcactttgtgtgtatctttttttcaacaagacatgctttataaaactctcaatcaaattgatactatgatttcgggggaaagtaataataagactgtctatatcatatttctcgcatgatgagtcacttgggatatgactttgggtttgttttgaaggattgaagtgtgtttgtgtaccccaaatagattccagttattatttcatgatgaaagtttttttttctttttgacaagtaaaagtgtgttttttctttttactttccccttcatcaatagttatattttatgatttttagatggagttttagtctttgttcaaaaacaaaaaaactgtagttttagtagtaaattgatgcatttatacgaaagttagtttttctgttttatggcttgtttacactaaacgttttttaatttgagtagttttatcttttgtagcaactagcaacattaaaataaagacatgattaggtatccatgaaaagcgacatcataaagacttgatttgaaaaattatttaaaaaagacttgatattaagttacgttgactagtattttatccttgtaattttgtctataatactttaacaacatataaaattttgtttatcaatatttgaacttgaatggtttaaacaaaacacacacaaaccactagattacaattacatgtctcgattattcttgtaattttatccgattgagtagtttttgctgctcttagacaacacgtcgtacaatttttcacctactttatctttcaatctttggaaagtgaggaaaaaaaacatgcaaccttacgactgagaccatttttagagcaacttttaaaacacatattttgcaaatttgcaaatttttcaaatcaagcactaagcattttttttgcttagattcagaggttcatgaagaatttgaatgttggaacttggaagcacttgacttaaacacaaaaaaaaataaaaataaagagctcttggcttagatcgaggaatggatccgatcgttagatcattgtggttcttataccatgtacagcttgatgagagatagagattggaagaatatgttattgactcttataatgataagctttgggttacatatgtttacataataaaatggtttcctaatctaagatagaactaaatctgtacatatcaatataataaatatacaacatcttcatattaacttgtggatcttctatatccttctacagtatagaatttttgttagtagcacgagtatacagctttaatattcataacctctgataaactttgtccattcattaaattatttcactaactatttaattgtgaaaataattaaaatatttagaagttttcatgaattacagaaaatatttcatccattattactgaaaaagaaaacaagattttaataactacaaaatttgacgtacgaaatggttggtttacataataattggtagacttgctcaatagcaaattcatagcatagacaggtagatcagtaactaatctataactaaagtagacacttctatcgtatgaaaagtagacttcgaatacttaaacaataagaaattgtttaagttgatcattttagctatttaaatttgcctgtttaggattattttctcttacaaaaatgcaagaataaatcaatataggaataataatataaaaaagatcaatataggaaaagtaattcacgtggaaagcaataactacttggtgaatatcccacttttgaactattacaagtaattgcaacatcaagaaaacaagaaaccgtgattcaatttgtgtttatcttctttcaacaagacacgcaagctttctacaactcatgcttccatcaagatgatactttgaatatgtacatcaattttgaagttttttatatccaacaaaatatatcagaatttaactaggtatcttttcaactatgaaagtgtgaaagttatttcttacagattgttttatccaaaccttatattataaagttaacgaggagcttttccaactgtgaaagacttttcttgcagttcttcaccccaaaaataaaaaataaagtaaaataactctaaaagacataattagtaaaatgtaagactaaaatctatatgggaaaagttgatatattataatatagaaacttggtacataatccaggttttattttgttacataaatatttcatagtagtgtattcctttaattaagtgtttcaatgataaatacttttttttctttttttttgtaaaagatgataaatactcttaaacgacttagatgatcagttcatatggacccaaacttggcctgaagttctttgacaacacttgcatccaactggaacgccctggcaagaagctctggataaatcggaggattggacccaaacacagtgtttgcaattgtgataacacctgcgttctggctactcaatcccgcaaaagcaactgctggaattttccccacatttacctgaaaatggatcattcctatggggaacacgaaaacatcaccggggtgcaatactttggcgaataaccggttgttatcttgattggaagagacaaaaccgacgtataatgttccttcgacaaggacaaggatctctgagccacgagggtgcgtgtgaggtggattttggccatgcggtgcgtagtctatgcggaccaatgatattcccatggtgtttagccctgggatctgatcaacattaacagtggtcacattagagccaacttgattattggtgttcccgggcatattgagacctgagaagaaaaaatcttttgcatcgactcgcttcgggtctttacaaaacctaccattcacaaaaactgcatgtagaaatataatatcaaagagtatatattatattactacgtcaaagttaatcataaggagaaaagtagagaaatagataaccggagatttctttacgtaccgccttttaggtcatcaatggcaacacagaagtcttggagtggacttggatcataagcattgacaaaggaaaggaccaaagcaattatggcaaaagggacaagagattgagaaaccctcattattgctcgctcttaatttgttatgcatgtatacttggtgaatcctcattgctttaaaatttataggacaagagcatataagtcatatttgacatggaatggactaaataattaatgtttaatgaaattacacaagtttggtacggacttttagttacaagagagcatttaaacaaaaatgaccggtagatggaattcctttagaaagattagccaaatgttgatgagtagatgtcaaagaacgtaattagagagtccccacccacctattagatgaaataaaatttgtattattatttaacacacgatcaaaagtttcataggaagaatataggttgcatatagtgtgaatggaataatcaataatggactgaccaaaaaaaacataaattataacttacgttcataattatataaaagtattaaacacttgaaattttaaccgactaagaaaaatgcttgttatgttataaaaatagcatatatacagaatttgttttttttttatcactacattgttttcatgtatttgggagggaccaaatttataatttataaagcgtatatatgctaaataatatatagaaaatatttacagaatactttattttttcattccatcgacacattaagattacgtagtatctgaatttcgttacataggaatatataggatacaatcggtaattaccttgtctaatgtctcgcgtctcttggacagctatgacctaaataattgacatgacaaagagtaataacctcaatttttcaccgaaaaacagagacaacaagaaagccaaccaccagcaccagcaccagcaccagcaccgccctgtttcgaatcatccgggtacaatccggtcttcgagtcaagtcttgatagttctctttttccactttcactcttcgtgtttagtgatgtctttcgctcttgttggtactctcctaatctacaaaggattttaaaaataaaccaatagacctcataagcacaactcaattaattaaaaccgatttttcagtccaaccagtctggttttaaccgagcaaattggcatggaagattagagaacgacttacgtgggaaatgcgaaagaagttgtactgttattacttgtttcggagtgacaagacttggttggagaaataggaatctgttgtcgtggatccggtttaggaacattggttaagccatctcgattaccggtttttggtccggtttccaccatggttatattgacttctttggttccagcgtcagtcggagcaattttgttatcaatgttattgttatagtagctaatatagggcgaagcagtatattcgaaattggtgagttctccaaatttatacatcttggagaaactatggtctcccatgtaaatacgatgttttagtataagtagtagaggtttgggactatctaacacacacacaatttttctaaatcatactatagtcatttgagtgttaatctctagcttttacatttaatttttgtcttcaaaaataatctttctcacaaaataaataaatacttgagtgtgcgaatccgacattcacatacaccatcttagtagatcggagcagtcgctaacgaaaataacaccaatatgtttttctgcgattatatatatatctcattgttcatactagtaaagatgacatactcccacaagtgatacctcattattggctttgtctttcaattatttaaggtctgagtgtctgacttctcattgttcatactagttaagattacatactcctacaagtggtacctcatttttggttttttctttcaattattttaggtcttaaataaattatttgtagttgtatattactaacgtagtccaatctatgcatcgtctaaaacaaaatttatgtaattttagacgattaaagcggtcatctatgcatcgtctaaacgtctaatcgggacctaggcaactgtatagtgtatagactgcttttaaaaacacttgttttgtctaataacattttgttttgaaaacaaataaattatcattagtcaacttgtcagtaactacaaaaccgccatacaaaaattatatacaagaagccaaacaaatatattttagcagatttagacaactcaactgcccacgttatagaccatgcaagactgttgaaatgagcagatttatgacatatttatatctttgtcttctagatatatcatagatagaattacaattttttgcaaatttgctttgacgtaggtaaaactagagcatactttatataagttatctatgactacgtcaagtttacgtttaccggaagacttgcttaatctgcattgacaagcatatttacaactaacacgaacaaatcttctatgtaaacgtctgcttttattttagatggactgctactgctagaataatattaaaaagtttacgtgcattgtgttgattatttacttttggaatagttttagcatatagtatgcaaagactaattcaatgttgtttattagaaaaagagagtaattcaatgtagtaaaagaagtgctttaaaaaccgatttaggcggtcgcgtaaacctccattaggcgctaggttctcggaaaacgtctagacaaccatgcactttgaccacctaaaatcatatagattttgtttttagtgtattttatcaattttcaactaagttttgtttctatacatatagttataaatgttcatataaggtatgatataaatcaaataaatgttttgtttatgtattaacatatttatttatttttctaatagatatttttatatgtttattatatgtaatattatatttatagtatttatgttataaacgctttaaccgcctaaaaattgtataaatcccgattaagcgttttaggtactaggcattggatcaccgcttgcttagcacctataaacttttttgaacattgagtaaaactaatgctaacactaaaatatcaaattaagggaatatagttggtaaatcttattctttaaccactgcaacatggacaaaacctaagaccaaatttccaccatgtatgtaaagatcagatagaaatcaactattatagtttgtgtgtatattgtttccaacaagacatgcttctatcaattgatattttgcccacattttcaaatttctgattcaaaaaatattgctcttagtttattgatttaagaataccaccaaaagttttagtttccaaaaatatcacaaacacaaaaattaattttggaaaatcaagacttaagtggtatatttggaaaaccaaaattaaaagtggtatttttgaaattgtattaagtatttttatttttatttttaatagaaccttaaatattgattttctttgatggcttgtcttttttttttttaacaactcttaaagacttgactgaatatccaaaaaaacgttaataccaggcatttaaaaaagttgtaagacagaattctatataagaaaagtaaacttattattaaatatcaaattaggtgataacacctttttattttattaagcataaacctttactccgtgttacatattacttaagtgttacattgataaacactcaatattggggatttagtttttaaacttggcctcaaggtctttgacaacattgacatctaactgaaacgcctgagccaaaatatctggattaatcggaggcgttgatccaaacactatatctgcgatcgtgatgacaccagcattttgactacttagtccagcaaaggccactgcgggggtcttcccgatattcacttgaaaatggatcattcctatggggaacacgaacacgtctcccgggttcagcactttggcgaataaacggttgttgtcttgattcgaagagacaaaaccaacatataatgttccttcaacaagaacaaggatctcagtggcacgagggtgtgtgtgaggcgggttttgaccatatggcgcatagtctatgcggaccaaggatattcccaaagtgtttaaccctggaatctgatcgacattgactgttgtcacgttggattggactttgttattagtgattcctgcttggttgaggcctgaggaaaagaaatcttctgcctttgcttgctttggatccttgcaaaacttaccattcacaaaaactgcaagtagaaatattgtttcgaaaaatcttttattacaacttcaaatttagtcattaataaaggagaataataattaattagtagagagttaagaaaccgagttatatacgcaccaccatttttagggtcatcaatggccacacagaagtcttgaagtggacttggatcatatgctttggcaatggtgaccaaagctgataaggttatcaggatgagagacatggacaccttcattttcaaacaaaggtttttttttgttctaatgctttctagatatgtagtgtgttgtttgtgaatgaggaagcattcgagctcagtatttataggaaaaaggccggtgtcatatttgacgtggtccaagttattcatatacattttgtaactcacatgtttcaaagtggcagttcaaaaacgtttaaccagtctatcgataatcaatcttttattaaaattggattttacacaattcaatgaccagagcttgcagtttattgatttgtaatattgttttctttgtatcatgcaccttctagtttcaagtctggtagaatatatgtgtgtggtaataatttctagtactatctttttcttaagaaaaaaaattagagtagtgtagcagtttaatggtaaatacgtaaattccatcctacgtattgtaaatgcacctcactattcataacattttttattagttgtttatcactaaataaagttattatttacttgttaatgaacaattaataacttcatttattttcaaagatagcaacctttaattacaaaaaataatgtttctaactaataataaagtcaagcatatatatgagatattttgacatatttctgacagatttagcatagcaatatcaagcgatgagtagagcatatagcatagcaatattacgaatttatttcatgtttgcttgatatatcttgtcaaaaaggagatgaagatgtaaaaagacgtttcaagttgatacgtaagagaggcaatgccttatatacaacaacatgatttaacctagtgtagctatacaatctaagtgggctcgggagaggcctcatagcccaatacccccccccccccccccccgcaagctggagtatggagattacaaatacccagcttgagaagaaaagcgtcaaactcacgacgacccaatgctttagtcataatgtctgctagttgagatgtcgtggagacgtgtttggtggcaatggtacctcgtataatttcatcacgaacgaagtgtacgtcgcgaccaacatgctttgtacgtgcatgataaacaggattggcagctagactaatagccgaaagactatcagaatacaacatgatgggttcattacacgagatacctaaagctggaagaagagcccgcagccaaagaagctcgctaacggtgtcggccatagcacgatactctgcttcagctgaggatctagaaaccacatcatgtttcttggttttccaagagatcggagagcctcccagttgaataaaccaacccgttagagacctttgtgtaatcggacaagaatcaaaacctgagtcacaccaaccaatgagtaccaaaggtgtatttgagcgtaaaagaataccttgacctggacttgattttagataacgaacgaccctgagagcagcttccatatgatcggctttaggatcactcatgaattgggaaagcatgtgaattgcataagacaactcaggacgtgtggtgccgaggtatataagtctgccaacaagacgacgataccgagaaggatccgagatcgtgtcaccaaaagctaaagcaagcttatggttctgttccaaaggatgtgatgcaggccagactccaagcaaacccgtttctgtgataatatcaatggcgtacttacgctgacacaagtaaatcccggcgggactcctagcaacctcgattcccaagaagtatcgcaaaataccaagatccttcatgtagaaacatgagcttaaataccctttaaacttagtgatgacatcgagagaagagcctgtgatgatcaagtcatcaacatagacaagaatatgtaaacggatgccgtttctctccatggtaaataacgaataatcagagatgtcttgtatgaacccgtaatcattcaaagcagtagtaagtttggcgaaccaacatcgaggagcttgttttaatccatacaaagctttgcgcaggcgacacactttacgattatcatcactaccaaaacccggaggaaatttgatgtaaacttcttcatcaagatcaccgtgtagaaatgcgttgtgaacgtccatttggtgaacttcccagtctaatgatgctacttgttgaagaaaagcacgaacggtgaccatttttgcgacaggagcgaacgtttcggagtagtcaatgccttcggtttgtttattaccgagaaccaccaaacgtgctttatgtctttcaagcgtaccatccgatttgtattttagtctaaacacccatttgcagcccaatgctttcttaccaggaggtaggtcttctactgtccatgtaccaagattttcaagagagacaatctcatcagacactgcacaacgccaattctcatcaagaatcgcttccttgtagctctttggttcaatacccaaagatatggcaaaaacataagcttgataagcagcagagaattgagagcttgatacatagttgtccagtgggtatggagtcactgacgggtgtggttggtgaagtaatgtagtggcataatccgcaagcctcacaggttgtgttttcttgcgttttccttttccaagtagttcaggttcaggttctggttctgctatttttggcagagacggagagggtgctgccggtgatagaggtagagacagtgatgccggtgataaaggcagagacggtgatgccggtgacaagaacggagatgattcattggtagttggagaattcaaatcctcattgtcagacatctcattaacagagcttgattcgtcggagggaatatgaaaattatcatcgttgagattggtagaggacgatgactgtgttaattccagagttgtagtaatactgaccggtgtaggagcttgtaattctgatggtaaaaaaaatgactgatctgcgttggagggtgagagctgcgagtctggcgtggagtcaaaaacagaggctggaaaagggaattctgtttcccggaaaacaacgtcacgagagacagaaatcacacccgtttcaaaattgtatactctccagcctttcttcgcaaatggatatccaagaaaaatggatttgttacttctactctcaaatttgtcacctccatgcttttgattatgaacatagcaaatacaaccgaaaacccgaatatgattaaccggaggaggacgattatatagaagctcaaatggtgtcttgccttgaagtaatggagttggagttctattgatgaggtaagccgcagtgagtgcgcaataactccaaaattcaataggtaatctagcttgaaaacgaagagcacgtgcgacattgagaatgtgtctatgcttgcgttctactctaccattttgttgtggcgtccccacacaagaagtctcatgaataataccgtggtcaacaaaaaatgaagagagacaaacaaactccgtgccgttgtcactgcgaattgtctttatcttagtagaaaactgtctctcaaccagagatatgaagtttttaagatgcatcggagctgtttgtttcgaaggtaggagatataaccagacagcccgtgtatagttgtcaacaagtgtgagaaaatagttagaaccgcagattgatgtagtcctatatggaccccaaagatcacaatgcaccatttcaaaaggagaacttgttttattattgctcaaaggaaaaggatcccttgtttgtttagctttaatacaaatctcacaagtctttgaatcaaaagcatgaccagtagaatctgaaaacgataacaactttaaaactttggaggaaggatggccgagacgacaatgccacaactgagaagacgagtccatgcgtgtcattgatgccactgtttccgttcctcgaaagaaatacaatccattttgctgcttaccagctccaatcagcgttagagtgatgcggtcctgaataatacacactttgtcagttatctgaaaaacacaactctttgctctagtcaactgtgaaactgagattagatgacaatgtagaccgtcaacaaaaaacacttcctgaagatccaaagatgagcctaaataaacacgtccgtgtttggtagatgttgtaagccttccgtcgggaagtttaatcataatcggaggcatgtcacaaacatcacgcaaaaattcaagagtaccggtcatgtgatttgtcgcaccggaatcaatgatccaagattcaagaaagaacttactggatttggtattggtggaattgaaatttcgttctttaagcatctgtctcaattgcttccattgttcatcgttcaggccacttattccgacacggtcagcttctgttaactgagaaccagacatcgagcttgttgcagcagtcgtactttctccgatatttgcgacatgattggctgatgcaccacgaccaaaactctgttttcctttgaaagatgtggcgggtacaacagaggagccacgacccatgctggcagactgatttcgtgaggaagaagtagcattccgacgcattttctcttaagccaaggaggatatcctactagtttgaagcagttttcggcgagatgaccaagacgcccacagtgagaacaaacaattgcagaatctttgtttttggtgaggctgcgggtccttggagtagtttgaaccgcaaaactcacaccatcgtttctttcatcatgtaaacgacttaaagactttgattcttcgtcttgagtcaaggtgttgtaagcttcctcgagtgaaggcagtggtacccgagagagaagagcggacttgacggctccatacatggattcgtctagacccatgagaaattgatgcagcttgtcttcctcacgctcttttcttacttcctccattgttttagcttgttgataatctgccaagcttctccacaattgagagagtttcccgtagtatgtctcaatgggagttcctttttgacgacatgtagctaactcggttttgagtctttggatgcgctgtccatttttaactccaaaccgtttttgaatgtgagtccacatatcatgggaatcgtcgaggtgtgacattgaggtagctaagctttcatgaatggtgagtttcatccatgaaaccacaagagcattgttagcaatccaatcatcgaagtcaggatttgtttcgtcgggctgaggaattgtcccatctgcaaatccaaactttttccttgctttcaaagccaaacgtaaatttgtggcccattcatcgtagttaggtccacgtaagagaggttttgaaattagggtgcctggattgtctccggaggtaagatcgtatggtgagatggtacggcgaggttgtgtggtagtcgaggaagaggtggtaagagccaactccgtactcatcgtgagaaaagtttgtcaaagaagtggaaacaaacgaattttagaaacaactataacttgcagcagaattgacagatcacagaatcaagaaacaaaaaccctttagtagtttaggttttgctctgataccatgtcaaaaaggagatgaagatgtaaaaagacgtttcatgttgatacgtaagagaggcaatgccttatatacaacaacatgatttaacctagtgtagctatacaatctaagtgggctcgggagaggcctcatagcccaatatatcttagattatatatttacaacatatatactttgcaaatctgctataacttgacgaccaaaaaaaaaaaactgatataacttatgtaagttatctattcctacgtcaattaaccagagacttgcttaatctgtcttgataagcaaatttacaacaaacacgaacaagtcttctatgtaaattttcaaaatcctgcttgtattttaaattcaatggtatagtgagaatatttcaaaactggttgtttgggtaggaaattcattaggtgcattgatcttggttattttcaaaattcagtggtctttttggaataatacttatctcttataaaacgtaatgactaattcaaatcaggaaaagtacgttaaaactaaaatatcaaattaagcaaaagacatcatttagttggtaaatatcccagtctctaaccactgccagaaagacaaaagtagtgaccaaatttctagcatgtatgtggccttgtagagatcaaccatttcactttgtgtgtatctttttttcaacaagacatgctttataaaactctcaatcaaattgatactatgatttcgggggaaagtaataataagactgtctatatcatatttctcgcatgatgagtcacttgggatatgactttgggtttgttttgaaggattgaagtgtgtttgtgtaccccaaatagattccagttattatttcatgatgaaagtttttttttctttttgacaagtaaaagtgtgttttttctttttactttccccttcatcaatagttatattttatgatttttagatggagttttagtctttgttcaaaaacaaaaaaactgtagttttagtagtaaattgatgcatttatacgaaagttagtttttctgttttatggcttgtttacactaaacgttttttaatttgagtagttttatcttttgtagcaactagcaacattaaaataaagacatgattaggtatccatgaaaagcgacatcataaagacttgatttgaaaaattatttaaaaaagacttgatattaagttacgttgactagtattttatccttgtaattttgtctataatactttaacaacatataaaattttgtttatcaatatttgaacttgaatggtttaaacaaaacacacacaaaccactagattacaattacatgtctcgattattcttgtaattttatccgattgagtagtttttgctgctcttagacaacacgtcgtacaatttttcacctactttatctttcaatctttggaaagtgaggaaaaaaaacatgcaaccttacgactgagaccatttttagagcaacttttaaaacacatattttgcaaatttgcaaatttttcaaatcaagcactaagcattttttttgcttagattcagaggttcatgaagaatttgaatgttggaacttggaagcacttgacttaaacacaaaaaaaaataaaaataaagagctcttggcttagatcgaggaatggatccgatcgttagatcattgtggttcttataccatgtacagcttgatgagagatagagattggaagaatatgttattgactcttataatgataagctttgggttacatatgtttacataataaaatggtttcctaatctaagatagaactaaatctgtacatatcaatataataaatatacaacatcttcatattaacttgtggatcttctatatccttctacagtatagaatttttgttagtagcacgagtatacagctttaatattcataacctctgataaactttgtccattcattaaattatttcactaactatttaattgtgaaaataattaaaatatttagaagttttcatgaattacagaaaatatttcatccattattactgaaaaagaaaacaagattttaataactacaaaatttgacgtacgaaatggttggtttacataataattggtagacttgctcaatagcaaattcatagcatagacaggtagatcagtaactaatctataactaaagtagacacttctatcgtatgaaaagtagacttcgaatacttaaacaataagaaattgtttaagttgatcattttagctatttaaatttgcctgtttaggattattttctcttacaaaaatgcaagaataaatcaatataggaataataatataaaaaagatcaatataggaaaagtaattcacgtggaaagcaataactacttggtgaatatcccacttttgaactattacaagtaattgcaacatcaagaaaacaagaaaccgtgattcaatttgtgtttatcttctttcaacaagacacgcaagctttctacaactcatgcttccatcaagatgatactttgaatatgtacatcaattttgaagttttttatatccaacaaaatatatcagaatttaactaggtatcttttcaactatgaaagtgtgaaagttatttcttacagattgttttatccaaaccttatattataaagttaacgaggagcttttccaactgtgaaagacttttcttgcagttcttcaccccaaaaataaaaaataaagtaaaataactctaaaagacataattagtaaaatgtaagactaaaatctatatgggaaaagttgatatattataatatagaaacttggtacataatccaggttttattttgttacataaatatttcatagtagtgtattcctttaattaagtgtttcaatgataaatacttttttttcttttttttggtaaaagatgataaatactcttaaacgacttagatgatcagttcatatggacccaaacttggcctgaagttctttgacaacacttgcatccaactggaacgccctggcaagaagctctggataaatcggaggattggacccaaacacagtgtttgcaattgtgataacacctgcgttctggctactcaatcccgcaaaagcaactgctggaattttccccacatttacctgaaaatggatcattcctatggggaacacgaaaacatcaccggggtgcaatactttggcgaataaccggttgttatcttgattggaagagacaaaaccgacgtataatgttccttcgacaaggacaaggatctctgagccacgagggtgcgtgtgaggtggattttggccatgcggtgcgtagtctatgcggaccaatgatattcccatggtgtttagccctgggatctgatcaacattaacagtggtcacattagagccaacttgattattggtgttcccgggcacattgagacctgagaagaaaaaatcttttgcatcgactcgcttcgggtctttacaaaacctaccattcacaaaaactgcatgtagaaatataatatcaaagagtatatattatattactacgtcaaagttaatcataaggagaaaagtagagaaatagataaccggagatttctttacgtaccgccttttaggtcatcaatggcaacacagaagtcttggagtggacttggatcataagcattgacaaaggaaaggaccaaagcaattatggcaaaagggacaagagattgagaaaccctcattattgctcgctcttaatttgttatgcatgtatacttggtgaatcctcattgctttaaaatttataggacaagagcatagaagtcatatttgacatggaatggactaaataattaatgtttaatgaaattacacaagtttggtacggacttttagttacaagagagcatttaaacaaaaatgaccggtagatggaattcctttagaaagattagccaaatgttgatgagtagatgtcaaagaacgtaattagagagtccccacccacctattagatgaaatcaaatttgtattattatttaacacacgatcaaaagtttcataggaagaatataggttgcatatagtgtgaatggaataatcaataatggactgaccaaaaaaaacatagattataacttacgttcataattatataaaagtattaaacacttgaaattttaaccgactaagaaaaatgcttgttatgttataaaaatagcatatatacagaatttgttttttttttatcactacattgttttcatgtatttgggagggaccaaatttataatttataaagcgtatatatgctaaataatatatagaaaatatttacagaatactttattttttcattccatcgacacattaagattacgtagtatctgaatttcgttacataggaatatataggatacaatcggtaattaccttgtctaatgtctcgcgtctcttggacagctatgacctaaataattgacatgacaaagagtaataacctcaatttttcaccgaaaaacagagacaacaagaaagccaaccaccagcaccagcaccagcaccgccctgtttcgaatcatccgggtacaatccggtcttcgagtcaagtcttgatagttctctttttccactttcactcttcgtgtttagtgatgtctttcgctcttgttggtactctcctaatctacaaaggattttaaaaataaaccaatagacctcataagcacaactcaattaattaaaaccgatttttcagtccaaccagtctggttttaaccgagcaaattggcatggaagattagagaacgacttacgtgggaaatgcgaaagaagttgtactgttattacttgtttcggagtgacaagacttggttggagaaataggaatctgttgtcgtggatccggtttaggaacattggttaagccatctcgattaccggtttttggtccggtttccaccatggttatattgacttctttggttccagcgtcagtcggagcaattttgttatcaatgttattgttatagtagctaatatagggcgaagcagtatattcgaaattggtgagttctccagatttatacatcttggagaaactatggtctcccatgtgaatactgaacaaagactcgttcgattggatactccattcttgttttggagttaccgaggttgcaaaaaccgaatgtggaatccgatccggttcatagcctggtttagtttcctggtccatttgtgtacctgtctccagaaaaaaatatgagatatcaatcaatttatgtaatcagatttcttcaacaaatggaacatttgtaaccaatagaagagctctcatcacctttgatcaagttcaagctgagagttcttcaagagccaaaaggttgaaaagaacaatttcttcttttaaaaaatgatgtgaggaaaattgatcaaagctgtgtcctcattaataatgattatttttcgtttgataacaaacgtaattaaactaactaatctccattagagagttagttataatttttaaaaccgaaaaactttgtggatttctggtataagttataaccaaatccttgtggtcattaataatgactactttttagatatattaataaaaactaacttaactccattagagatttttatgaattaggaaaaacaatttagacttctgttataagttataacaaaaaaaaagggtttgtaagaaattttgaaaaattcaatggctgggagcctaactcggagctgttattataataatgcatcagaaagtgtttctgcgattttaatctcatcattaactctcttaaatcttctatttctatatttagttgttcttattttttcaactagttacatacaaatcttgaacttattttacgttggtcgttccttttggaagttgaaccttgtacttctagttctagtttgaaatctttgggggaaatgatttacgtatggtcaaggtcaagtattatatattaacggttttaacaaataactactattaacggttggttctaaacctagaaaaactacatatttaagtttagaacatcttgcttgataaaaaaaagtatctatattttgtttaactatttttgtttttatgtatgaattggtatattatatatggacatataaaatgacagattaagtttttctcgaaagaaaaaaaccacatagaattcattttaaaagggtttcagttaatatctatttttttgtagtttcatgttcgagagttatacatttttgggaaatcacatgatgagactttaatatgcttctcattggtgaagttttattggttcatactagtttattaacccctattacgcgggggtttgttgttatcgattttttaaatttattttttggtttagtaatcatttaaatgaggtttgttgttattaatttttaatatatatttctgtttagtaatgcaaaagtactattataatttgtttttgtttctttcacataaatatttttatataaatttttagtatcatttacgttatttaacattttattttaataagaaagaaaatatatatcggattaaatttaggtatgaaacatattgcaaatatgatgtgtcattttctcttacttatttatattatcaaagacgttgttgttaatatagcaatattaaaaatattttcaaaatataactgaaaataaactaccaaaatatgtacacatttggataaggtgtcaaaatgggtcaaaattcatgagtcgactcaactcaactcaacccgtgaaccctaatgagtttaaagttttgactcaaatgagttgatgagtcaaatgagttgatgagtcaattggtttgatgagtaaaatgagttgggttgtaatggttaatggtttgaatggtttacctaattaacccatcaagttttgtaaaattgaattaaaccaactaaaatctctaaaccaatgccaatttaaatttaaccaacacaactaaaccaatttaataaaattaatatttttccaaatttcttaaatatacaagcgatgaaattgaaaaaaaaagtaaactcgtaattttccaccaaaaaacataaacccgtgattttcctgccaaaaatttaaacccgtgattttcccgccaaaaacgtaaacccgagatttttctgccaaaaacgtaaatctataattttcccgccaaaaacgtaaactcataattttcccgctaaaaaacataaacccgtaattttcccgccaaaaacgtaaacccatgattttctcgtcaaaaacgtaaacccgtgattttcccgccaaaaatgtaaatccgtgattttcccgccaaaaacgtaaacccgtaattttcccgccaaaaacgtaaactcgtgattttcccgccaaaaacgtaaatccgttaaaagtggaatccgtaaatatcataagtttgatgataatgaattaataataataattatttattattgttttataataataattaattaaattattacttaaatgggttaatccatttaacaactcaacccatcaaattaaatgagttatgggttgacctaacccatttaacaaaatgagttgggtcaacccataactcatttaaccctaaactcatttgattataagttaagttgagttggattatccattttgacacccctacatttggacatacatatatttctcttactttaagattttgtttgctattaatcaaataattaaacagttatatttttttttactaaaattccgggttgacatctccccatttttaccctttttatcaatggcaagagttaatttgatttttgtgatgatttgaagaattcttttgggtttgggaaaaccaagatatcctcaaagacgcatatgtaagctgctgcaaaaattaaatattaactgagtaaatctaatcaaatacggatagctccctatcaagagcaataagaacaatgacacaaatgttttagtatgtagttacgactactgttctatatattggtttgttggttttttcatttatcgattttttgaactgttgactaattctttttttgtttaacgattttaaaaaatttcttcgactttattatcctttgtagacttcttttgttgctcattcacttatcaataagttttttttttattgaacagtactttacattatttctatcaacttatttttttcttatctactattgaataattcatttatatttgacaacttacttgttttcctgaagtgacttattctaaagctagcaactactcttctttttcgatgttgcaatttttcacgaagagctctccacttgatccaaaaccatttttttcatgctcgactgtgaatattgtgtccatgtagaatttgagaaaattagagatgtatatggaaagaaatgtggttgccgatgagaggcacgattccttatcgttctttcagcttgaatccgcgtatttctgatttatatcaccataccattgccaaaatttcaagcatctaatctatacactacggcctgagaatcgtgtagatatatatgaattttctcttttttaacagcatgtttttttataaattcataaattaaaaacgttaaaaaatatagttttatatagtaataatgaaattttacttttttcttatttccatatgatatactttcaaaggcttacatatctcttctttccatataataaatatcttaatatcttaatatacttttaaatgcttacatatctcttctttctttatcacatgaaatcattgaaactaaccaaaatcatcaccataaccaaaaatactatacgttaaagaaattgatcctagggcaaccaccaaccaaaataattcgttttttgttccttattattataagttaccaaacaaattaggttttgatcaaaacttacttcatatcatacgatgaaaccttcatgcatctatccacgctagctgctataagttcctgcattgaatcaaatcaacatattaaccactggattcaaacaacttaggtaacattaaacatgtaaaactaaaaactaaccacatgacgttaaataaaactaaaaactcaccatatgacgttgagtgacattgtagaccatgtgtatcaaaaatcaaattgtccggaattgtgtcatgatgttgcttgcatacacacatcctacaatcataagaaaacaccattaattaatatgtgtcgcaaaacaaccaaaacgtatcaacacaaaaaaaaaaaaaaaaagtgggttagttatgatcacttatgatctagaagtgaataccacacaaagtatttatatcatgttaagaggcagtgtacaatcgctaaaaaaggaacattacaaacttttagatgtgaattcggcccaagcatctgttgtccagtggtaggagaagatttggggaagggtgaaactttcagatccgagttcgatcctccctgaaaacaaaaatcacatttgtttgggaagtctgttaattggtccttggcccaattggttaatctggtagtcagaaatgcaggcggcctgactaccctctggcattagtcggaaagcattccaaactggggacaaacagtgtggtggtccttcggaaagaagtcctatctgaagtacttcggtgcgttttctaccgaaactaaccggaaaaaaaaaaaaaaaaaagatgtgaatttgtaaaattatcatctattcattattatccatgttacttttaaagaacatttacttttttcataaaaagataaaacaactatatttgacatttattgagatatagcattatcgacataaaatataaaaacaaatctcctttattttatctgagatatgaaattaaataaggacaacagggtattttaatatattcggccaatatatatatatcaatagaaaaataaacttttttttacccgtgatgattatgataacaatattagacaaacaaaagaatttcttaaaaagatagtatgatattgtgaatttctacagtgctaacaatgcgtctcttaacctcaacttatatattttgaaactttattcaagttgatacgattaagaacaccaccataaaactatgtcattgttgctttaactcttcacagaacaaacacatcttaatcctttatcacttaaccgtcatttgaaaaaatcctttacatatttccttcttatggtgcctctttccatcctcttatgattttgtttaaatcgtacgtgtactatcttccaaatttttcacatgctctatattttttttaaaaaatctcttactttccttgaaagtaaaagcttttttcaagcttgtcgaaagataggttagttaagttaataaactcgttatttgaatttttaagaataaaatatttgttttgctctgttttgttttctattattctaataaaaagttttaacttctaaattggttcttaactttatcactttctctcctttgatgttattgtttaaatcctcttcaccttcacgctttctaaaccatattaacatataatcacgttagattatctagcattgaaatttagcaaattttgttttctattttcttatttccatatgttacttttgaaaaattaacaaactttttttcttttttctttttattcataaatataataaaaataataaaaaaatatagaaattaaaaagttaattaaagtcatggctaaaaaatgtaaaccaatgagatggttaatcctgattggtcgtttaaaaacttatgtggacgcttttagaagcgaatagcctcaacttttatatagtatagataaataccttgcttatattcctatattcttgaacatattaagagtttataataccttgcttttaatcttgtgagctgattaatttatgtgatgattttaactatagtatatttgatagtatgatattgaaaaattaaatccgccatcatagtcgttcaatgttcgagcagaaggctgacctattgacaaaggctctcgggcgaatcaagtttaaagaaatgagggagctcattggtgtgaaggacatgggacaaggtgacttcaagtttaggagggagaatgttggattaagcttgaagaaagctgatgaagaaagtaatattaaaccgagttatggtttagttcctaaccgagttatggtttagaaagtgatcatctcaaatctctttaggagttatctaaatctatgttttcctattaggattaggactaatgctttcatataaatagatgtgtcgagttctaatatcaatgtgagagttgtattaagagattgagagagaaagcttaagttttgtgtaagtttcttaagctataaagtgagttatacttttatattcttgagttcttaaacaacaaccaaacctagattctataaactgagagtaatcaggcgttgaaaaaataaagactactggaataagagcaaagatattcaaacatcaatgtgtggtttaagtttgaaaactaccctctttcttttcatagtaaattgaaatttctaaccaaaacgaaaaaaaacacacacacaaaaaaaaaatcagagccaagagactaccaataatcaatatccaacacatttcacatcaactcgttcattcaatcttttgataaaatccctcccatgttacccaaaacacaattcaaaagatataaatcaccaaaaaaatatcgatattgattcgtagaacaacaaaataactatacacgtatagcatcaacatcaagtgaaaaatctagcatggtaagaaattcgactcatacaaagaaccaaagcaatataaaacaaaccataatatcagaactatatatttaataaaaagtccttttgatatggtgtgaccgagacttgtatttatagctaaatgtttaggacaaaccatcggaagttttactttttaattttttttatacaaatatttgtatataaaaaacaatttaacatatatttgtatacttggacgatttaacatttcattgtattaggaatataatagttactcctcaaaaccatattaacatgtaatcacgtgaaataatctagcaattaaatttagcaaattttcttttcaactttcttatttccatatgtaacttttgaaaagttaacaatttttttttgttttttctttttaatcataaatatagtaaaaataatagaaaataatatagaatttaaaaagttaattaaagtgatggctaaaaaatgtaaaccaatgagatggttaatcctgattggtcgtttaaagctcacgtggacgcctttataagcaaatagcctcaacttttatatactatagattgcataattcttcttgtgataatattattgatcttttctacaataatacaatttgttgtcttgtcttcattgtttagtccacataacaaattagggccgagcattgggatatgcgagttgggtttgggtaaaagccgattaggtacggattctttgggtagaagagtttagaactcaatatattaaataaaaaatatatgttcggttttggttcgggtcctttcaggtttaggtcgctttgtatatagatttcagaacaacttaataaattatcggataaatacccatattttcgggtaaatactcgcatttcagagtaaaagtttgggtattcaagtaaaatattaagatatttttgggttcagattttcgagtataggagtttaggatccaataaaataaatctaaatttttattgtgtttagaatctaattttttgggttggttcggttcagatattctgatccaatttttttccccagccctagaacaaatcataagtgcataacgataatgagcagtaaggtacttagtagtttgcatatatggacgaaagatattatttgtatcaagtgtggtacaactatgggcccacgaatattcagtatccagttttgtacaagcccatgtgatccttgcaggccaattgacaattttaaatatatttatagcaacaatacaaatatatatttttcagtcaaatttgaaaattgcaaccgaaactagagagcagagtagagatcaacaactggatcaaaattttgaatttttataaaatctatagaattaagaatatataatatgttaaaactgaatttactccaaacctatattgtacaaagctgattagaattagtaatcattttagttccacatttctagcttttacgaggctattcggggcaactataactggccctatttggctcatcagtggcccattaaagatatatatgagttacattcataattttaaggaaaagaaatagttggtgtatgctcctcgtaatatcatcttatctataacaactacaagaagcttacattgctgctactaaaatacaaaattgttggaagtcatttttcaagatatcaaaatggagtgttcgctgcagaaacagcttttcaacaacggagataagctctttagttgtaagctctaacactttcctccctcatattcacatctattagtgcaaatcaagaataacttaaaccaatccattacaattcttccatttctttgctttcagctcgacataaccgacgggtttcgatagaacaagtccatgtgacagattctctttccgtaaactcgataaacctgtttcataaacctatatgttatccaatatcatccatcatcacttcaagaaagagcaaaagccattttagtgtaagtgttggttaattgcaattttgtagaatattttgtaagttgataacatttaaaagattatgttgcataatttttggaaatttgtgatttcagtcattttgcaatcccggaaattaaattactgaactcatgaggttaaaggttaacttagtatgatttaacaaatgtctagttaatgtgattatataatataggtttgtgcaacaaggagaagaagggtgcattcgaactcggatacatacgtactgttagaggcaggacaagatgagcagtttgtgacggaagacgaactcaaggctaagctcagagggtggctcgaaaattggccggtgaactctttgccaccagacctggctaggttcgatgaccttgatgaagccgtagatttcttggttaaagctgtatgtgaactagaaattgatggagaagtgggttctgttcaatggtaccaagttcgtcttgagtaattaaataaacgtattatgtgttttgaatgtaacaagcacatctgtttaatctagtagtttggtttgttctttaatagataattgctattgttgtggatgtcaaaatcttgtgtgttggttttaataatcgtcaaagagaattagggtcatagctttcgtaaataagaagacactactcgaactaaacaatatgcgagtttgattctttcatctttgatagtcggcactaaatatccaaataaaaataaagattttttagtctcacctttaaatttgaaatttggttttgtgatttgaatctcttcttttttttcgtcaaacatcattttattaagttagcggacggaggttttcttctaaagagagtcaatccagagtcgatgtgcttacatggagaaaaaagattctcgtactctgaccttcttagctagacaatcgacacaaatattgttacaacgaggaatcttttgtgcttaattagctggtgcgaaattgatagcttatcttccaatttcccttgctttgggggatacatattctaccttgtggaacttatgacacttaatgggcttcgtattggattggatttgtgaaaaattgacattgcatttgcccgttagttcttcaggcgggatggtctactagtactagaagaacgaattgtagatgtagattctgtaatagttggctgttgggataaacaaaaactgcatccgatcacatcagaagactgagctgcatataactgtgatttttatgtaaataatcttacaaaagttttaataacattaaaattcttatattgtttattttgggggacaaaattgtgttttaaaaaattactttatatattagttaatcttatcgaaatcttagttctgattttttcagttcctcatgtaatattttaaataattacctaatttaactaacatattcataattatcaaattaattgattaaatcatagtatataattttgaatggggtttagtgttgttaatgcatttgattgtgtttatatatataaatctcagaaagatttatgcacccaataagtgtaggttaattttatagtaaaaaatgaagtcaattttatagttaagatgatcaataatatagaaacttttaaaataaaataataagatttgcaccaatagcgtgagagagaaactcaactttgatatattatgacttaataaatgacgttaattcttatgtaaattaagttataacatatacaaggattcataagtggtcaaactgcaattaaagtattttttaaaaaatgtagcaaactaaaaataaactattgtattttgagaagacatgtggcagaagtacaatatgcacatttatatgtcattctagaagaaactttattttataagattaataactgattaaataacaatttaccatgtaaatgtaatgatacagtgattaagtaagattctactacgcaaaggtaaccttatttaacacacgttaattactgtttggaagatattatggacggagagaaacaaaaaaatgttattagttgtggctctacgttttttttgtctttaagccttaaaaattagaaagcgtgtaaattgtcagaaaacttgtgtggtcatttcaaaacaaaacaacaaaaggtagtaaataaaaataacaagatcgtaatgaatgagcttggtataaaaacaagaaaaaaataacgaagttgggggtagttgcgttgcactttgatttaaattctattcaaatggttattgtccaaacataacactcttttctatatataggtagtctcttcaatgtcacaaataatcgaatcacacaatattaaacactaaattattcacagttttcttggagaaaagattcaagtacaagtacaagcagagaaagtgagagagagagaaatgatgggtagcttgaaaataatatctccaccacctccggcgacaagattccggcaacgagtaacggcgaacggagatgggtttccgacatttcttccgaaggagatacaaaacataaaagatccattcgcaagagctttagctcaaaggattgtacgaattcctgttcctcttcaggttcttcttctttttctctgtctcttgcatgagtagctaaaacagagaatctttgtccttagtttcttgaattttgtgtaagaagatgaaaatgtgtttgcagatgggaaactttagaggcagtgtaatgagtagctgtatcaaaccacttgttcaattacacgacaaaagtcccgttgttcttctccattgtttcgacaggtattttattttttttactgacagtataattatttttatgaactcactgtgtctgaattttacttttgtcggaattcttttgggcttttagttcttgtcttgaatggagacgtacttatcctctgcttgaacaagcttgtcttgagacttgggctattgatgttcttggttggggattctcagatcttggtaagattttacattttacacaaattaaacaagattcttgataattcgattttagtacatatgaatgtgtgattgtttcttttcacaacttaatgacactgtagagaaacttccaccatgtgatgcagcatctaagcgacatcatttattcgaggtcagtactatttattaattatactacaagaaaacaagcgaataacaacgaaaaactgtgtcactaaatgaatgaaatcagtcgatgaatcatattcttttggcacaaataactatacactaaatggactattatcgacgaatacaaattcgtgtcgtcgctaaataacaacagatacaatgttgtggcaaatttagcattgatgttagaactctctagtccgtcttgaatttcctgatgattttgcgatatattttgttggttggtaactaaaaattgatacaatgatgaattagcgactataaggttggtcgaaaccaacaaattatttacagaatttacaaggcatagcttatccaatggtatggattttccctgtggttaattctttgttctttgctttgaattttcagctttggaaaacatatatcaaacgaccaatgattttagttggaccaagcttaggagcaaccgtagctgttgatttcactgctacttacccggaagctgtaaattttcagtttaccataatcaaactcttttggattaaacccatcttaatatatacttcactaactaaatttgattatttccgtggttttcaggttgataaattggttcttattaatgccaatgcgtattcagaaggaaccggtcggcttaaagagttaccaaaatccatcgcttacgctggggtttgtccgtaaagtacccttctaatactcgagatttaacgtttgtattaatatcattgttgttctttcaggttaagttgttaaagtcattccctctgcgccttttggccaatgtcctagccttttgttcctcgcccttatccgagaacatagattggactaatgtaagatcaaatctcccttcaaattttcttttacatcttcatatatcaaagtgattttagaaatgaatctttttttgtgtagattggtcggttacattgtcaaatgccgtggtgggaggatgctatggtcgattttatgattagcgggggctataacgtcgcgtcacacatcaaacatgtaataaaaaaatttcacatagtttattcaaatgtaacaaaaggtcgaatcagcttatatatgttctgacttagtttacgttttttatgtaacatgtgcgcagattgaccataagacgctcgtggtatgcagtgagaacgatcagatagttagcaaccagctctcagttgtaagtttcctcttaattgaaacattgaaaaactagctaaaaagtgtcttaatgtcatcaacaaaatgcagaaattgttgtgtgagctagcaaatgcggttttgcgggaagtaccagattccggtcatcttccacatgttgagaatcctaaacacattgtgaagctgatatcagatttcgccagtggaaagctctattgattccatatactgtaaactctgcttaaagctcattgattggctacagaggaaggagttataacttatatattattaataaaaaaatactaattaatagataagtccatgatgagcctgggatggctatatatatatgtattttgtttatgaacaaatgaagaaatagaaacatctacttttttttatcattttcgaagcgataaattataagagtattgatttaacttcaagattgtaggaggtatgtggatgcgagatacgctaaggtgattttctccaagaaaatgtaatgaaaaagttttgtctaaactaaacaaaaccaaactcaaagatatgtttgaattagggaaaatgttataaaagaccaccaactttttacatttgttctacttaaacctctaagtttgatccaaatacaaatgtagtgaactgaagacaattgtttgctctctacaactctctagtccaaaaaaaaatttattttctgatgcttctcctctattatgtaagtgtcaatattgttactcgatctacgctatcctcggtaataacacttccttaatccctcgagctcggagacttaccagtcgagggttaatgctcgatttcagacgttttgacaggggtgtatttgaatcaaactaatgatttatttggtaaagagtcatcaagtagcgaattcaattattgaacagtgtttgtgccttaaaaaccggagttttgtttgcacaattacaagcttcgttttggctgggctcatgtgtgagatttgataccaacataggaggtgaaaacttttaagctatatatttaggttaagtttgtgttagtttttatggttggtgtattttttattttcttaacgaaaacacatttaaagttgttagttatataccaaaccggaaattaactttatttgctttcgttgtggttgccaattgtagggtgatgtagaaactgcttcatgaatcacctcaaatctttcctcacatttattgaaacttttggtagatattaaaaagtaccatgtactgtgtatggaattggttcatggatcatattaaagacatagcattgtccttttcacacttaatttggcgatacagagattggaatcttatttaggcttattaatagtcaaatctataaacatggaaatattttgaatatttaatgaaatataagtacattaatgaggaaccaaagcaaaaccaaatcctatcatgaacatttaactgacaactttatgctgattaattatcaaatctaacaaatattaatataattaacaaagtttaaggaaaaaaataagaaggataaaaccaaatcttgttgggaaaaaaaaaaattccaccttcccagctccttcctttggtatataaaccccacaatacccatcaaccctcgcaatagagaatatttatataagtcacaatggaggtaattacttgcttggactgcaagaaacgaaccgatacggtaattgattatcgatctggggatacaatctgcacagaatgtggtttaatcctcgattcccactatattgtcgattcttttgaccgaaatatctcatatatgactccttctatcaggaccaaacacaaggtcggcacaaacgttctcatcaagaaccctaaccctaaagacaaagcctcctccataagcttcagggtctcatcaccatcttgctgcagtcattatgctcttctagaagtagaagttcatcacacgaggttgatcgaggagctaggttttaaaaaaaaaaaaccaatttgattgtcgttacttattattatatattcattattgtttgtatatttaatcttgatttatttaattaagtgctcgtgagatttgattgtcttgcagtttacttgagatagatgtctgattacgaaagcatcatctctcaaacttcggattttcaatgatctaccatgtctttgatgccgtgatgaagtctcttttggaggtgactcatatattattttaactatctaagaattaatttgttttgagttgtcttaagtttatatctactgcaaattggggcttatgaatctatatattgttctacagacatctcagtagccgcatgagtcgtggagcctgaggatcagcaatcaaggttaattaccgaaaaccgggaactaatttgctaatttcacatgagtatttaggagttttcttacatcttattgttctataaaaattgatatgttccaagaaaatataacaaattagatttattgtatagttggtgaaatgtatctttttttttggagcttttacagaaattggtactttttggcccaaaaattaaaaattgagcacttttacaatgggcttatgggataaggcattttctgtgagatggattgaccaaattccccgtaaaattatttcttcatcatctttttcttcgacaactcacaaacatctctaccaccaacacccatgttccgattaatccaataaactcaattaaatacttgtttatggaaaaaaactaaaccctaaatggatactatatagtgaacccaagggatccaatccaaaaccataatcaaatctagtaaaatttcaatagttttctttcttccgtttgtaaaataaagtaagagatgatcaaattgtgattcatattgacatattaaaattcaaagaaggtatggatgataaccctctgcttcgtcgaagaaaaagattgaacacgcatagatctgaacttcaaaattttggttgaggtgatggagaagcaattgagcataaatgtacataggtacctcgacgtgcagaccaatccttttgctagattctattcacaagacatgaggaaaggctttaacattcgtgacaccaagtaatgtcctcatatggatgataaaggaactcagcatcgacctcttagaaaaaataaagcttcaattattcattgaaacaggtttctctgatttgggagactcgtaggcgatgttaacgaagcccgaaaagaagcttgactctttagaggtatacgaggctacttttgataatgaattgggaaaagacaaaaaaaccacggaatattaaagtcagtttaagtgagggtaaaatcgtaaaaaccttgtagaaagaagtacctaaatcaataacgcatatgagatatgcctatttcaacaaaagcatagactttaatgtgtcgatcccataattgatcctttttttgtcatgctaatcttcttagtataattgatgaaatatatctaatactaaaaatcatgacacttgtcaatccatttataaaagtactataaaaccaaaattaaaattaattgtttaaaaggttacatatacgtaacatttttttgggggtaaatattacatgtactagatgtacgtatatttaaatagttttttttcttcaaataaaaatcgttggactaatttaattttggagtgaacaaacctactagatataggtaagacgtctgagccgaagcttaagtggccaagtgacccacacagattgtttgtacaatgaactcaaaattttttgaccaaaactcggaattatgacgagtttacattatttacccttaaaccgagacattgtcgcatgaagaatcttgggtttagaaattttaaatttttttctttctaagaaagaaaataaagacagacatataaaagaggaaaaagcaccatgcgcgttgtagtataattggaatggcctatgggtttcaattcatattgaaatcttttatgaaagttttaaagagagaggtcacatggtgtagttaagcaaaagggactaacaagtcacaatcatcttgaccatgaaatacttacacgatacatatatgcatatacacatgtacatacaatatgtgcatgggtgtgacaaaataaaatgtagttatttccgatacgtatatgatatatcaaatttgtaaatgagtgacatcctaaaggggatatacataaaacacacctcacatgcatcatatatactgatgtaccgtgtacgtatctcttccttctttacttttatgtcaactttctatctttagttttgtagtctaatacttaagtagaaaatcttttgttgtttttcattttaaggtttgttttctctccagttgctacaattatttataaaaagacttaaaattcaattcaaaaaaagaacataaaaaggaatactgttctagacttctaattctagactatatcatatggtttaaaattcagaactgattaagctatcaatcactaaaagcacctaaaaataacaagaatccttaatttgttttgaggaaacccataacacatcatccatatataagacattttctaatccgattttctttttttgacatactctaatacaaatatacaattttacattttataatttaaaatgataattcgaatttaatttttttgaaagactctttttctttttacaaatttttcatgttcatttgttgtcgcaaaatcaggtaagctttgtaactgatggtgaccgatttcattcttttcgttcgtcaaaatcaaacattatacatcgtgactacctaaaaaccatattaggttcaaaatacgtaacacattgaaaaaagcttaatgaaaaacattatcataatttaatatgaacattatgaaacaaaattatcttccttctgatcagatgatccataaatctcgattaacttttgcaacaccacgacttgtcccctaagtctgacaatgtaatccgcagtttcttgaaacaactgttccgtctctccaacactggaatcttcttccacgtaagcatcttgacgactctgctccgtcatcttcgacggcggaggaagaagactcttaagcgcctgaagcttctccgagaacttttctcctccacttgttcttctgtttccaaatttcttgcttgttcttcttcctcctctggatctttgagttttcaagattctcatcgtgaagaacaagaacataggatttagattctttgtttgaagaggaaaagaaaaaggatcggggtttatgtacgattggttattcgttaataacccttaagttattgtttattacgatagtaccactggtggtggtttcattcctttgattgtcgttttgtacttttttcttggtcccttgtggacttgtgtggggtatttcaagtcaaataaaatatctcgataatatcttaatatcacgtgctcgtcaaatatctctcagaggaatatcctaaaatagttcttcaattgcaaaatataaatataaaaatcaaccataatattttttttcagaaataaattttacacattgtttaatctttagctattgtttcattaatcgaattgtatattgagagttatgaaaatcattcaaccgattaagtagccaaaagagaagtggatgaagagtgcgcatttgccatatgacagcaaaagcctgagccttctgtgacggcacatgatcatatgttcgagcaatatcattttattttccaaattttgcccctcaagaactttatccgtaatccattatttactaacatatgttattgaccagtaaaatatgttagtaaataatggatgacggaagggcattttggtacacaaaagtgacataagtagcgtattaaaatgtgcttcgtagagaggtgttgcatgtgagccagcaaaacctcatttgaaatatgagaaccagggaattgaaccgaaaactggtttggttaaagggcatgtgaaggcacatgggagaaggagacagagaaggaaggcatgcatggaagtgaacagagagcatgttctgtatattccctgcatgcacataacttccttttcttttaatgtataaataagattatatattacataacatatttaacatcttacaaaaaaaaaactaaaaatacttatacattataacatggttttaagattttgattagtttaataagtaatctaaagggaagtggattttctttttataatttcgatttggtgcacatggtttactatccagatttcaggttaatagcatgtgtttagctgttactccacgtgactgatttgtgtaattgggtacattgattaacaattatcaaattttgcaattatatttatgtataattaaggactaatgaacaagaattaaagagtagtgcaatgtttctaatattagccttattgtcacgtaatactgtatatgtttagaatctgatttagttgatcattttataaccaaaatattcattgctaaacgtgctcgtacatgttttacacctatacttgaattagagagtcgaacattccatactgcactgataaaaaagttgattccaatttttatttgattttttctctaaatgtacatggaaaatataacaaaacaaaccagttgcaccttaatgtagacaagttttgttaatttaaaatgcaaaccatactgaactactgtatattaaagagttaaaccaaaatatggaagtatatatgggtttatcagaacaaaaggttttgggttttgttttgtttgtttgatgaaagtggaagtgagggacaatatgatatagggaagggacaatctatttattttattttgtcataaataagtaaaaatattagaaagaaatttagatgttgacgagacttcttttcgtcccctttgtgtttccttcgacactcaccattttgtataatcaaaattagtaagcatctgattatgggactaggaattgcctatacttttttagtgttctcaaacaataacacgttgtttcacttttaaccattgaaatctggcaaaaaaaaaaaaaaacagaaatatacatatatatatcattgacccacataaaacatatatatagacacaaatatatatatatatatatatatatatatatatatatatatcttattatataaagtatggttttgaaaattactaactcataggattatgccatgtgtcaagtctatcgatcagatattgacacgtgtaagaaaataattaactttttccttcttaaagaaatagaaaactaaaaaataaatcattattaacatatactaattcatatgtctatatctaagatatattacattttatttttcttaaccaaaaggaaaattaaccaaaaatatttatatatgttattggtcaaatttttaatgtgtatggtattaacaatttttttattattattaattatgttttgttaattgttaataatttttaatattaactaagatatagatttgatctcatatatatattattttgacatgaaatcattatcaagtaagatgaagtgtgtagaattaaaatcgagttttttataaaatacatagttaaattgtattacaaaattgaatatgtaagataaaaatttattcttttcttctaaatactaaattataataaagaaaagtgtgtaggttactatttacacttcaaatatcatcaataagattgaatgggtataataaaataaaatgcataagactactattttactattcaaaattatatatcaagaacaatgtatagattattattttattattcaaaatttaagtattatcgataaaaaattacagttacattttacacccgcctatttaggcgggccttatcaagtatatatatatatatatatctttaattagagtctttttcctttgtttttaatatttgatgttcaaagtttttgcgtacagattagaaatcatttaatttttgtatattttaaaccaaaacatattcgactaaataaaaaaataatcttcagaatatcaatcgtaaaagtcaataaaaactaattacttttgcattaagaaccaaaaatatcatctattttcaagagagatttgcaaaactatcctttttttactatctttttgcaataatgcccttttatattgtttatttttaaaaatatctcttcccttgaacagaatgaccaaattaccctcatttaataagaacatgtacttggaaactttcagtttcccgccaaatttttggcgccaaaaaaaaaaatttccgtcccgccaaaaaaaaaaaaattccgccaaacattttttcccgccaaaattttttctcgtaatttttttttcccagccaaaaaatgcttttaaaaatccttgtaaatttttttaaaactcttttaaaaaaccttgaaaagttttttaaaagctttggtagttgctaaaaagcattgtaaatcattttaaaacctcttaaaatctttataaagcctttaaaaacataggtaaatactttaaaaccccttttttaacctttgtaaatcattttaaagctttttacaatagttttacaatcgttttttaagcataagtaagtagcattgaatgatttacaagagattttaaaagcttataaaagggtaaaacatgatttacaagggatttaaaaaaggttatcatggtttacaatcgttttttaagcataagtaagtggcattgaatgatttacaaagaattttaaaagcttataaaagggtaaaacatgatttacaatcttttttaaagcataagtaagtggcatagaatgatttacaaggatttttaaaaaaagttagcatggtttacaatgttttttaaagcataagtaagtgacattggaatgatttacaagggattttaaaagcttataaaagggtaaaacataatttataatcgtttttaaagcataagtaagtggcataaaatgatttacaagggattttaaaagtgtttgtatggtttacaatcgttttaaagcataagtaggtgacattgaatgatttaccagggattttaaaaggggttaaaatgatttacattcgtttttaaagcataagtaaatgtcaaaaaatgatttccaaggaattttaaatctttgtaaatccttttaaaactcttaaaagtctttacaaacattttttaactcttagaaaaagaattgtaagtatttaaaacatttataactctttttgaaccattttaaaactctcaaaaggttttaaaaagatttacaagagttttgaaaggatttttttataaatttttttaaaatcttttaaaaactcttgtacatcttttaaaaccctttaaaaatcccttgtaaatattttaaacacttttaaaccctttaaaaatctttaaaaaactcttgtaagtcttttaaagccctttaaaatcccttgtaaatcttttaaaacccttttaaaatctcttgtaaatcttttaaacccttttaaaatctcttgtaaatctttaaaatattttaaaactcttttaaaatcccttataaatttatttcccgccaaacaaaaaaaattacgggaaaaatgtttttgaatttttttttggcaggaaatgttttttcgaaactttttggtgggaaaattttgacgggaaaaatgtttttggaaaaaaattttggcgggaaattttattttttgaaaaattttggcgggaaattttattttggaatattttaggcgaaaatattaatatttcattttgttaacctaaatcaatttacaaataagggtaaaatggtcattaaaaatttaaatagtgtataattgaaaagggtaaatagaaaatggtagaattgaaaaggggtagtgtgaaaagtgcattagaaaaaaaatttctaaaaaactttatgcgttatttttggaagtttaaaaaaaaaagtcattttaaaataataaaaaaaattagtgtcatttgtgtcaatctccctaatatatatacatgtaaaattacagatttagaaaaaataaaagtattataaaattttattgaagtgtcaatctcccttttaaaatctcttgtaaatcttttaaaacccttttaaaatcccttgtaaatctatttcccgctaaaaagaaaatttttacaggaaaaatattttcgaattttttttttggcgggaaacttttttttcgaaatttttggcgggaagttttttccgaaattttttggcgaaaaattttattttagaatattttaggcgaaaaatattaatacttcattttattaacctaaatcaatttacaaataggggtaaaatagtcattaaaaatttaaagaggttataaatgaaaatagtaaatagaaaaatgtagaattaaaaaggggtaatgtgaaaagggcattagaaagaattttttttttttttttttttttttttgaaaataatgttaaattatattccaaagaaaaacgtttttacaacaagtgcagcttggttttgagaattagagctgagaatagttttgaacaaaagaaagaaacagagctaagagattaacttcttgactgaaaccaaacttggagacttccatcataacgcttgtcccccttgagacagatagaggacagctgatttctaatttgtttatctatccaaccaacgagttgagatgctgtgttcggaggctcgccgtgacgcctaccattccgctccctccacacaatgtagattgtggcttggaaaacatagcggcggagaaaccattccacacggtgatgctgagagtttgtaatggcttcaattatcgattgccagtgtgaagtgtactgcgttttgaaaattcctctcgctaaatctacccaaattacagaagtgaaactgcaagtaaagaagaggtggtcccgtgtttctagagtcccttggcaaaaaatgcagtctgttgcaatgccatttgcccaattgatcatacgatcgcctgttgggagtctaccatgtgctgcaagccaggagcagaaagagtatttcggggtggcatgactgaaccaaatcaccttatgccatggaaccctagctgacgtagaacgagtatgatgccaagtatctctagtagagaaagtagtcctgaaaacatcagattttcctctccaaaggaccttgtcttcagtttccgttctagtatcccaagactttttcaaagcatcctctatcacgttgtagacatcgtttctatggcggcgctgccgtcgattcgtccaagcctcctccactgtcattctgcgacttatacccaaatcgatgagtccacgatcccctgttctctctaacagctgtcccaagtcagaccaattatcataccaaaaagacgtttgcttgccatttcccacttcaactttgcttagagtttttgcaacctctctgtatttaagtagctttttccaaatccacgagccttgactgacagtttgtttaacttcccaaaaagaagcattcctgagaagatgttgatcaacccacttcacccagagagaattgctatgcgagactattttccacaccaactttaaacaacacacatcgttagcttctttaagcgagcgtaagccaagcccaccctcatctttcggtttgcagaccatgtgccatgatatttttgctttattcgagttcatctccgttcccgaccagagaaaagcagagcacattttctcaagttcgcggatgcattttcggggtaaacgaaatgctgctaaccaaaaattgcagatactccaaaggactgaactaatgaggtttagtctacctgcataagagagaaaacgagaagtccaagatccaattcttttcctgacttgctctagtaacggtagacaatctgttgttgaaaggcgtttagtgatgaggggcaggcccaagtaccgcactggtaattggccactggaaaacggaaaccggtctgctacttcattgcgagcggtagctgagagtcctgcgaggtagacagttgatttttctaagctgatacgaagccctgaccattttgcgaactcgtcaaagaccttaataattctttctattgaacgaattttcccatcagatagtaccatgagatcatctgcgaaacttaaatgtgtgaggcccatagtcttgcatttcggatgatacccaaaatgtcttgcagctgctgctttatccaacatcttagataatacatccatacatataacgaacagatatggagagagtgcacatccttgccgtagacctcgagagctctgaaaataacccgctaattcaccgtttacttgaactgaaaacgaagccgtagtaatgcaaatattgatccaatgaataaactctcgtgggaaccccaaaatagtaaaaacattaatgagaaacggccattgaactgagtcaaaagctttggagatgtcaatcttaatagcacaacgggttgagatggtgtctttatgatagtccttgacaagctcagtagcgaggagaaggttctctattaataatctgtctttaacaaaagctgattggtttcccgcaatgaactttggaagtactagcttgagtctatttgcaatgatcttagatataactttatagagcacattgcagcaagagatgggtctgtagtccttcatttctcttgcctcggttttctttggtataagagctagaatggtagaattaatacctttaggcagaaacccttttgtgaaaaaagattgaaccgctaaggtgaactcgtccccaataatctcccatgttgccttaaaaaactccgaagtatagccatctggccctggcgatttatcactaggcattcgaaacaaaaccttccttatttcctctgcagtgacaggccgaattagactttgctgatcagcatctgaacatctaacaggaagtaactgctgtagttctgtgatcgtaacaccctcaaaatcattaggaatcagttgcaggaactcacggaaaaacctctctgcttctgcttttatttcgtccccttttgttttcacaattccatcattactaagaatctcacggatagtattatgagcttcacgagctgcagctgctctatgaaacgcctttgtgttttgatcacccacctgacaccagtgaagtttcgatttttgcttaagatacttttcttccaaaatagccactcggtcccatctagaataggctgcattctcttcttccatagccattgaagagggattggttagattgacatgttgctttgcgcagagaattttataagcctcatttgctttcttggacagatttcctaaacgatctcgagccatactccttattttcggcttcaaaccctttaaattctttgagaaacgaaaaagggttgaagtagagagaattaagggttcagtatccttccagtaagtgctcaccatcggtttaaaatcctccatatcagtgagagcattgacaaacttgaaaggctttaggccctggactttgttgcctgcttcactatttaaactgattctacatctcaaatgatctgagcaacctcctgcttcaaaaacactataagattgagaaaaagtttggttccaacaatcattaatcaataccctgtcgagtttcttcatgatgagaccatgctccctcttgttacaccatgtgaatagtggcccctgagctgccatatctgttaaagagcaataattgatcacctgttggaaatctcgcattcctggagttaccatagggtgaacaaaagattgtgagtgttctgctatatcaagcgtctcattaaaatcacctaacagagtccacggtttgtgtctgatgatgggagaatcataatgatccttcagttctgaccataaaacttttcgctcctccacgtagtttgaagcatagacaaaggaacagaaaaattcatcctgtcgatcttctagcttcaccgaacaagtcagcaattgacaactcttataaataggactaagtcgcacattcttacgccatagaacccaaatacgaccccgtctattgtgctcatagttagtgagaatcgaccaatccttgaaaagcttaccaacaagctgcgaaaccttactctcctttactctcgtttcaaccaagcaaccaaactgaaagttattttcctctatccacttcttaataacagaatgttttgatgatttgttaagacctcgcacattccagaagaacccagacattaacgatttttggatttgtttcttttactctgatctttaggaggaatcctagttgattgagtagaaggaactgatatcactttgtgagctgttttagatacacggggcaaagactcgcgcaacaacatctctgatgtggccggctgtgtccctattgaaacttcttttgatgagattacaccaacatctctcgtatctgtcgttgaaataacatcgtcatagtctcctttctcacttaaaacagagtaagcattcgataggattgaaacttctccaaatctcagctctttgtttttatttcctggactgcggtgtgaacctggaaatttttctatgttcaaacaaacatgtttcctaaaacatcaaataaaaagaacagaggatattaaattaacaaaacttatctactttaaggtcaaactgattggttttgttatatatgtttccatgtatttgaaaaaaatccaaaaaatccaaattaattaattagaatgtttaaggcacattttcatttttttgtagtcgaccacatagatgttatgaatgaggtacatacatgagtttgtttagtaatgatagattgtcttataattagaactatcattatcctatccataaatatctatattattagtaaaacctgataacatcaactaataaaccaaattacatttcagtaattaacaaagtcaataagaaaagaccacaacctattcgatttcagtatacattcgattttttttttttcaagtatcttctagctttagatatcagaataatcgaccatgaatccaagcaaacaaagttttaacttgaagctttaacatagattaaattgaggggcatgcgactatttcaaagagaaattcagtgtagtctattatatttaatattgttttctacattcttacgttctttaattttgtattacttttttgcacatttttttgggctgatgagccacaatagtttttaagtaaataaaaaacaacactttaaacaaattattgcatcttgtattacttaaaaataataaatatttcttttatcttttttatttttccaaccaacatactcttactcaaaaaaaaaaaaaaaaaaaaatcacacataattacgtaaattattgtgtgaacaaattctagttttaataaatgacatttaaactaacaatcaccataattcttagtgaataaaaaatctcatttttggactgcagatatttttgtttaattagtatcgagtattcaaataccaaattgtttttataaccggaacaaggaaccatcatacagtaggaatcaaactcaaatacacaaaatcagaagagtgcaatctttttcccctaaaagttgagctaactactggtactacactacaccctacaccctaccactatagaccagtcattaatgatcagattttcaaattacaatttaataaaacataaaccccatatagtttaattacatgtaagtgttgcctatctataaaaatcattttcttttctatatattaagaagtatcgtatgtaagtgttgcctatctataaaaatcattttcttttctatatattaagaagtatcgtatgaagaaaagactcaaaattcacgtcaaatcatccacttttttttccctgaaaatatctactttccatgtgatgtagttttcttgttcctttcgctttattccctatgttttcttataaaaagaaaaaacacaaagagaaggaaaaaagaagtatagagtttttttgtgtgtggggaaataaggtatcctgatactaaaacacaagtcagtgaagagtgtgactactgatcccacaatctgacctctttgctcttgtctcccatgctcgtcacttatttgtcctctttcacgtttatcatttcgttttattcaactcaatatatatgtcctcacaaattgtcatactccaaacaaaaaaatacggcataatcaataacatatttgagttaagtgataacgtcattcttaaattaaaagtgtgtaatattaaaataagttttgtggaagattagggttaattttgcgaacaattcttgggttcatccctaaagatgttttgaaatatttcattaacatcaaaaaaatttcttttcttatttacctcaagaaactaagattcgaatataatttttgtttctttttgataatggcttcttataagaaaattcatccactttttatgaagcaaatctatatattttagcaaagtcaactagcattaagcttcttaaattgatgagagaaggctcatagtctaatgggctttgggccgggccgttgaggtctccattttgttttttagtgtctaaattattttcgtgttactcgactaaatatttaattgggcttctatatgggctaaggcctttttacattaccaatttaatttcttatttcatttatcagattaaatctttttagttttcataatgtttctttttttacagcctaccaaaatcctaatcgatcaaatgaaactttcttcaatttcctcgtaaaatcatacttaatccgatccagatttcaactccagatcatgtttcaaaggttagttcatttcccatatcgtcgatctacataatcttcatcgttctgattagttttgacgacgatgatcgtttcctctttcgatctttcgaattttccctgtagaattatcttaatcgtctcgaattcaatagaatttgatcgatttcagttttgatttgttatttttcgatgttccggttatcgtaattgatcggttattgaaattgaagcatttgtgatctcaattttgatttcagtagttgttgaagaatgtttagtgaagaagtattgaagaatgtgtttccattgctagaaggcgaagatctcgcgtcatgtatgggtgtttgcaaacaatggagagatatcgcaagagacgatttctactggaaatgtcaatgtgcaaagaaatggccatcggtttgcaaacggcacaaacctcctactgaaacatactacaaaatgtatcaaacgtttagtaagcggcggttaaaccgcgcgcttcctcctccgcgattgtcgttcgaaaacttggagtttttcatcgatatttggtcggaagagaggctcgtgttctcggggttaatacccggtgttgcgttggaaaatggtatcgaaacgttaccgttagggatcagtaatgttcttagaactcatcttggtagacctgattacaagatggttgttcctgctgagcctaggttcactattccgttaaaccagtctgttagtgtctctgttcttgtggcgaggaatgattctgataaggtcgctcggataatcaaccggtctgtgttcgattatatagaccggtcatcgtatagagcgcttgcgtttgagtatcttgacttgtctccttgttatccttttatctccggtatacgagcttggatctctttgctgtttatggatgttgaggatatgaatgatgatgggttactcgatgttttcgggattcagttggatttcaatgatgttgctgacactaaagaagaggttttgtggcttctagatatgcttgattggaagtgaaaacaagcttatgatcctattaaagctctttctcaggtttggaactctatacataatcatcattttgctcaagaactaatctttcacaacttttggtcattttctttaatacgagtttgatttgttttttctctctttaactatatagcttttgtttgatcatttgctgtaattcgattttttttttgtttataacgaaaattggatataagaaactgaataatttcaaccaaactagatattgaaacgccatgtcaaaagaactcaaaacagaacacacatttttgcacttcttttcaatgttttggttaggggtggacattccggtttaggggtttggattcagatcgaattttgtttttcttttctcaatttttttcggttttgtaaaaagtgataacacatgtaaaaccatttgtacttcggtatggtttcagatcggtttgatgcaatttcggttggcacggttcaacttttgataataaaaatttatagaaaataatcaaacagttatttatttattatttattatttagtatggtcatatctattttcagaagatatataatttataagtaatatttaaggaaatttagaatatttggttaacataataaccaaacagtttataaacaaatatcggttcaattttgttcaactgttttgggttggttcggttcatgtagtttcatggtccatctctagttctggttaaatctttagattgaaaccaaatgcaggaagccaagaactaaaagtatcataaacaatatttcatttatttttaattattgcaaccaatacatctctcttagttgtaacttgtaagccaaaactaaaaaaaattcatatcatttttcttaaaagttagtctttccatcaaaagtctgcccaaatccccaacttgctggcatcacatcagtaaaatcctttgtaatcccatcactcgttgtaacccttaatgatacactttgaccggttagattaacattagtagtccaattttgtccccaatatctgctcattactacccacgcggttttgcttcccttagcagacacggctataatatctcctgctcctcctacattgtacggcaagatcgttaagatattagggtttcctttaacttcaaacttgacaccaccggttttcgcacagggaacacgtctgtatctaaccgggaccatcttggctttgacctgagcgatcttgatgaacattggtaaggagagatcaaagtgtttatttggtaggtagcaccaagcggatcctggtggacataaatctgttgctgtgatcttgatagatccggacaaacatccttgtggattaggagagcacatgatctcgtaacaagccccacatgaggccccgctgttgaagagcgccgtgctcaatgctgctgtggctagaccatatccatgtttgtttagatcaccgtatccacaagctccttctactgaatgtataataataaaaagttagtatgtaactattatggatttaattgtttatttatatttaaaacaatcgcagcttatatacattttgaaacaaaacatcaatgtaataattagattcgacaacatattagtaattttaacttacgttcagtgcctccaccatggatatcaccataatatgcggctcgcgcatcataccaagcagtatcaagtccgttggttccaggtgctgcagctacattggctccatgactgtaacttatgaacatgaaccatgtcgccattattatcataaaacattctacatatgtcattttttctagcaatttcatgattattatccctctttgatgattttgttttacttttagctttgattgatgggaataaatgaacaacatgagtgggtatatataagtagacatatatttgactatagtcatatcttttaaaatctttccaaatgtattgaaattttttgtagtcaatctgaattgataacatagccatctttgtattttggataaaatggtaagatgtttataggtagttaaaagtcatgaaatgtgaagtgatagtcccatttctttttactggttatttgtaatatttttttaaatcattccaaatgtgcatatatttacttagtgaacatgataaattagtaattgtattgaattttatgtagtcaaaatctgcaatcctaagaagtgatgatattgccatcacctgtatatattttgaattcatggtatgatgataataagttgtaaaacaaggtatgaaatgtagaatgagtaaagaagtctcatgttcctttaatccttttgacttctaatttaatgacatatccaattataaatgttagcaatgttcttttcttttcttgtaggccatttcatttctttaaaagtccaatggactaagtacaaaagaaaggaactctattagaaatccattacacattacaagtataaactcgaattaagattagggaaatttgcaactataatctaaataaatttaataatttggaaactaacacctcaaaaactacgtacaaggcaatacacataacacacgctcttcctcttccaattcttaattttgtttttctgcaactccaactcttattataactatcccatatatttttacaccatcacatctaccatcaactcaccatcatcatttatcactgccacaactgtatcgccgcaaccactaccgtcaacttcaccgttagtgccatcactaccattgtcatcatcaccaccatcattaccgtcaccaccaccaccacctttaccgtcaacatcactactatgatttaccttgcttgcttgggttgccaatgttatatcgcatagggtatagttttttttgggatcggatcggtttaactcgatcctttgttagtctaatgttcgttctatactatttagttttattttatatttgtgttttagccaaatattattcactattttaaataatttgtatgagatttcaaaattttaaatcatgttatacatagaaaaaaatctaaaaatgttttattttaaacaattaggttcacaaaacaaatctgtaaattgattccatggcaaaaaaataaaaagatggaaacatagaagtaaaaaacttcactccatcaactacacataataaagcatatctcatttatttttagttattgaacccaatacatctgttaattcattttaattgtattccttcttatcctaaaaagtaaaaaaactcaaatagttctcctaaaagttgatctttccatcaaaagtcagccggttccccttggaggcgaccaattttcctatgcctccaaaccacaaacaacatacgatttttaaaagaggttacatgtagaagtgaaagataatagtataaatatagattgtggatacatcctaattttttatggataaatagtatcttctttatttttaattattgcaagtacgtattacataacttatgtgtaagacacatataataaaactcaaatcattctcctaaaagttaatcctaccatcaaaagtctgtccaaacccccaattttttggcatcacattccaaaaatcttttgtaatcccatcactcgttgtaaccctgaacgataaaccttggccggtcaatactgtaatagtggtccaattctgcccccagttctttttcattgttatccacccggtcttgtttcctttaacttgcacgtacttaatatctccagctcctcctacgttgtatatcaagaccattaagaaataagggtttcctttggtttcaaacttgacaccaccagttttgctacaaggaatacgtctgtatctaactgggacaaccccggctttgtacttggcaatcttgagaaacattgctaaggagagatcaaagtgtttctgtggtgggttgcaccaaaggtctgtggttttgctgtaatttgcgggacagaagtttgttgctgtgatcttgacggatccgggtaaacaccattgtggatcacgcgtgcacatgatttcataacaagccccacatgtgtacccgtcgttgaagagtgccgtacttaacgctgcggtggctagaccatagccttgtctgaatagattaccgtatccacaagctccctctaatgaatatataatgataaaaagtgattatgtatgtgttaatcacaaaaactaattttggctttgaatttttttcttacatgtgtgttggttttatatatacatgttatcatatagagattttttgataatgaaaatttgcattcaataattagattcgttgtaaccaaaaatcatataattttaacaaaaaacaaaatcgtattgaggttaaaaaaaaacattattatttgatcttacgttgagtgtcgccaccatggatgtcaccgtagaacgtggctcgtgcgtcataccaattagtgtcgagtgccttgcttgggtcattaatccctggtgcttccgctacatcaggtgcttcgactgcattaccaatcatcgctccatgaccgtaactcatgggcacgacccatatcaccattattatcatcaaaaactctacatatatcattttttctaagagtttcatgattattatccctcttaaatgatattttattactaagctttgattaatgatgaattttgatgggagccatatgggtgggcatatatataacgtagaaacatactatattagtaattgtattcaagtttatttagtcaatatgcatcctgatcattaacattatcattatgtaatcagccagaaaaagaaaaaattaccatatgtgtatttgaataaaataggtttgaaaaacgttgagtgttgaatattgaccaagctttcgatttggtctattactaattttgttacaagatatttgtaatactagtttgatgttttatgtacatacacatttttaataatatcaaatcgaatggtgtatgaaaaaattcgtttaagtttatgtttggatttggttcagatcatgattttgggttgaggttttgttgctaaatcaagtagtataaataatatcatttatttttaatcatttcacccaaataatacattggcatacaaaactgaaatcattctcctaaaagttaatctttccatcaaaagtctgtccaaatccccaattgtttggcatcacattattaaaatcttttgtaaccccatcactcgtcgtaaccctgaatgaaataccctgaccagtcaaattaacaccagtggtccagttttgtccccagttcttttgcattgttatccacccggtcttgtctcctttaacttgcatcaacttgatatctccagctcctcctacattgtatggcaagatcattaagaaataagggtttcctttggtttcaaacttgacaccaccagttcttgcacaagaaatacgtctgtatttaactgggacaactccagctttgtattgggcgatcttgaggaacattggtagggagaggtcaaagtgcttttgtggtgggttgcaccaaacgccttcggttttgctgtaatctggtggacagaaattagttgctgtgatcttgacggatccgggtaaacaccattgtggatcgttcacacacatgatctggtaacaagccccacatgtatacccttcgttgaagagtgctgtgctcaatgccgctgtctctagaccatagccttgtttgaatagatcaccgtatccacacgctccctctatattgaatagaaatatatagaacaaaaaaataaaatatttttttttatgataatatcttatcggagaaaacacatattttttcttttatcaaacattaagataaatgtaaatgcaatctcaaacgcaaaagtaagcatttaaaacaatcgcagcatatatggtattttgagaacaaaacaaaaattcaataatgagtgttttcacacttacgttgagtttctccaccatggatatcaccgtaaaatgttgctcgtgcatcataccaagaactgtcgagtccgtttgggctgactacatcgtcaaacacgggtgcttcggctacatcattaatcatcgctcgatgaccgtaactcatggacactaacaatgtagccattatcatcataaaaccttctacatatatcatttttcctaagagattcatgattattatccctcttgaatgatatttttcttatttaactttgataggtgatgaatattgatggggaccatgcggtgggtatatatataagtagagaaatctttcctaatgtgcatatatttactaagtgaacataaattagtaattgtattgaattttatgtagtcaatctgcatcctgagaagtgattacattgccatgttaatgttaataggttcaaaagtcaagaaatgtggagtgaagtctcatttcttgttgactgcttattaaatgatattggactgtgtaaaacatatgacacatgtttaatgagtcttcgtatgcaattcttgttatacttagcgactaaataaaaattgctaaatatgatttggttttaatggatttttgcttaaatttaatagtgaattgtaatggataacaaaattggttaaacaattatattgatagtagtaaaattaccatcactaatatttttggtcaaccaaaaaagtataattcaaaaaagtactatgaaatcatttaaatgctcttcctaaacaataaaaaattcaaccatatgtcattaatgtaacatccatgtaagggctaaagatattctaataacagagaaatacaagaaatacaagggtaaagtgtaaatacatgaatgtcgtgttaaaataagtcttttataatatttataaagttctatcaactaactgaaaaattaagacaaattatgatttcataacttaactcagtcgaattttttttaaaggacgctacggcaaaaaaacgagcttttttttgggaattttgaaattttggaaaactgattgacttaatattatctatgaatttgaatttatttcatgattggtgtgtattttactattttttggtttcgtaattaacattaacatttatcatttaaaaaaaatgtgtgaaaaattatttgtatagatatctacgaattaaatttaatatgttaagtttatatctaaaagttggaacacttaaggtttaaagttaatttttctagaactaacttcaatccctatttgatgtgtttagtactaaaagttaacaactatcagcttcttatattatttaagatatgttttgaagatctaaataagtaaattcccaacaaatgtgatttcgttttacataagtttaagatacttcaattttatttatatatttaagattgtgataaagattacaaatgcaaaagctagaacaaaaaggaatttgtaatcttttcagttttgactttttcatatgttatttaaggtaattttgtttataaagatataggttagtttaagtctatatatattgagattattatacattggcccctaaaaattacaaattcatatgtaaacccattaagttttatcataattttgttctactttgtgtgttgacacacttcttacatgttttagccttttttttttattcaccaataagtattgaatgtaatttaaggtattttttttaacgaaaataaaaattttttagttttttaaattactaattattttaagttacattttgatgtggtaaaaatatttctaaatcctccgcatgggcagactcaaagaggattataaaggggtcagctaacaacaacttcaaatgttgtgtacaaaaatggtttcaaaacatcttttttcacgatcattaataaggttaaaattttccattttgggtatatggacaaatatgtaattcaaataatataaaatactactcaaattgttctcgataaaatacatgtaattcaatatcatgatgaaaacatgaaattttggatgacaaaattcaattctcaaactctcattagttataataaaaatagactttgaaatgaatattttaggatagctttgaaaaaatcagtggagaatttttgtagagatatttccaaaatttttgtaaaaaataaatattcaaaggataaatatgagtatcccatcttaatctcttatccgtttgattaaaataaacattcgcaaatggattatatttttagtagccacatttacatagcgggtaatttttttatatatgctagacttgacgggttgttatcctggaatgaccatgattaaattagagttagagttaatattatcaaaacttggttaattcttacctagactgatttgctttcatggacaagtatatgtggcgctaacatctaaagattgtttaaatttttaaattgtaaataaaaatagaaatactaggataaaaatcttaatgttgtatatgaaaaattgtataataacatctcttggtttctaagtttatcatgactattaaaaaaagtcacgcatttctacttcgagttttaggatgagaaatatgcatgggcggatccaaagatgattaaaggggatcatctgactcttctaatattctacatttgcattatagccttttaatttttttatattacttatattttcttcaattttgatccccttaaaaattaaaaaatttgtatgtaaaccctttaagttttatcatatttttcttgtcctttgtattttgccactatttctacatattttttaaaatctttttgtttatttcacccataaatattgaacataatttgtggtattttttaagcaaatgaagtttttttataattgttttttaaaaattactaattactttaagttatatcttgatcaggtaaaaagtatgtatgggtcttacgcagaccaaaagaggattaaagggggttagctcaccccactaaaaatatacatttgtattatagatattaattctatttttaatattttgaccccattaaaattacaatttcgtatgtaaatttttggcattttatcatatttttcttcttttttttcctcctattttgtgttttgacactatttcttacatgtttatagcattttgtttttattcacccatgaataatgaacctaatttgttgtatttttaaggaagcgaaggttttttttaatagcttttttaatattttaaattatcaactatattatgttatattttgattctgtaaaaagtatttttgatctgccgcatgggcagacccaaagatgtttaaaaggggtcagctgacccatctaaaatattatatttgcattgtatttatatttatatttgcattttatgatatcatttatatttcttctgtttttacccttttaaaattacaaatttgtatgtaaaccttttaagttttctaatatttgttttatacttagtgttttgatactattttttacatgttttaattttttgtttgattcacccataagtatcgaacctaatttgtgatattttttaaggaaataatgatttttttagttatttgtaattactaattattttgagtttgatttttgattggaaaaaatatttataactctgccgcataggcaaacccaaagaggattaaagtgggtcagctacctaaaattctacatttgcattataaccctttaaagtgtatatattatttatatttcttcaacttttatccctttaaaattacaaatttgtttgtaaatcatttaaaactataaattagtatgaaaaatcttttaatattttagaggaggatcaaagtcaatgttatcacgagattttttcacattgtttcgatgaatgaggtgataaaattagtctttgatctaaatatttggtcttgaagaatacacatatatcatttacagatttatataggatcattacgtagaatatattaatctgattataaaaaataatgttgggaactttttttattattattattattccactcgcatgattgagtagttatggatagtgttaccgaaatgtcaaatgattttggtgtttttatgaattatagttaatggataaatcgtttgtacttagtacgttatgtttcatcatttgtaataaatcaggcatatgttaaactcgctaacctatgcctaatattggtagattatatttgttttcgagatataatcttggttgtgcaatgcgcagataactcccctagtttttaaatttattgcaagtacgtaatacatcacttatgtgtaagacacgtataataaaattcaaatcattctcttaaaagttaatcttaccatcaaaagtctgtccaaatccccaattttttggcatcacattccaaaaatcttttgtaatcccatcagtcgtcgtaactctgaacgacaaaccttggccggtcaatactgtactagtggtccaattctgcccccagttctttttcattgttatccacccggtcttgttttctttaacttgcacgtacttaatatctccagctcctcctacgttgtatatcaagaccattaagaaataagggtttcctttggtttcaaacttgacaccaccagttttgctacaaggaatacgtctgtatctaactgggacaaccccggctttgtacttggcaatcttgagaaacattgctaaggagagatcaaagtgtttctgtggtggattgcaccaaaggtctgtggttttgctgtaatttgcgggacagaagtttgttgctgtgatcttgacggatccgggtaaacaccattgtggatcacgcgtgcacatgatttcataacaagccccacatgtgtacccgtcgttgaagagtgccgtacttaacgctgctgtggctagaccatagccttgtctgaatagattaccgtatccacaagctccctctattgaatatataaggataaaaagtgagtatatatgtatatgttaatcataaaaactaattatggctttcgttttttttcttacatgtgtgttggttttatatatacatgttatcatatagagattttttgatattgaaaatttgcagtcaataattagattcgttgtaaccaaaaaccatataattttaacaaaaaaacaaattcgtaatgagagtaaaaagaaacattattatttgatcttacgttgagtgtctccaccatggatgtcaccgtagaacgtggctcgtgcgtcataccaattagggtcgagtgccttgcttgggtcattaatcccgggtgcttcggctacatcaggtgcttcgactgcattaccaatcatcgctccatgaccgtaactcattggcacgacccacatcgccattattatcatcaaaaattctacatatatcattttttctaagagtttcatgattactatccctctttaatgatattttcttactaagctttgattgatgatgaattttgatgggagccatatgggtggtcatatatataaagtagaaacatactatattagtaattgtattcaagtttatttagtcaatatgcatcctgatcattaacattatcattatgtaatcagccagaaaaagaaaaaattaccatatgtgtatttgaataaaataggtttgaaaaacgttgagtgttgaatattgaccaagctttggatttggtctattactagttttgttacaagatatttgtaatactagtttgatgttttatgtacatacacatttttaataatagcaaatcgaatgatgtatgaaaaaattcgtttaagtttatgtttggatttggttcagatcatgatcaagtagtataaataatatcatttatttttaatcattggcatacaaaactgaaatcattctcctaaaagttaatctttccatcaaaagtctgtccaaatccccaattgtttggcatcacattattaaaatcttttgtaaccccatcactcgtcgtaaccctgaatgaaataccctgaccagtcaaattaacaccagtggtccagttttgtccccagttcttttgcattgttatccacccggtcttgtctcctttaacttgcatcaacttgatatctccagcgcctcctacattgtatggcaagatcattaagaaataagggtttcctttggtttcaaacttgacaccaccagttcttgcacaagaaatacgtctgtatttaactgggacaactccagctttgtattgggcgatcttgaggaacattggtagggagaggtcaaagtgcttttgtggtgggttgcaccaaacgccttcggttttggagtaatctggtggacagaaatttgttgctgtaatcttgatggttccgggtaaacaccattgtgggtcgtgcacacacatgatctggtaacaagccccacatgtatacccttcgttgaagagtgctgtgctcaatgccgctgtctctagaccatagccttgtttgaataaatcaccgtatccacaggctccctctatattgaataaaaataaataaacattaattttatgtacatttttttctttgatcaaaacattaagatatatgtaaatgcaatcgcaaactcaaaagtaatcatttaaaacaatcgcagcgtatatgattttttatgaaccaaacaaaaattcaataattagttttttcacacttacgttgagtttctccaccatggatatcaccgtaaaatgttgctcgtgcatcataccaagaactgtcgagtccgttggttgggctgcctacattgtcaatcacgggtgcttcggctacatcattaatcatcgctcgatgaccgtaactcatggacactaacaatgtagccattattatcataaaacattctacgtataccatttgttctaagagtttcatgattattgtttcttttgaatgatatttttcttatttaactttgataggtgatgaatattgatggggaccatgtgctgggtatatatatataggtagagaaatctttacaaatgtgcatatatttactaagtcaacataagttagtaattgttgactgcttatttaatgaggatttgttttcatattttagatatatatgaaatatccaatttaaaaatgtaaatgattttgtaagacattaaagcaaatgatgatgtacatgttggtattggatctcgcacaacctggcccggcccgacccatttcattattaaactcataaatctgataaaagttcaaacacatgtaagggagaaatgagactataaattgaaaatggatcggtcaccacggaaagggatcctgttcctcatacaaaaaataaatatctatgaaaatttatgttcattagggaccatattttatttctcataaatggatttgtaaagtaactatttacctatcaaatattcagctatggaaatcaagatttgttagagccaaattcacagtggtacgaaagatgccgaaaatagaagcgaagtctcatgtcttttctaaaagttttgaatgttattaactccagtttgcagtctttgttacacttattgtacatagaatatcagaaagaagtttgagtagagttacaaaatcatcaaaccaattatatttagcaagaattcaaaacaggaattcgttaaccaataacaacaaatatttttatattacaaattaattgacctaccagtaaccctctcttcttagttacttgcaagtattaactaacaaaactcaaattcattttctaaaaattaacctttccatcaaaactctgtccattacatttccagtccggcggtgtaacatcaataaactctttcataactccatcacttgtggtaagcctaaacgataaacattgtccggtcaacacaacaccagtgctccaaatctgtccccaattcttcttcatcgcaatccactgggtccttgttcccttaatttgcatagccctaacagctccagctcctcctacattgtacggtaagatcattaagaaatgaggatttcccttgatttcaaacttgacacctccgattttcgcacaaggaacacgtctaaatttaaccgggacaaccccggctttgtatttagctattttgaggaacattggttgcgagagatcaaagtgtttttgtggcgggttgcaccaattgtcattgggcttggtaaaatctggtggacagaagtttgtagctgtgatcttgatggaacctggcaaacaccattgtggagcgtgttcgcacatgatctcgtaacaagccccacaccttgagccgttgttaaatagtgcggtgcttagtgctgcggtctctagaccatatccttgtttgtgtagatcaccatatccacaagctccctctatcaaatagaaaaagaaagtatgtactactttcaaaaacaaaacaaattatgtgtaaaaaaaaaactaattatttggcttcgttatttttcttttgcatgcacgtgtttactttcgcgtttgcaaattataattattataagttcgtttctgtcaataacttttctaaactttatggttacttatgtaaatgcataagcaaacaatattagtttagtggtcaaagattcacgagtatactacgtcgtcatgttggcttttgtatacgtctaaaacaatcttaacatttttacaggtctcgagattgttgaattatatattaagtatatatttagctgcttacgttgagtttctccaccattgatgtcaccgtagaatgtggcacggccatgaccccaaccagaatgcggcacttggccaccatgggatgggagggcgccatgggatgggtgagcaccatgggatgggtgggcaccatgggatgggtgagcaccatgggatgggtgggcgccatgggctgggtgggcgccatgggatgggtgggcaccgggtcttccaccgggtacgtggcttgcatgatcatgaccgttagtcataggtgcaatccatatcaccattaccatcatcaaaatttttgcatataattttctttttaagagttccatgactttatctcttttatattaaatcttactaatcttattgattattgttgatgagagaatgtaggtatttatagctatgtaaagaaattttgggcttgtcgatatttttgggattcaattggaattctacgatgttgcttagactaaggaagatgttttgtggcttcttagatatgactggattctccgaaatttcattaaagctttaccgtcaggtctataatttttgtttagccaacggttatggttcagtactaatatatttttaacatctagatttgggtacgtatatgatgatcggctcatatagctcggagagtaaagtggtgaaaacaaggtgtaatagaaagttcggagtcatcgttgatcaatactaacatctatatctctatcctaaaggtgtttaacggagagatagttgagatatcgtacgtattatgcaggctagtccaaagagaacgactaagcaaaccagttggagccaccaatttatcttatgtttttgaagactaccaaattattattttagtgagatagtgagatgtcttaagagtaaagaaaacattttcactaaaaaatgttgttttacagaagatttagctgaaatttacataatattataactagtatttgtgaaagattttgaataatagatagaaagatggccacacatttttctatattccgatgccatttttgttgagccggctctgattttatgtgatgtgttaaaattgtgtctaaaacccaagaaatgatattagagtaagtggcaatgttggctcttagttatcgattaagtaacagtgtcaggttaaacattttatagaccatgttacgtttcaataactcgaaaccttactcgatctcaagatctttcacacaaattatttacccaaatcgattcaccggtgtggtgaatctacgtctggagctggattcaacccatttattcactataacagaccaaaggttgctctcaagctcaaaaccatagcttaaaaggattacaagagagattatatgttgtgttacaagaaagagagatagagaatagatatttaactggtttattcaagtcgacttcagagcaaaactagaaaaatttggatcataccttcacagaccttagcaaaagaattcaaaaacatccccctaaacatataaattagggattattgttaatatgagaacttttgttttataaaaactttaattttaggcacaaatgcagtgtatttaaaaaagacatatttattgtttgaaaaagacgatattgcccatgtcttcttttcccttcttcttcttcatcgagtctgtttcatttttttttctgtcaaaatcaatttttctttatttttcaaagaaacttaaaatcgttttcagttatataatactaaatcctaagatagtatatagagaacccaaacaaccaattttacagattttatgagaaaatttcagacctaattttgtatatatatgcatgtatatttatgtgaatttgtttagttatatcactggatccaaaaatcaactcaaacacatctcgatccctttttaaatgttacttaattagttttttgtttgaaaaagcatgagatccaaaaattagacatttacatagaatttccaaaaatatattcataccgattttcctactcatcatttccaatctccattatcgagattttcttcctaaatttgttagagataatgatggaagggtaaaagcgtcattccgtagtcatataaatggggtttttcgaagcattgcggcaatgtaccactttggaaaagattttaacatttcagtccctttctcacaattaattctataaattattgagttaaattttctaaaacaaaaatttatataataagacacttttttttgtcggaaatttatggacacttttgttggcaatatttttttttggctttttttacacacaaatttatttcgaggtcccttctacccacaaatgttttggacattttttattcatagacgataacacggcggcaatgtcggcggacggcggctagtgagtgagtaatgagttcgtcgtgcatagactctatggaaaaacgtgggctacctcctacaaggacattatcgttatttcaataatctttccaagaaatttccgtttttgccctttgcgtttttttaaccgaaactctttctataaactgcaacattcttctccttcttcttcttcctcgtcgtttcttctccttcctcaagagaacaacttcttaaccacgaatcttcagaggtaaatctcgatctctcttcaccatttttgagctgcattgttgatttttctctagaatctgtagctgaatcttctctgatctctttctgaatcgttctaagagatccgttctctgtttttgaaatatagatttgagaattctcgaaatgtatgtagatcctgtgttagtcttagtttctgtgtatcgatttcttcgaaatcaagctagatttttgtttagatccgtgtgatccgtgtgatttgagtgatttttgtgttttatttgagatcagatcggatcatgagtagtctcttccttgcacaccaagtgttcgacgtttttctactatatatagtccagatctgagctcttaatgtagatctgtattgatctttatttgaattttgcagagagatttcaggaaacaaaatggtgaagatctgttgtattggagctggatatgtaggaggaccaacaatggcagtgattgcattgaaatgtccagatattgaagtggcagttgttgatatctctgttcctagaatcaacgcttggaacagtgatcagcttccgatttacgagccaggtcttgacgatatcgttaagcaatgcagaggaaagaatcttttcttcagtactgatgtggagaaacatgttagagaagctgatattgtctttgtctctgttaacacaccgactaaaacgactggtcttggagctgggaaagctgctgatctcacttattgggagagtgctgctcgtatgatcgcggatgtatcggtttctgacaagattgttgttgagaaatcgactgttccggtgaagacagctgaagctattgagaagattttgatgcataacagtaaaggaatcaagtttcagattctttcgaatccggagtttcttgctgaaggaactgctatcgctgatctttttaaccctgaccgtgttttgatcggagggcgagaaacacctgaaggattcaaagctgttcagacacttaaagaggtttatgctaattgggttcctgaaggtcagatcatcacaactaatctctggtctgctgagctttctaagttagctgcaaatgctttcttggctcagaggatttcatcagtcaatgccatgtctgcactttgtgaatccactggtgctgatgttactcaagtgtcttacgctgttggtactgattcaagaatcggttccaaattcttgaacgctagtgttggattcggaggttcttgtttccagaaggacattctgaatctcgtctacatctgtcaatgcaacggacttccagaagtggcggaatactggaaacaagtgatcaagatcaacgattaccaaaagaaccggttcgtgaacagaatcgtgtcctctatgttcaacactgtctccaacaagaaggttgcgattcttggattcgcattcaagaaagacactggtgacacaagggaaacacctgccattgatgtgtgtaaaggtctattaggagacaaagcacagatcagtatctatgatcctcaagtcacagaggaacagattcagaga

SEQ ID NO: 793 - DNA, 83450 bp, Arabidopsis thaliana
gatctctcgatgaaaaagttcgactgggaccatcctcttcacttgcagccaatgagtccaaccacagtgaaacaagtgagtgtgacttgggacgcatatgaagctacaaaagacgcacacgcggtttgcgttttgactgagtgggacgagtttaagtcgttagattaccagaagatcttcgacaacatgcagaaaccggcttttatcttcgacggaagaaacattatgaatgttaacaagttaagagagattggtttcattgtttactccattggtaagccacttgacccatggctcaaggacatgcctgcctttgtctaatcacaaggcaaaacctggttgattcttgtttcttactttcattgtttgtgcttttttgctttcgctttcatataaattttagtctcaagattcgatttgtgaagtcttgaagagttgtttcttacattttacaatgtgtttcttatgctaagctcttataattttgtgtttcacattttgtcaaaagctcgtgtaattgttgtttccttagaaaaaagcaataaaggtttagtttttaattcaaagtcaattaaaattgaacctgttcatcaaattctagaattgaagtctaaattattgtagattggtgtataataatatagtaataatctctttagatcggatctgaaaatactggaacatttctagcccataacttattgcgttgacaaaaaaaaatcaaataacctattgagttaaccagacttgagttagaagtaaccaaatttcgaagcttttaaaccacaggattggctccgatttatagtaaactttggttgttgttgagaagttaaaacagaaagaaagtaaatagtgttattgttttcttacttgtggtagaattcacaattgtgaataagaagatcttagcctagtgagtgagggacgtccaaaagttagacttgtatagtgagagtgtagtgggtgaacgtgggacagaacatgcgagtccgtgcaagtcgcagagtggttgcttgcacgaaattattgtaactcatatgtaatgtcaatgtcataatgatatatcttttcgttggagatgactaagctgaggttactcatatctattgtcatcattcatctccaacagtaacctcagcttattttgattatattttattatttttcattgtgaacgttaggtgtgagagttacgtgaaatcggtttattcgggtcgggttatttggttttaggaaattcggtttttgaaaaatctctccgaattgaaccgaaattaagttcggttcgagtcggtcgctactcggattattcggttcagttatagggcttaaaattaattccaaaattatatttcggttaatttgaatcaaattacaaaaaataaaaaaaggagaatgagctgaaaacaaagcccaaacatagtatctctcccttttaaaagagtggttagagatacattttcttaggaacctcatgcaaaagatattattggaaaccttatgcaaaaaaggtaacaacagatacaattttttcatcaacaaaaatatacattgatataaggtaataatatttcccacacatattttttggattattgaatcaattcttgatttagatttccttacactactctaaagtcttataaactttaaagcataatgtaataaaactaacgaaacacaatacaaaatgggaaagatatcagtaaaaagatatacacatataaaacatttttttgatcgatacacattaaatttttgtaaaagaaaaacgctatttatagcaatacattaacgtcgacataaaaatctttgattataagaaaaaaagaaaagaaaaaaaaaaactttgattatatacacgtctctctctctctctcacagaaaaaaatgaaaaaagaagcattagttcccaaactcacatctgaattgcctccgtttacactaaaagaccatccgaagtttgtcgtcttagtggtcatcttgttctgtatcgctttcttcattgctatgaccttttgcgggtatgaacaagataaagaaaaagaaaactatgtcccaaatattacaataccttctatggatttcacggtccttaatataaccgagactcatcttagtgtaaaatgggatttattgttaaggatccctagagatcttcctggttggtatatgtgtctcaaaggagattttcagctttccataatatacagaggtgttaccattgctacttcatccatagagaggttaaactttttttctattctattgtctatattttagaatttttaataatttattcagcttatttgttcacatatttttgtgttattccttatcatgattgatcagttacagtctgataccacggtgggctcagctgattagggtttcatcgattgcttctgaaggagacatggagggtgtgattataaaagatattatgaaggatatcaaggaaaaaggtgaaataaggttccgatcgcgattgcttcttccggattgtagatatgggacaagtggaaagatgaactatgcgtgtgatgaagccatgttaaggttcgagcctggctctcaaaggaatgcaactttgtttggagaccaccctatttgccgctatcttcgctaagtacttttcatcaatagtttgttctttagtttgtcaaatgatggactttctaaattcttttgcgttttgatatggacttgctttacctaaattaaattcctataaattaattaatggaatatatttcttctagatgttaagtgttgaacattcttaattctctctctttacgaacaatagatatgttctagagcaatatcatggagttgtacgtggtgttatgatgatttctacacgaggcatttatccttgacggacaagttgcaattattttcctccatgatattcaatttttgggatggtattttcattctccacaaatgttgcatctatgagatcaatatgcatgcaagatctctaattaatggtgtggtgcatggtctgccctcccaaaggtggatctttatcttttgtgttgtgatagtaaatttgtatatatatatctagtgtttaaaaatttgctaagcatggggtgatccaatacctacctattaaaaacgtttaatccgaacatagctacacacggaccgaatgttcttttttggagttttttataattttattaagattttgggacatttagatctctttaaattaatatttactaaattaaagagagtagttaagatccttaccaataaacgagagagatgttaagatccgtctcatcaaaaaaagagaaagattttaagatccaagtcaggtcacttttttctttggtattaatctcacaactcaattctcaactcaactcaggtcaccaagatttaacacttataattttacactttgttttcttaatcattatatactatcctaagcatatatatgaatctttcaccataagttataccatttatatatgctaatattttctaaataaaccttacaaatttgttggcgctaacaaccattgtttaattttgcttggggtggctctagttatattatatagaccttaattttgcaggaggtatgtaacacctcatattgcttcagcttagcaattcatatatagccaagacgtgtggacttctcacccaaagtttcctagtttaaatgtgaatgcctctaaacaaaagttcttgctttcgatgtctaaacttagatgtgttaccgaataaagccagatttacctcctttgaccttactatatagccagctcgctgcctccgcaactctcaaaatgacactcgcgatcatattagttgtttccaacaaattgaaaaataaaacatttcactcaaacaaaaaaagatctaaacagccgaaaaaacaagtccaatatcaaaatctgttatagcaaaaaaaaagaaggtagagtattttggtaagaaagaactctaaatgcctctacgatataatattaataagtatgttaccaaacaacttaatattagtgcaaaaaaccctttagtttgtcataaacagcaaaatctgccactataagttgttttcatgaggtcaagttgatgagagtatatgattctctgaagctcatgtcaaaagaatagaaccaatgttcttcagtcttgtccacacggtaatgcttcaaatgaacttgtctatagagaatcttccagcgtgagagattcttagtgttggtggattgacataacagaaacatacctaacattggaaaatgctaaaaactttgagtgaatgaatgaatgtatcaatcatgaattagagattccattttttatggcctaaatcaatgtttctcacttgtaaaagttgtctttttgacaactaatcatattctaattctttttctctgccctttatggaaaagctttgtgactatttctttatttatttctgtccaaatttgatgatctgtaagaatctctttattgggattgcaatttcaaacaaactttacatcttcttcttctctctgcttttgccttcacgacgagtagagagagccatggacacactcattgctcagttacagagacgattttgtgatttcaccattagtctctatcaccaggtaaattttagcatctctccttagagattcaggataaaagtgattaactttcttgtgaagagaacttagaaattgtggttgagttttaaagtctcctttttagagatggctctccacagtctttagggttcttattgaagcttttaaattggaaactggggatttaagagttaggtttactgattgtgaaatgggttattgtctccattttcaaagtcgtctcctttcaaagtgattacttttctggtgaagcaaactttgaatttgtggttacgtttttagggttcttattgaagcttgtatatggcaattggggattttgggaattgggtttagggtctgtgaaatgggttattgtctctttttcaaagttgtcttctttttagggatgactactctctactgtttttagggtacttggagcttgtatttggaattgggaattttgtgaaatgggtttctgagattctttgtgttggttttgtaaaggggtttttggatgatcaattcacagaattgaaaaagctgcaagatgaatgtagtcctgattttgtggctgaggttgttactctcttctttgaagactgtgagaagcttatcagtaatatggctagagctttgtaagtttacttttcttttacgagtttaatcatcaaaagctagcagatatggtttaatgattggttcatatgtatactcagagatcagacaggaaatgtagatttcaaactggtaggttctagtgttcatcaactcaaaggtagtagctcaaggtatgtcacatttgatctgtatagtctcggtcctttagtctaatctcggatctagtctcagtgaagagctcctttcttgttgttctatgaagtgttggtgccaagagagtcaaaggtctttgtgttaccctcaaggagtgttgcgactctcagaactatgaagggtaagcttttgttttccggttcttctttaagagaatctcaaatttctgctatgttcatttgattgttgaaactaatttgggaaacaatctctgttataggtgtgtgagatgtttgcagcaagtggatattgagtacaagacattaaaagcaaagcttcaagatctgttcaatgtgagtgaaaagctacgtgaattgtgtcggttttttgctttcgaatttcgtgaataagtcttgcattgttttgttgcagcttgagcaacagattgtccaagctggtggtagaatccctcaagtggatatataaacaatagacctatcgacaacagaacagcaagatgatgatcatccagttgcattcttcagacgagtactactcgaatttgttgcttcgaaaaagaaaaaaaactcttgagaatgtgtggaaaagagaggtgattgttgttcatagatcaatactatgtatcttttgtatcatcatctcttgaatcttggtactgatcttatctgaatagtatgaatttgcatctcataagaccatatgaacaagagtgagttatgtattcaaaaacaggaatatttccagacacagaagcatcataagaagcagaaaattcaaggagagctacacaagacaacgcgcaaaagaatagactctgaaagcaaaaagcttcacgaagacattggcaaaaggaacaaaccaagaacaaacactcacaagtgtcccctgtgaaagctgaaacctaaagttaaacccatcagctaatgttaagaaagaaaacgtcacgcagttctcactgtgaaatacaaaacgtcaacgcagtctcactgtcaaatacaaacgtcacgcagttcttactgtaaaataagaaaacgtcaagcatttctcactgtaaaatacaaacgtcacgcagtttggttagatatgtcgttgcttttaaaaaattgcgacccaatagatttttcaacagtcgtttttttctttaaatgagtgaagttttgcgcagagccaacaacgcacttagtagcgtcaagcaataccaatctctcttgaatcactttgcagctactcaatcaatttcaaaaaccaaagctttacactgccacgtcatcaccggcggtcgagtttccggccacattctctcgactctctccgtaacttatgcgttatgtggtcacatcacttatgcacggaagctgttcgaggaaatgcctcaaagctctttgctttcttataacattgttattagaatgtacgtgcgtgaaggattgtatcacgatgcgattagcgtgtttattaggatggttagtgagggggttaagtgtgttccggatggttatacatacccttttgttgctaaagctgctggagaattgaaatcgatgaaattggggttggttgttcatgggaggatcttgaggagttggtttggtagggataagtatgtgcagaacgcgttgttagcgatgtatatgaactttgggaaggttgaaatggcgagggatgtgtttgatgtgatgaagaaccgtgatgtgatttcgtggaacacgatgattagtgggtattataggaatggttatatgaatgatgcgttaatgatgtttgattggatggttaatgaaagtgttgatcttgaccatgctacgattgtttctatgttgcctgtttgtggtcacttgaaggatttggagatggggaggaatgttcataagttggtggaagagaagcggttaggggataaaattgaggtgaagaatgcgttggtgaatatgtacttgaaatgtggtcgtatggatgaagcgagatttgtttttgacaggatggaacgaagggatgtgatcacgtggacttgtatgattaacggatatactgaagatggagatgtggaaaacgctttagagttgtgtagattgatgcagtttgaaggcgtaagacctaatgctgtgactatagcttctcttgtttcggtgtgtggtgatgctttgaaggtgaatgatggtaaatgtttacacggttgggcggtgaggcaacaggtttattccgatatcattatagaaacatctttgatcagcatgtatgctaaatgcaaacgtgtagacctctgctttagagtattttcgggggcttcgaaataccataccggtccttggagtgcaattatcgctggttgtgtacagaatgaacttgtgagtgatgcgttaggtctattcaaacggatgcgacgggaagatgtggagcccaatattgctacattaaacagtctccttccagcatatgcagctttggcagatttgcgtcaagcaatgaatatccattgctacctaaccaaaaccgggtttatgtcaagccttgatgctgctacagggttggttcatgtttactcaaagtgtggaacattagaatctgctcacaagatattcaatggaatccaggaaaaacacaagagcaaagatgtagttctatggggtgcgttaatatccggctacgggatgcacggagatggtcataatgcgttgcaagttttcatggaaatggttcgatctggtgtaacgccaaacgaaatcacatttacatctgccttgaatgcttgcagtcattcgggtttggttgaagaaggcttgacattattcaggttcatgcttgaacattacaaaacgttagccagatcaaaccattacacttgcattgttgatctccttggtcgagcaggtcggttagacgaagcttacaatctcatcacaacaattccatttgaaccaacgtcaaccgtttggggtgcgttgcttgctgcttgtgtcacacatgagaatgtccagcttggagaaatggcagcaaacaagttgttcgagctggaaccagagaacacgggcaactatgtgttgttggcaaacatctatgcggctttaggacgatggaaagatatggagaaggtgagaagcatgatggagaatgttggattgagaaagaaaccaggtcatagcacaatcgagatcagaagtaattcagttgatacaagatgagagatgtggaagatatatctagtttttttgttgggttcaaatgatcataaatgtagcagaaatatatgcgtctattacaatttgcaagtgttgttaatacatatacatgcacagaatcaacaaatggtttgtagatgcacaccaatggtaaattgagaatctgaaatcgtcaaaccttgcacaacttgagcttatgatacacttaacatcaactctttgcaaagtgatgattcccaaagtttagcagcaacaattcaccagtacataagaaacagagagacgacatcataacctctgaccaagcttcaagcattttctgcaacggaaaacgcaaggtcggcaatttatagtcactgaaactcggaggccccttcagaatcagacaaaggtaagagtgtacaaactccaagcatatgcccattgagacaaacataatactcaatgctatcttcataagcccccaatctacagctagcactctgtggtatcattttcgcctgaagcatactccacagcttcgctttgcaatacggacaaacttccgtaggatgaaatggtgtccctttcttaataagcaacttcctcacctttgacatagaaaacgatttgaaaatcccacggaagaatcccaaatcaccatcttctccttgatccaaatgttcacaaggatcagaaacatagagaatatcatcagttcgacattgtggaggaagaaagctccttcccgatgttctagagaagcgggttctgtgaacaaaatgaccagagatttgaacatcattaaagagtccacctttgcttgaaccagagcagtaaatcaaaagtttccctagtgctctccaactcccatcaacactatggctaccactagattgaaggtcactcatcatcttaggcgctctagctctacagaattctttccacaataaccgcttagcgagatcatcaaaccatttacaaacacaagatagagtggcaatcacattagggttccagtttagatgctgaaccataagaaacaatacttcttcgctaagatgtcctttcgtgcaatgacaagtcgccgagtgaatgcaacgatattgctttgctattatcatttcctcaacctagccaacaagcaattctatacaagataagtatcatattgtagaaccacacaagttgcagtttttattgaacaaaaacactttaactatcattgttaagctgaccaacatcataagcttaacaaagatgcaatctttatatatataaacaacagcttaaggaatcaaatttcttcacaggtaaacctaaataagtaaaaattggacctttaaagattcccagatacccaaaatcaaaatatcaagatccattgaagacactaacctcaggatgactaaaccatcaatttcaatacctaaaccatgatttaaccggaaaattcctacaatgcaaaatgatctatatggaagcagaatctctcaccttagtaaacacaaatctttatctttctcaaggaagcaagagatattaattttgagtagaattgagagaattagggttttgctctagagagaacacaaaatttgaccaaaagagaagaagaagaaaagcaaagtttcaacatttgaagttatacagctattttccaacaaaagccagaaaggaatttttttgatgagcaatgcatgcaaattgcaaagaatcgagaagaagcaaatctgctttgtttcctaatttttattttgttttgtttttctgattgttttctatttgtctgcgactctgagctgtgttcagatacagtaaggtgtacggtgtgactattccgtttgattggacgaagctgaagagttggtgacttcataagtccgttatgtttgaccgttaacggtaacggtgcattcgacgaggagtttttagatattgttttttagtttttctcttttttttcttttaaggtattcaaatattttttagtccgttttttaaagaatgggcacaatatctgaactctgagtacccgatctcaatccaaatcaaaatttagaaaaatccaaacggattctataaaacacgaatccgaacaatccgaatacaacatatgaataatggtgtatgaggatcgttttttactttttttgtttgaatgaatgtaaaactaattcaatccaaaaaactaggttacattatatgcgttttcagcagggttattatgtccgacccggactgcccgatccgaccggttaacccgtgacccaaacacttttttagtttaggtttagtgttaaaacccaacaagttcaaaatcggaaaatcccataaataacccgtgatccgatgaatcggttgaattggccgggtgtgggttttaaaaaattctcttgattttggaataaaatatgagattttaaactttcttcaaaaatgtttagaaaatttttcagttcttaaactcatttgatgttttagattttggtgaaaacttcacaataccgccttaaaaatgaatcgatagaatggtgggagagaaaaccaagattagttgtttgaatgttttattagtttattttcgtcattagtgatttcctactatatttgttacgctgttaaacatttagttatatttaaatatattaatcactttattatttttgtttgattttatatatatatatttgggtgtaaatgattttatattttattaaacataatatgattttatattttattaaacatgatataattttttttttttttatatttataaaaactctaaaatttctattaatattaaatttattaaataaattttaatcaatcgatccgtttaacccagttgacctggtgacctagaaagtagtctggttcagtgtctgtgtcagatttaaaaacgttggtctttagtttgaatgtttcaaaaatagacagagagtactaaaaacaaatagtagcacccaaagtagtatgggccgtggattgttttgcaatagcagagttgtgattttattgatttaagcggccacgaatgaagaacaaaatttaaaggctgtgtaaatcacacttttgtaacattgaatccgtccaaataacaaaaataacaccttctctatagtaaaattcaattagttattgtagtaactcggaaataaagtagtctggatctgaacataagattcagactatatattattactcattccttctattatttttggtgaagaggtttgaggtttaacacaataaagtttatttgagcaaagttcttaaaagaaaagaaacacggtgatgtttggaagtatagctgaaccgtgagaaacacagaaggtactaagcttacaaagaaagttagggacatttaagaaccgaacagtagcaattgagttttgattgtggcttcggtagatgtagacatacgccttctcgaaattgctcattggcgcaagattctttacataatgcgttaccatttttctttaaacagttcccaggtggcgcaaacctgcttagtaccttctcacaataaggactagtacctagagcatgtccttttggcattcctgattactcaaaaaatatatatataatcgttatgatttgggtttgaattgtttcaaaaattaatttttgcatttgcgtttccatttacaagtattattgtttttgattttttaaatatgtaaaatttaaatgctttttttgtagaatatattactctttcgtacttgtttatcatttaaaattaatttgaataaattgtttaagctgcttaattgctaaattatttaaacaaacacggtaaatacacaacttataaatacaaacacacaacaatagagagtttggttaattagatcatattataatgtaaattacctccacaaatcaacatgaaacttattaaaagaccaacaccatttgcaatcccggccatttctctttctctttcattattttctgcttcctttattcataatcatttcgttgttctatataaagaattttcgtttctttttaaagataaaaatactaggtgatccatagataatgacaatggaacacttcaaattagggggataaataataggagagataagtagaacagaaataaaaattcatttgattaatgtttattaataattgtttagtagggaataataataaaataaaataactaaaatggagaaggataaacttaattatggtagtagtctcaccaaattactagagaagctacgaacaagaacatctcaacacaaaaatcccaaatcgattatagtttaaatgatggaaaatgaatccaagttggtgttagacacggctttatggacttcatcatgcgatgatgtgctaattccctaaaatgctgaaacacacatgcaatgttttccaagagagaaattaatcttacatgtacttagttttggtttcatttatgttccgttgaaaaattaaacgcaacttgtagtaaaagtcaagcagtgtggaaaacgaacatattcgtgtctaaattatatataactgtaagaagaatgaagttgtttaaacaagaaagaaacaaactgatttagaagagacaaatacaaaaacaaaaagatgagggtcgtattatttttattcatcttacttcacaaaggtttctccgtgtatatcatcatcaacgcccttcaatatatctctccacaacacaagatctcgtccccaaagactatatttgagcttggaattttcaaacaggccctaagttccggtgtcggtgaccgatcatgtggtaccgaaagttgcctaatgaagttgtttgggttgccaacagagacactccagtctccaagcccatcggaacactaaaaatcttgaataacaacctccacctcattgatcatactagtaactccgtttggtcaacccaagtgactagccaaagtctgaagtcggaactgaccgccgagcttcttgacaacggcaatttggtattgcggtactccaacaacaacgagacaagtggatttttatggcaaagcttcggctttccgacggatacattactccatgatatgaaagtgggttgggataagaagtcgggtctaaataggatattacaatcatggaaaaacaggaatgatccttcaactggcgattacacttatagtaaaacttagaagaagcaaaatgacgactcggacaacaataatacaaaactaatacttattgttgtcggagtcgtcattttgcatcttctaagttttactataacgttcgaaaaagaaaaaagaggctgccaacaaaagcaattgctgtacaaatttgtacatttgtgataatctttttttgttccccttcatattagtgtctgaatggatcggaagttgttttttcactttagtaacacttgaaactgactgttgtagtggccacccaatgtttttcggatttaaataaaatcggtcaaggtggttttggaattgtttataaggtacattagcgtacaaagatcgtcggaacttagtaagcaaacaaactatcattgttttactataaagatcattttttacatatggttatttctactattttcagtaatcaactttcactggaggagaatgttcaaacattaaagcaaagttttccttgttatgttcagtgagtagtaattttcaattttccactaaacataatctccaattttccacatttccagacactctacaaacgtaacgtttgcagacactatttctatctcaaattttagacataattatgaacaataaccattttaagagatcggtgttctgcaaaaccagaaattacggtttacgatccggtttaagcagaaagaaaacctattgaaagtgcttctttctacaagaagacaaaaaccaacaacaaatgtaagaaactagaccagaatttttctatacaaattgaatcataaacccaaacaatccaatgaaaaccaacaaaccggtctagaagaaccgaaaccaaacacaaaccccaatccatcaaagtattattcacaaagcaccaaatgtttggcagagacctttaactttctatgaagtatcaatcttcttcagttcaacaaaacgattcacaccggctcaatctagaaaccaaaaccaaataaactactactactagaaaaatcatagagactcaatgttagctatgctcatgcatacccaatgcaaataccagagttagcaggaggtttaagattcttgaagagaaataacggtttcgaaagcaccaaccaaagccttaactttgctttttcgagcttcgacgagtttactcgctgtttcttcaatgacattgttgaacagtccctgtgcatctttctcctgaacatcttgatgcctcaacacaactttttcaccatcctcattgacttcttcttctctgatatcttccctcttcttaaagcttctcctaacttgtgcatcttgcgctttgtcttcccctagaccccttcctcgtctaaacttgagcttccttgctttctcacctacagtatcaggatccacaattgttcctcttctgaaacgtaacttccgtgcagcttcatctgcagaatcaccctcctttctcgccgctcttggtttcttctctccattggacaatccaatctcttcttcttcgctctcagcttcgttgcttcctgaagtgtattcgtactcctctgtttctgaaacagtacactcatcatcttttggagttgattgggtcggtggaagaggaggaagaaaaggttcaacaaatccttgctgattctgatcattctcagagacgacattgttagttgtttccatttcaacaacgtgcaatgttttctcctcgactggataatcatccaactgtttattaaattcatcagtgcgattcacgggtctcggtttctgattttgtcgagaagaggaagatgcagcctttaagctctgactctttctcaaacttgaacttccagctagtcttactgataatcttggagaaagcgacgctcttggagtcaccggagccttcttagaagctactcttgaggaaactgtacccttcttgacctttccatcttcgtcttttccatcatttcttttacccattttaggtttcaaaactggtgacgcaacaactttttcatggtttacttttggtttcgacgttgtcagtgctgaataagatttcttcaagacttttggcttcagggcatcaacattttctgatgaacgagatcccaaatctggtgaaggtttaagtttggaacttaatgttgtcttcttctttatctgcttcacaggagtttcatcacaagatgatattatcaatacctctggcttcctcatcccactagagacaccactcgcttgatacttcacaacctctcttttaatcacctcaaaagaatcatcagtaccctcgtttttctcgacttccctcaccttcttcttcattttagaagaacccggcttcaaagtctcattcaaattatcatcaagagatttcttgaagatctttttagtactcgaacgccatggtttctccacaggtatctgtctcttcccatacttacacaaatcatgacacgaaccagttgatgctctgagataatgaggaatctttttctctttaggctttgaagtcattgccttccctgtagaatcacctcccggattcaaaccatcttccttattcatcatattctcaggcgttacaaatggtttcgcaatgtcttcatccatcaagaagcaccaaaacgatcacaacaatctgttcataagttcagacatagacaccacatcaaacagaatcactactttcatatatatacaaacaagaaataaacatgagatcaatatagccgtcttattttgcattgctttgtgaatttaaagtgtagacaactcaaaaaaacagatcagtgaagagattaaacacaaaaaaaaactaacagaaactaattaaaaacataaacactaaaaataggaaatgtcataagataaatccaccaagcaaacaatatatatccaatcccaccacatgattccaaaacttaaaacccttttggctgtaacttaaaacgaaccattttagcactaataaccaaaagaacatacctatcaaaaggtttcaaatttagttaagcaaagcttgaatcttggttatcaaaagaacaaatctgataaacaaaagcagagtgaataagttatcttcaacaatgtcataaatgcaacgtagactataaagtgaaacttcatcttgaagcataaagatccatactttacgtttctattgacaatgaaattgtataaatcccaaaaccaaataaaaaaaactcaaaattgcattcacattaccgattaaattggcttgcataatcattctgatctcaaatgttataagccaaagtaataatttttacctgttataagaactgattcaaaagcaaatactttttccaaagacaatgactttatcaatggcgaattcagaaggaaaaaaaaaagctgaatcctttttcttctgggtcggtgtttccttcctttctccgagatcgtgcaagcgacttaagaaaagggttttttatttttgggtggtgtctccgacttttggggtttccttaacgttggtggtggtgctggtggtggtgggggctttgcttcttctgcaatttcgctttccgcgttcgtcgcagaatcagagatcgtatttaatatttttgcaacctctctcttagatttttagacagaaacttgtggggttatatataaaagtacggaactttacttttcaatttcatcacctggttcggttttgtttactataaccggatccaaaccggagttgagtaagcatgaaattaaaaacttttgtttattcaattatgtattgtattcatgaagttttttggtttcatgtgttatttgattgagtatttatttatagagatagtcaatcttcttagttaagtgttggtattcaatttattaatttcctagttccattatatctaatcttcctttagtttttatggtatttatttggaaaagtttcaatcaaatttcaaattaaagaactaaatttaaccttttagctgtcactttaatagaatttcaatgtaaataactaaatagaaaccctttttcttacaatacttgtagacttttagttcaaccacttttggatttatttacactctttaaaatataagatagataggaaattttacctaactaaacaaagggaatcatatttttaacttttaatcgtaacaaaagccacttttatggagtatatcatccatagtttagagtctaaatttcacactattttgttaatatttaaaataaactttttacattagtgtgtgatgtaatttttgtggtatatttataagtcgcctagactcctacaaatgttaagtaaaagtgttttttaaactcttgaaagctaaagtaaatataaaattgtaaaccaaacacaacccagctcataaaaagtatgaaagctcagttttcatttgatttttctcaacgctaacggaatcaatcatttgaattagccattccgagtctccttatattttcattggaggaataaaaaagatagttttgaaaacaatacatattttaatgatgattaatgagtggtccgtttctaaactaaatactatctccaacctcaaagcaatcttccgccttttcgaaagtttttttctgacatcgtcaaacatatataattgaaatattaacagaactaatgcaacagtgtatgagtacaaggtagaggaagggtaatgttaacagaagtaatgcaaacgtatatgcaaaaacctttaaaagttgacacacacaaaaactcactactgaaacaatttgaccaagggtaatgttagtgtgttaaaatatcaaatttagattgatgaacactctctttaagactagactagagtagagatttgatttttttttcatggatatatcatatatgcaatacatagtcaaattttaatataatatttgtaagaaaatagcatatgatatcagttttttttttgtttttttgaaaaaaaaagcatatgatatcctgagtgtttttttttttgcttaaataattttatttatacattttcctagaatgttataagttcgtttagcagtttcaaaaggtccaaattgttacagtttagaagaaatgatttgcatactttagtgaagaagtaaatatatatgtaagcatatatatatatatatatattaactggataatccttgaaagaaacactaaagaggctttttcaaatcctagttttcttgtgtggtgggggcaaatggctaaaactctggccactttaatcatttcatctaagtggacaaatcattgaaaccatgtattaatgcataatccatgagacaagatagatacacacacatcttggtacaggaatagaaccacggtatctcattggagaccaaacttgaagcaatcacataacttgagccgaaagaaaaggaatatcacaacaacccatttatgccctaaaatcatatatataaaaagttgaacagcttctttctaaggcatgaaaaattattaacatcataagtaagattatcatccttgtagtctctctcttaccatgaagcagacgtaaagacacattcaatgtatccccataagtagtagataggtgactatgatatcatcatcttagtctagattatatgcatcttcctgtttaatgtccatttgtgaggagaactttgaagatcatcgagaggaagtaaagaacttagatttgattgagactaattctcgtaccgcttcagccattcccatcctatcccgtggatattcttcagaacactttattcccacttccaaaactagtctcaaccactcatcaaccatggttctgcctcctctgctcgtggaacacgacaataccgactttgtgtagccgtggaggttataaccgccaccaaatgaattgtctgtcggttttttcccagtgaacatctccaaaagtaaaactccaaagctgtaaacatctccttgtattgatggtttgcttcccattccatattctacacatatgtcaaagaaacaatagatattaagataggatcattcagagttaattataaacaatcctatttagcatacagagttttggtttatacctggtgcggcatagccaatggtacctctcacaccggcagaactgaactggtttagaaaggttttctcatcgaaattataaaggagccgagccaaaccaaagtcactaacatgagccgtcaaatcatcgtctagaagaacgttgcttggcttaatatcacaatgagcgacagggtcatgacaataaacatgcagatactccaaagcagaagccacatctattgctatgttgactttctctgcaaatgttaaagaccttgagtgattgtttgcactttccaaatcttctggctgtagccacatatctagacttccttttggcatgaactcatagactaaagctctgaaatcatttccttgggaatcaaggcttgagcaaactgttatcagtttcgcaaggttacggtgcctaatacctttgaaagattcacattccgctataaagctttttgttgctccatgtttcaggaggttcaaaactttaaccgcgacgagtttttcctcgaggccaagcaatcctttaaacacatcactgaagttgcctgaaccaattagattgcttgaagagaagccacttgttgcattataaagctcttcataacttatcttctcaaaaaacatccccacagtagtagaatcagatggattagtatactaccactaacatcgttcttcttcttgaaccaagacaaagaagccacaattatgaataaaaaaagcaaagctacacctacaccaacggcaactttctctccaagtgagaaaggctttttctgccttggtgattcaatgcatggctttagttgcatttctatgacgcctccacatagattttcatttccaaagacagaaactgttgtaccgttttgaaaaactcctttcgttggtacgcttccttcgaacttgttcaagaagattaaaaagactaaccagaatctttccttctagaagattatagctcatgttcaagtaccgaagcctaaatagcattcctacctcttgagggatattactttgaaaagagttgtcaccaagattaagtgatctgagaaatgagagattaccaatagaaggtgagatcgaaccggacaatttgaatcctccaaggtctagacttgtaactctttcttgtttccgaccacatgtaatcccaatccaatggcaaagtggaaaggagtgattccatgaagctaagacctctctcttgttttcagtaacttgagacttgaactcaagcaaagcttgcatatcagtctcatttgaaaacctagcttgagcaaaaactaagatgcaaacttgaagtaacatgagagcattgaaagcaaaaaaaagagagatcttcatgtcgattataagaaggataaaagaaaggttttgcttcaatttaaaatcccaaaaatgaaaagactaacacgaatttagcttaatggttacaaaactataagaaaatggtcaccaagaaagcaatttgcgtcgacttatgagatacgtcgtttgaataacacgacttctcatcagtcaaacttatgaccgtgtcagaaaaaaaaaaaaaaacacaatctcttgtattgacaaatcttctttcaaacatttgaatattaacaacattgatgatagcaactttcgaaaaaaaaaacatagcatatagttttgttcatactaatggaatctttacttgttagaaaagaaagctttagaattgaagaatcaaaaggatcactcttcttatatacccttatacattcccgccaaaactaaccgctacaggtaaagagagaaaataagagtagagagagaaacctaaatttaaagggaagcttggctaaatttcaggagctccaaaaatggaattgcatcgttgttcatcgttttcttctatgaatgaccattatctctattcatgtaacaaaacccattttctccaaaaaaagttgaaatttttcggttttgtattacctcgcgacatcttcttccttctcgggttcccaattccctcaatttgggaacctgaaaatctcttcctcaacttcatgatcaattcttcaggtatataaaccctttgatgataagtttttttcttgtggtgtacgttatctaacctaatgatatgttttcttccttcagaatgggtctcaagctctcacgagggcctgtaaaagaaaaatcacctttggaattcacaagggttcacattctgacttacttcaccacaaattcttacctacgtaacttggtgtccaagaaacgaagacggttaatcatcggtggatatgatctcgacatgtcttacatctccgacaaattattggcaatgtcttttccagctgaacgaatgagagcagtctatagaaaccctctttggcaagtcaagtccgtgctcgatatgcgacatcctgatcattacaaggtcaataaaacaaacgtctaatattaaaacatcaatcaactagctatttttattaacattgaaatttggtcaggtctataatctatgtatagaggaatcttatgatccagacaacttttatggccgcgtggagcgatttccgtttgatgacaatcatgttccatccctcaaaatgatccaacttttctgtgaaagtgttcattcttggctctcattagatcccaagaacatcgcggttgttcattgcatggtactttcttaaaaccaaatccacattgtagcattgccatattctaatgtactttgtgcaggcaggaaaaggtagaacagggctaatggtatcggcgtaccttgtttacggtggcatgtcagctgaagaagctcttgagatgtatgcaagcagaagaacaacaaacaataatggagtaagtccttaattttagctatggagtaatagagaatgaagctaataaacaataccatgacaggtctcaataccaagccaacgtcgttatgtgaagtactggtcagatttactttcgttcagtaaaaaaggacctcccgaggttaaattaccgcaagaacatagcagagagttgttgcgaattagactttatgatacagctaacgttgattccgtcttctttgtggtttcagaacttcaggaggtaatgatatatacactttgatgcattgtagactctgtttctgtttgatatatacactttgatgcgatgatgtatatgatgttaggttccaaatgagatgtatcgaccgtctgtagaacttgcaagaggttgttgtagacaattcaagaaagggtattgtagaagttcgagtccacggtattatatatctcatgtgaactgtgattcagaagaagatgaggaagtaacagacggagaagagccacatcttgttgttcagatggatacagagagttccattatcgacgaaaaaacttgtcttgatttctactttgacaaacctgtgagagtaagtcacaaaacaaatattcttcagacaatgtttttgataagattttgataagcatatgattcttggacaggttagtggtgacatacgcatcacattctaccagaaaatgattggaagccgccttttttatacttgcttcaacacagcttttataaccaatggcttacttcaggtaaagaattctccagatgcctcaaactcattgttctctcttgacattcttatcaatggtcatttcttgctccggcagttttccataggagagctagataaagttggtggtaacggaagatcgatatctggtcctgattttagcttggagttactctttggcccagcttgttcgaaattcggaaagtttctttcccgcgatgacctttctctctcttgaggcctcattttcagctcattggatttcaacacttgagtttttaaacggttctgtttcatcactcagccacaaaagaggcctgactagctcagctgagacctgcaaaacacttcaatggctgataacagtgtttagcatgtacaaatgcagaggcaaatgggagatcatcaaacaatgtcagcaaacgaaccactttctcaacaatgttttgttttgtttttgtagcagggactgcaattttggtaaatgatagacagtaataagatttatgggattctcttaccatccatttttttcattaagatggtctgtttccagttttaagaaccacattctctgttttgagtacatacatatctccatagcaaacgtaaaggaaacagttttattattattggaatacaacttaccatcaaactgtcttcaatgtcactgtgaagcataacataacaactaaaaacagaatagaaaagcaggataagagatctctttttatccttgagtcttgatctttgaaatcagctcaaaagatataccattatcctcaagtcgctgctggatatcggttgaaccaaacacaatgccgggtgtgtagactcctcctttaactaggctttcgcgctggcccaagactatcaaaccgcattgaacaagtgttatcggggtggttatatatccaatctcaggtcctgaaattcttgtaatgatttccaagtcaggctttgtttctccttgtgaagctagactctcttcgctgtacccacgacctatgaaccacatcttaaacgtagcgctttctacctcttcttcacttggacctttcttctggaaccaaccaaggctgaaaactgaagggaatttcaaaagaagccatcttccgaaggagaacttggaaagtaaaccaagtgacactccaagtgtaacatatcggaatatcccaaagagagatttggacgttatctttacaccaaaatgagcaggcttgatcgatgaccagaatgcttctctcttttgtatctgctcaggactttcattaatcccaggaagcccatgtggtttctctgttagagttgtgagagttctacgaacaactactgcatcagctgaaggtagctttaaagcccaaagaccaatcgtcttctggttttctaatgttggtcctttagcaggaggaccacaaatctgcaaatacattccaaactttaatattagccaaggcctactaaccaagaatgtacaatatcaacactatctcattctcaagcagaattgtctcaatgtcacattacgttaaaatgcattacttaccgttggtcttggccttcttggtcttgaacgtcttaattctttaagcttttctgcattagcaacacctaaaaccgcagactcataagtcccaaagttcccagcaatttttttgtcagactccaagctaaggtacgcttcaatctggttaggaaccgatggagatacccattgtttagcattaaagagaagacccaattcagcaggaattgaatcaaaaccacaagcagaaacgattaaagagccagtctcttctgctctatcatggtagttagcttccattctctccataaactcaggttcaccacttatatccaaataatcacacctacaaaaaccatgtcccaaaagcaaacaaaacttaataagactacactttttcatcaagctacaacttttgtccctagatacacctataaagaaccatgtagcaatcaaatgaaacttcaaaagattacactttttcatcaagtttctaactttttctaagctacaaattttaaccattcttataagctaccatttatcaagaactcaataaaaatttgatctttataagtatcactgaaacaaagctcaaatgttaacaatcacaagttctcaaacttcaaaaaattatcaactttttccagtttttaggttcacactgtaacttaaaacaaaattgagaaaacagaggaaaagattcacactttaccctgaatcagcacaagcagagacgacaggatcaccatggatacgaaacggtccaacacaattgaggatgagtttggtttgagtacagagacgacgaagtgaatcagggtcagatgtatcagcagtgaggatagcgacagaggaaggtggtgggttcgggcgggcggcccattcgagagattgggttaaacgggtcgggttacgacccgctaaagctagagactttaacggagaagaagacggtgtttgaaggaacttgagagcttctctgacgacgtacttaccggtaaatccggatgctccgagtatgaccatatcgtaaaccggttcgggtttttgggttgggttcatcgtgatcggaatctaagacggagaatctttttgggttcgacgacgaagagatagatatttcgaagataataatacagtaatagtgtctttatggagctttgtgtccaccgacaacgtcgacgttacacgtcattgtgagtgaaattgtaatttaaggaataataatctgatttgattttgattggtatatcaaatagtaacacttgacttcacacaccatttgtactcatattacgagaactacacgctgtctcagatttagatatagacaaagagcggcacgtagtgtaactaagatgtaactaccttactaccttaggaaaatgttaaacttgtttaaccaagttctttctctttaattggaagtttactcggaaaagctgtaagcaccacttgattcgagatattgaggactagcctcggatccgatgacttatttgtgttttcttccgtcaaatggtgatttttttcgttgatttcatttttatttgtggtctttttcgtatttttgtttatttcgtagatttcggtcttctgtatctcttcgttgtatctttgtattctataaacaaaaatagtataaaatatgttaccaaaaacaatctctcactagatgctccaagcgtttgttttccctccattaattgtttctttgatcacttgctcgcttccttgccttccactgttccacaaaccaatttcttgaactatattgaactttttttagcgcctatggattccgtgtagctaatacatttagaagatgtattggttcatttcgtatttgagaaaccctaacttcgattatggatgtatatttcttgattaatcaatcagttatgttaggacgttaggtgtgacatttttttatttctttgggcaaagttgttgagaatttatgcttctgtttttctattgcagatatttggtggtaacgggactttgtagcatatgatgatcgatatgggaatttgttgaggttatcgatatctaactgctgaaatgttaaagacgatgttaaagcaaaagattaaatccagaaaagtatcaacaaggttggtttaacaaaccattatgtgaaaagacattacaaccaatgagagcacaaaaagtttcaatcaagtatgtttttgtactgtcagaaatgtttgtgtggtggtaactctatattgatattgatttatggatataaagttataaactatcaaatgttttcttctcctataaggtatatatgtgaaatttacttatgtgtaaaaaactaaaaactaacaaaacaatggaaatttaaagttgctgctgaatttgtaaaaattaaagtttccttttgactgaaaagacccttaaaagcaatgcacctgaccaacaattatcattacacaactttaataagctttagtcttaaaccccaccgtctgttgtttcgtacatagaagatattattaggtcttttgtaaaaactatgatttttgttaagacatctgaacaacttgggatagattaactaactaatccaccttaattgtttcttagctttttaacttgtcggttgggtcttctctctttctctgttagacaggtgacaaagctaaatatgtcttttcctttctctctctcttttttgcaaagacaagaggaaaaaaagattactacccaatttttgtcccattattctctctcttgctgtttttgcggttgtgtttttgcagcttcccttacctctctttcacaagaagattcaacacaagaaaaaaaaaatgtttccttttacttttagtcattttgtcatgtgaacttttttttttggtttcctctttccctccttttttttcatcatcgtcttctttgtgtcttttgtctgcaatcccatttaatcttttggcctaatgtggggctaattcccccatattagacccgtttccaaatccggaaacagtttttgtttatctataaacaaatgggttgcatcagctccaagaatgtttcatgtttaacggaccagggtgactcaccgctccctgaacctggcttgctctccacgagccagcaacatcgagttcttattgatcattctttggaggcaagtcacaatagcaagcgttcaagaaaatcaaggagattgggcggttctgatttgaggattggtgtgagccttggatcgtctcataggaatatagaggctgagcaggcggctgctggttggccagcttggctttgttctgctgcggctgaggctgtccatggttgggttcctctaaaggcagaggcgttccagaagttggagaaggtaaaatatatggtttcttgtcaaggaagttacccaaaagacatgatattttttgttttgtgttgtgttgatgaattttttttgggtgtttagattggacaaggaacatatagtagcgtgtttcgagcacgtgaagtagaaacgggaaagatggtggcattgaagaaggtaaagtttgataatcttcaaccagagagcattaggtttatggcaagagagattttgattttacggaaactcaaccatccaaacatcatgaaacttgagggcatagtcacgtcacgagcatccagcagcatttaccttgtttttgagtatatggaacatgatcttgccggtttatcctctaatcccgacatcagattcaccgagccacaggtacaaaaactgcgaaattcatgtcttttttcttatgacattggatagagtttttgagtttttttttctctcttttaattcttgtcatacaagataaaatgttacatgaagcaactactatggggactagagcattgtcatatgcgaggagtaatacatagagacattaaggcatcaaacattttggtgaataacaaaggtgttttaaagcttggagactttgggctagcaaatgtggtgacaccttcgaataaaaatcaattgacgagccgtgttgtgactttgtggtatcgagctcctgagcttctaatgggatccactagttatggagtatcagtagatttatggagtgtgggatgtgtttttgctgagattctcatgggaaaaccaatcctaaaaggcagaaccgaggtaaaaaccaaattccatttcccgctctttattaacttcaacaaattttatatattgtaaattcatatattatacataacatgcatcttgatatcattgctttaagcttcatttttttctttccatttttgttttttggttttggcagattgaacaattgcataagatctacaagctgtgtggatctccacaagatagcttttggaaaagaactaagcttcctcacgcaacttccttcaaacctcaacatacttatgaagccactcttagagaacgatgcaaagatttatcagcaactggtgtttatctattagaaactttactctcaatggaacctgacaagcgtggcactgcttcatcagcacttaactccgaggtgaagcaaaaaaaaattcaatttcgcattcctccttttcttttacatctcagtttattttctttctgatttgtctcaatctggtcttagtatttcttgacgaggccttatgcatgtgatccttcttcattgcctaaatatccaccaaacaaagaaatggatgctaaatatcgcgatgatatgcgcaggtcagaattcgtctccttaccttctatccactttgtcgtttcaagttaaaaatctcttaatgcatattcttatacaggaaaagagcaaacctcaagttgcgagattcaggagttggcaggaaacacaaaagaccacatagagcagaatatgatccaaagaattacgctaagttaccaataagaaaggttcctccttctctctctctatctgaaattcctctatcagctttatttcttgtgtctcaagtaaggtttttaacgtgcaggacacgcttgaggttaagaacataccaaatgaggcatctcgagccactacaacaacacatggaaactactacaaagtatctgacctcccaatgaccacaggaccagccagcggctttgcatgggctgtgaaaagacggaaagatcctgataatatctctactcttacctactatcaacccagctcgaagagtcaattgagtggaacaagtgttgcatttgcaaagaacacttttggtttgaacctgaaaccagacaatgactcagtttgggaggttcagggaaacaactatgatgatgttatcgaggaggttcctagtcatgagagtaagcttagccgtattggagaacgacacggatcacttgatggttctggtttggatttcagccaaagagaggaggattctccaaagaaaactttagtaagtgctcttgtttttgtttaaatctttgagactaatacaaaaatatatttgaagttaaaatgtttgtgattgtttggtgttacaggagcatctacaatttggaaaacagagcatatcaggaccgttgatttttaaatcaggaaagattgacgagattttgcaaaggaatgaaagtaatatccgtcaagctgtcagaaaatcccatttacagaggggtaaaccggaaataacctgataataaaccggaaatagtctgattagtcctcttcatccacactaaaccagttttgggtttcttttgttttgcagaacaagatgacagataaaccggaaaggcaaactactaagaaagacaaaaagtccacttttttcatcgttgttagacaaaagaggaaacaaaagaaagaaacgttacttgaaaataagtaaattccattaatactcaaattgtttgtttctagtcctcttcgttttgtgatgtaatagaggaaaatattgtaacaaaaagtttgtcatttttagaggaatctaaaaaaaaaaatatagagcatgacatttttccctcgttaaagttgtttttttccaagattattctcatatttagtagacagtagagacatcagattatttacttattacaacattggcaaacaacacacaactctttaatgcaaaacaacttcatccaacattgaagatcacaaagggaatgattctccttcttcaggaattaaaagtgtaggaatttgaccgttgtcaacaaagtcaatcttgctcaatcttagacaacataggaccttttctggtaactcctcttgtttttgagcctatttgcaaaaaaaaacaagtttttaattctctacatcgttcaacaagaatagtgtcgtataaaatatgataacaaaaacattacttggatagttaagccgagatcaagagttccatttttgagtcgatctctgaatgcttcaagcccttttcttgaaaggtagctaaaccgatgcacgtccaaatcaatctcaaagtagttaggaccctggacagagagagaccgaaccgatcatatgataattaggtgaccaaatggtgttttgttggttagaaagagtatatatggtgattttataaaaaccttgaagaagttgtgttgagggcgagaaagcacgggtttttcattgtaagcttgtataagcttcttttcagtagaactcagactgagttcatctgggttaactaatccggctactattttaagcctttcacgaaacggaacgatgttgtcttttgcaaaccctttaactttttccatctcatcttccactagtttctgtaacaaaccatctataacgatcaatgcgcgcattcacaaaaaatggtttaaaaaaaatgaaacggtctttaggtctttgatggttaaccttgatgctgtcttggtattgttgagagatttcatttttgaaattttctcgtagtttaaagtaaagtacaatgctcatgccttctccgttactatcaccgagaaacattgcggctggataagttggcaactgcaaaagccaaattcattagagtctttaccacacatctcttttgatctaaagaaactttcttagtggtttttacctggatgttgacaattagaagagcagggaggtttgccacagctttgatgttgggaagctcaatgtgttgggctatatgatcaatcttccttggacacacaaacaagtcaacaccaattggagtgtatggacattggtttggagccgggtgttttcgtttatctctacaaatttatcattgtattaacagtctacatccacttagagccggttaaatgcatacatatatgtatatataaacatagaagttaaggaatatacttgaaataagtttcgccacgtaacttcaagtttgatggaggtatctcacaccaacttcctgatgattgatgcttctctttgacatagcacggaatcgtgtatccggctttgggacggtacaacaatcttttcgacgaccctttatataaaaaccatttcaaaatatacatgttaaaattacaggctcacataagaatgcatatatacatgttttgatgttgtacggtttagtaaaaaatttgacaacttactatgttcggtaacttcttcaccatcacatgatcttctcttgaaagaaacctgataaaccgctgacttccggttttgagatgtgggggagttcagagttttgtcgttgaaactaaccgttggcaatggcatcaaccggctcaaattggattttaatgctttttctttagggttagggtctaactctttcaatcctttaaagctactataagtatttagtttcttcttgttgtttccaataataccagacaaaccattagtatctttatataaaccgttgctcataaacttctcgattttattaccgccatcaatcttcaagtaactctcatggtattcttcgtaatttccatttccatcaacaatgcatgaagaagcctcaaactcaaccacttgaccatttggaattttacccattacgccaccctctaaccaaacattatcagctgaaaagaatctagactttatcaaatattcaataccacccaaaaaaaaaaaaagagacaaccaaaacatttcatatatatgtatagattgacatttaccttcatgtaggctaataaagtcgtcatcagagtcagagaaaagacttgaagaatcaaaccatgcatcgttttgagaaatatctgcaacaaaaaccgaagatccaacattcaccacctatcttttttttctggataaacaagaaatcaatatcacaactctcatcctaatgctacattgatactcaccaaaagaggtttggattccaacatcacttaggcgtctaatatcagacactttagatatgtttttagaaaatctgcgacggcctttccttcgtggcctaagtcttcttgaatgtgttgacatacatgtacccatttttattacaatttttatctagaacctgccaaagaaaaaagcacatatgatacgccgatgctttaaatcacatctccaacatccaaatgcagttttttctcaagagatgttgttaagatatgagatttgaataaacttgtaattaatagaatcatctctacatactaagacgtgacttttatagtttagttttacattggatcaagtccttgcctgactttttcctgaacatttgtatataaagattcattctaaagcatcaaatacaagattctttcgaatacaatatatttttgccgttcacgaaataaaatagataactagtttactatgaggaagtgggacaccggacacaagaagatttagcaacaaatcttacatgaatgagacatgttagagtttgaccaagtcaaaacctacaagttgaagtatattaaacataacaaaaaaaaatgagaacgattccattaaactgtttgttcaataggaccaaattaatatctttaagcgaacatatatactaaacgtcattaagaaaaattaaacatgatttaacgtaaattagaatttacattgatagagacgttatcacgttacaatcagattcaggaataacaaagggggttgtattaaaacaatgattttagatgtaggatagatgagttgtgtctttagagatcttaggagttaggatagtttagttgtgaattcttagctacacatacatacatatttagggttacatattgagttgagatttttccaaagtagtggggttgtcttttcgtcttgccgccgtgaccgaagaagcagacgacgtcaagtttcattgaggattattcaataatcttaatcgacttttcatcttgttaattgggaactttgtcgtttcttttcttatgggacataatgagattacattggtgcagcaatagaaggctttctttgttcatcgtttcgctgttcttcttttcttgagttcattttttattctaaaatctttttatatcatccgaagttcttccttcaaatctcattaaatcacaaacaattttcacaacaaaaggtaaaaaaaatattacaactgatgcagcgcatcttctatctttctcattatctgtttttattcaagctttcatactctgtttttatgggctttctttattttctcggtttagttattacgtgggctttaggtttttgattttcttttccattatgctttagggtttgatcttttgtaatcaactatttaaacctctctcctacgtgaatagacggcagcttttttattgaattattcagagcttttaaagcatctatctcttttgtttctcagctattctgtaaatcaacgagctacaaattttgttctttgttcggtcactatgtgaatcaacgaacttaggacttgttacggttaggctgcgccaacaactccaccatctacatatacatttttgcagccattttgttaaatgaattctggagttggaacttatttacaatggctgtcactagcttattcaatgcaaaaagttaactaccaaatcaaagcaaatcttattcaaaggaatatgcttttattccacggcctaattatttttgccaaaatggttaaaatatttaaaaattaaataatcatttgaaagaaaactttaaattgatttaaattataaatcttttaataaaaatattattaaaaaaaataaaaaaataaaaaaataatttcaccgaacatgattagatagtaggactagatggtaggacatgtttataatattataatatataaactttacaacaattaaataaccatttgaaagaaaacttttaaattgatttgaattaaatattttttaaattaaagtattattaaaacaaaaataacaaaataatgtctagttttactgaacaaggttagtggtaggacgggtttggtcgatggtattacgagacggtatatcacaagtgaaatccattagatatgtttaatttcactgtgcatgattaaatggtatgacaggtttggatcgatagtaatacgaaacgatatactacgggtgaaatcgtagatataaacaattaaattttatatatacattatcttaaacactaaacaaagtaaacaatattaataaaacaaatatctacatatacattctatataacatattttattaaaaacctagccccgcggtataccgcgggtcaaaatctagtatatcctaaaaattcaccgaaatctctccaaatcaattgtttttctaaattccaccaaaccctcctaaatctttaattgaatacatatatctctttgtgtgtgtaaatttatatgtatatacatagaatgtttggttttgtttagactttaattgataagtgttagttgagaacctgattgttgataactgcaacacattattcaggtctcttctgttgaaaattttatggcaataatccttttcttgtggcaataatccttttcttagcgattcaggaggacacgaggcacactgatattttttttgattacatatacagatttgttcaaatttaatgtattgttttagtctttttctgttgtccatttattttctagcatacacctccactttgaagttatatttgtctttttttggtaaaaaaaactaatttagtttaaaagaaaaaaaaacagacttaataaataatccaaataaattgtttcaatcatataccaaataaagtaatgtttatttgtttacttgtttaccatctccatggtgttgtctatttcctaacgattatcattgattttttatcttttactttaaaaataaaaagttagacaaatcttgacgaattttttacatacatgaattttttttggcaaacccgataaaatggttcatagtgataatagaactgaactgaacataaattgaaaaaaaaaaaatcagctaatctatgggtctgtggcagttctaatgactctttcaacaagatctagccatattttagtgtatgtgaaagggcatgcaaagaagatatagtcttaggcttttctcgtttcccacaaaaatacactattttgaacatttcatcgcggttttgaatagtaattttagttttagttatataataacttataaaaaaatatttataatacaaaaaaatctttttaaatgtataatctaatttttatggaaatgtaaaaagggtgttacacttttttcagtacgtattaaaaatttatctctcatcacaaaaatctaaatcacaatatttaaaagtattaactagtaaatctacttcaaattaaagattattattactatttaaatatctcaccaataaaaactcattgattttttctaatttcttacaaaacattctccgttggaaattttctttatatatgtatattctaaattaaaataagaaagaaatattcattgtatggttagtcaaagtacccactcacattaatggcaacttgtatatcaggaaagatatttctgtcttcaaaatgttgaataattagattctaaaaactgtataaaatattaaaatctaaccattttactaatatattttatatttttgtcataattaggtaattactattaagttaaaacagaaactgatctacttcttaacatggttgtgtgtaaattaatttattgtttaatatgattcatgaaaaaagtgtgataccattagtcaacagtgtgactcagatttacctcagcaaaggagagtaaaaacaaaggaaagatgataatatatgtgcccatagactcttttcttgtacttttcctcaattttctagtggtgcaatttttcgtgtgcatgctcatataatttgtatcatgggttccatttttttcttgcatcaaccatactctataagattatgttaagagtcttctacgtctaaatcatttttccaaaaaaaattctgttcaatttgaaggtttttgttagaaacaaaatctatgaattttatgaaaatttactgatttttatcggtttagacaatcagtcaaaccacaaatttcttccttcaactaggggacctattcatatagtgaacgaaatgaattttgctaaaatatgattttgatttggggcgtatcaccttttggtggattttctagttagattcaccatcaattattttttattgttcattttataggtagtttttttctcataatccgtccattttattgatattttaccttgatatatatttttgttatagaggtttaattatatatttcttttttatatttcaggttttattatctatagtaattaaaatggatggatcatcggaaaaaactaccaataaattagtatcgattctaccaaattataggattggtaagactcttggacatggatcctttgcgaaagtgaaattagcactgcatgtagctactggtcacaaagttgctatcaaaattcttaatcgctctaagattaagaacatgggtattgagatcaaaggtatgtattatttacttcaattttgttactcttttttcatttgtacaaaagattagaggaggtataacacctctctaaatgtatatatagatgtatctttatttttcttcacgagatctaataggtctacgagatttcggcaaccaccatgatcaataatttttggttttgataatataattacaagtttatttggtatggattgtattttaatactgagaaatcagaaaaatatttttattttaaaatctgtttttttctacgaaaatactttatccgaatcttaggtctcgaagccgaaagactgttcattaatataggtcactgttatgatttgtttttttttttggactactttatgtggcaaaaaaatattacgctttatgtcttatataatcgttgttatttattagtaatcttaataaatgaaattgtttaagtctcttgtagtacaaagggagatcaaaattctcagatttttgatgcatcctcatatcatccgtcaatatgaagttatagagacgccaaatgacatttatgttgtgatggaatatgttaagtctggagaactatttgactatattgtagagaaaggtaaattacaggaagacgaggctcgtcatctttttcagcaggtttggtatatatatagtatttatccaaacattttgtatttcataaaaccttatatccttttcgattggcaacacttttatttaaaccatatattctcagatcatatctggtgtagagtattgtcatcgcaatatgatcgttcatagagatcttaagcccgagaatgtgcttttggattcgcaatgcaacataaagattgttgactttggattgagtaatgtcatgcatgatggtcattttttaaagactagttgtggaagccctaattatgctgctccagaggtataagagattaacatattcttcatttttatttcatgaatttggatatatatttgaagtatcaattactcacacctgaaacttatttatataggttatttcaggaaaaccatatggaccagatgtagatatatggagttgtggggtgatattatatgctctgttgtgtggtactcttcctttcgatgacgaaaatattcctaatgtattcgagaaaataaaggtattaataaacaacgatctttttataaaaatcatatatattacacatggttatgaattttttctctatttctttagagaggaatgtatactcttccaaatcatttatcacattttgctagagatttgataccgagaatgcttatggttgatcctactatgagaattagcattactgagattcgtcaacatccttggttcaataatcatcttcctctttatctttctattcctccattagataccatagaccaagctaaaaaggttagaatttgttttcattaaattgtaccaaaataacatcatttttatgaattcagttaattttgtatcaattttactctttctagattgaggaggagataattcaaaacgtggttaacatagggtttgatagaaaccatgttgttgattctcttgccaatagaatccaaaacgaggtatgagtgttttcatatttcatataataatcctattatactcaaaatagttttataaatgatactcaagttaaatttcgttactttaggctacagttgcataccatctaatcctagacaaccgaaaccaaaattctgttcccaatgaccctttccaatccaagtttaaagagatttcggtacttactctctttctctacaacctgaatttaagaaaaataaataaacattacttctctatataattatattttcgttttaatcctacaaatataggatggtatatttaattcgacgttaccagttcaaaatattacttcacatgttggccattcattttcggcattgtatggactaaaatccaatgtcaaagatgacaaaacatggacccttggacttcaggttagtccatgcatggttaatgtttaatccattgttgttcatgttactttagcattcaatttcgtctcatgttttcttaattttctttctattcaaaacagtttatcaatatatatatcaaaataattgtttggaattttgacagtctcaagggagtccttatgatatcatgactgaaatttttaaagctcttcaaaatctaaaaatatgctggaaaaaaatcggactctacaatataaaatgtagatgggtccgaagctttgcttactataagaatcatacaattgaggatgaatgtgccatcatcttaccgaccgtcatcaaatttgaaattcaggtatatttatccaatttaagatattatactataatttaatagtccataaataacaattttttttgttttgatgcgaatataaaattatcaacaatttacattgttaaaatctatttagagcaatttcttaaatgcaaacctaatttgtatcattttggttgttgttatagctatacaaagtacgcgaaggcaaatatttgctggacatcctaagaattgatggacctcagtttatcttctttgatctatgtgttgcgtttctcagagagctaggtgtcctctaaagctcaaccatcactggtgttttagatgattattgcggttagctaggtcctctaaagctcatttcatcaatgttttttcgatgattattgcttcaatgttttaaattcaattatgttttctatgtttctgtatttatggattaagtaatccttgacaataaacaaaaaaaaaaagaagatagattgtatttttttttgcattaagttttggaaaatgcatgtactttttacactttctcgatttatgatgccaattttgtttgaaaaacacacagtacatgcattttcatagatttttttatatttctaaaatataatttaatgaaaccacatttgatcaattaactctgtttagcaaagtgattgatcacagatcaagttgaatatatatttaccttctaagagattacaaatcggtgattgatcaaactaaagaccaaagatacacaaccaactctcatggagcttcacgagaaactcctcagtcagacacacaatttatttctcctcatctcttagaattctcatattgtctatccaatttcgtttagtgtgtctgactcaaaaacactcgagtatcgtcaaaagtaacgtcagcagtattatattgtagcgtacgttattcttctagtattttttattacaaagaaaactaaactgtaacattagatttttgtcattgaaacccatctatataaaccaatcagcatcactttgaaaaccatcgtaataacgtgtttaacaaaatacctttatttctacgtctaatatttgacttggtttaagtagtttagagactgtttttacgagacacaaaaatcaaaaaactcttgttctacacaaccgatataaaccgatgtcaattctttgctttcaaaattaatgaacttttgaaggaatcaaaaccatttcttatgggctaatatttttcttaaatgggccaatatgtatccatttaaaggcccaaatatttcagaaccatcctacaaatctccagcctcgttgtggtgtggtgtagtgtgttttggagaaaaggacatttgcaaattattctattatttcaaactagtccctaaagttcttactaatagtgaaaagaagcactaggaagacttcaacagtgtagtcaactttaaacttgcaacgaaagaccaatgtctctctctcgcatcgtcttcttagttagcgatttcctcatttttcttatacaatctgattcggatcgagttcttctttgatgggtaattgaaaagtttgaatcttgtttacgtaaaaagcgatctgattcaaaccaaaactgatatttttgacgaatcccaaagctgcgttttttgatcttcaaagtatgaatcaggtaaaactttgtaaagccaagtttgatttctgagtatcatcaaatttatgtgtttatctttagtgattttgttaccgatttgatttgtgttagatgaggaacggcgatttagggtcagaatcatttggtacttgcttgcttctgtctcttccagaagatgttattgctgttatagcacgttttgtatctccaagagacatttgcaatctgagcttatgctgcaaaagtctatgtgacgttgtggattcagaaaggatctggcttgtgcagtgtgaagtagtaaaggttcttcctttatctgaaataatccaatggcgaattgggatttcttcttataaggcgctttgttggtttcttggagaggtaatgaagcctcttgttggtgtttgggttcatcaaaaccctgaacttgggaatgttgtttatgtcatgcctggtttcttgtctgttgttgggtgtcggataattccacaagaggttggtcctttggggattgaggaggctcgagttatgtggtcacctgtgtttgagattatctgtggttttgatggctccgccaagtttttcctccatgggagagatggaaaagtgcaatgctgtctgcaccctggtttcgttaggggcattgagaagagttgtaatgtgcttctacttgaggttgagacgaggcgagagaagaagttgtgcaatgagattgatgagactgtgttgttggtagagacgggggttcagttaccatttcgcaaactaccatttagttatagaaggaatttacttcacatagtgacaagcactgttggtatacctgtacctgatctatcaagtgaaaagttatttcctacgtcaaaagatgatgaagcggtgttgttggaacgcagaaccatgcttcttaaaatgcacaagtttggtggtgattggaatcacatgaacctggaggatgagtgcacaaatattccaaatcaggtagacataaacaaatcgtggaagcatctaggttttgaaggcgatattcgcaacatggacgctgagaatcagacacaaaggaagagctttagtaggtatttcagaagtggcataaagcatattctcgggaggtctagttcttcaaagaacatgtcttcttcaagaagtgagactagacctttgaatctccaaaagtttcttaattttggtgattcaataggtcttagtctcaaagcttccaatattaagttgtcttcttaccaaggttggccaaacatggacgaaacccgttatgccctttataagctaccgattaaggatcccatcgctaacgatgagtatgccgggttatggggaggaacttttggctggccaccaggaaaatgtacagaagataaaccagggaaggctttttttctactgatgctctcttatgaagaatctcaagatggtactgagagacttcttatagggacaaaaatactcgaaggaactcactacgggatgcatcctaatggatctgcaatgtttgttataaaaattgattcgccatcctttgagggttttcctttcgacacaaatggagaagattttgagcattcttacgcaggagaaggtactgcaaagggttatggtttccggtatcctggttacaaacctggtacacttttcgtgacatctaaaggtcttctcatgttcatttggaaagcaactaaagctgtgttgacattgcaaagacttaaccttggagagctcttaaggaaaggtgtatgtgtatcgcctttacctccatgtttgaattttgcttatttgataaaatgtcacaccaatgtgtttgcccctgaacgaagaagatcataggagattgctgcaacaaatttgaaactcacaagtcttctctatttccaatataataggctcattatcatcattgatatttagttatttacacatgtagtaaatataaaacatgctgctaaaggatacacttgtggacttgctactgtttggatttagtatcaaacctattactcaaactacatagatgtgttggactattcacaagctcaatgttaatcaagtgtaaatgtgttgcaaagtaaaataaaccatacaaggaaaaaagaattccacaaatttagttttttttttttgttgcaatacattgtttggtatatacacacattaaaagcatagtaaaaattattatctcaagatctgttgcaaagtgttccatttccaacattgatgtgtttcttcatacaatattttttactcggaggaagacgaataggtcgatgacttggcaaacacgtttgagtaagaccttttagtatatgtaaaattctttgttggaagcaaaggtgaaacacaagaacctaaactcttcttcaagatctctccaaggtttattctttgcaatgtaatcacatcttcagttccttgccaaacgaatgcaagaagatcattagagcttacgaaaagggaaccaggttttgaaccggggtatcggaatccataaccgtcagcgataccctctcccgtgtaagaatgctcgaaatctcttccatctgtatcaaatggaaacggctcaagggaaggcgtgtcaatatttacaacaaacattgaggatccattaggatgctcagcaaaataactgagtattttcgtcccgaaaagaattctctcactaccctcttcagattctccataagtgagcattaataagagaagggactcatcttcaatatctttcccagggggccagccaaacgttcctccccacaaacccgcatacacgtcgtgatcgagaggtttcttcattggtagtttatgaagggaaaagttgtctgcgctcatgattggccacccttcatatgaagacatcaaagtgcatgaagctttaagactaaggcaaaatgtattaccagagctgagaaagctttggcgattcgaacgtcttgtctcactgctcgaaggcgaattgatctttgaagaactgaacttcccaagaatatgtttaatgccacttcttaaaaaccggcgaaagctcttcttccttggtgtaacctctatctgatcctctatatcctccatgttgtcaatgtcatcaccaagattttccaacaatttttttatgtctatctctatatgattgtaacacaactgctcatcctcctccaagtttatgtgcttccagtttccaccaaatttgagcattttaaggagcatgtttctgcgttccaacatcatcgcttcgtcatattttgacctggtgggaaataaatttcctgttaatggttcatcgactcgtagacttacatgttttgtcactatatctagtaagttcattctatcactgaagtctagatctccaaatggatcccctacttctctctcaatctcattgcacgaactcttctctgacctcggctcaacttcgagtagaagcacattgcaactcttctcgatgtccataacgaaaccagggtataagaaactaccttgtttgtctcttccatggaggaaaaaacccttagagccatcaaagccgcaaattatctcaaacaccggtgaccacttgacttggccctcttgaatccacaaaggagcaaccttttgtggaattatccggcacccaacaacagacaagaaaccaggcatcacataaacaacattcccaagttcagggttttcttgcacccaaatcccaagaagcggcttcaccacctccacaagaaacctacaaagggccttgtaagaagagatcccgattcgccattggactagttcaatcaaaggaagaacttttacttcttcacattgcacaagccacgtcttctcggaatcgacaagggcacaaagacttttgccgcacaagattagattgcaaatgtcgcttggagaaagaaaacgagagataacagcaaacacatcttcgggaagcgtaagaagcaagcaagctccaaacgattccttgttcatcatgtactaaaagtccaattcgcaacaaaaccacccaaggtaattaaacacacaaatgataaaatatatttatgaaagtactcaaaatccaaatttaagagtaaaatagcaacggccttacgaaattcagactttgaaatcaagaaacacagcctttgggattctggttttggtttgaatcagaaagcaaaagaaacgaggttatagaggtttctgaagatcataaaagatcttaaagcagagtacgcaaggaaaacgttgaaatcctcaacataacaagaaaggcaaaaagacgacgaagtgtttgataattgtttgacaacttcgttaaatgtagttttaaaatttaaaactacaatacgtgcacatggaatttttcaaggtggtttcaaaattattatagttgaagatttaaatactagtgtctaaatattatggaatagtatgttgaacgggttttaattaccagtctaagttttattagtttttgacagaagttttaaagctattatttctttacctcgagaccattttccaaaaaaaaattcaaccatcgtttcatgtaataaagatttcggctctctcatttttcacaaccaaagagctcactaaaactacatataacgatgtagaccttttatttctttcatgctctaatttaaaccgttttaactagtaaaattttaaagtttttttttatggcgagcaataattttctggaaagttctataactaatggctttacccacacaataaatatctgggatcgatcatcgatgagaacacggtaaatggctctacatatagtgtaccacgtacgaccaggggcggatctagcataataacacgacatacggctctacacgaatagtccataataacatgacaaacgcataatgttatttggggtgggtggggtggggggggagagggggcaaaatggagatatttccataatacatatggagatagtttcatgaacagtccataatcttatatattgttaaaatgatgttttattcaagaatttaaatgaattcatttctaaaagattccgcactatatcatccaaaaatgatgtctgtaagttgtaaaggtagtagaatcgtatatatgaaagttgaccaactctctctatatgattgagacatcgttactttagcatttgccatgtatctattaaataattaatgtaaactcttcaacttttaacttatatgttagtgatatatttattatttaattttacatattatattattttatatatttaattgtactattactaaatttatttaatattacatgatttttcaataaaaccattttaatagttttctcatactcgaagattttttttgtaatccaaactcaaagtatgagtgtataatagtcatgtattacttaatgatttgagtaagttattcttttaaattgatatttatataataaatcactgatgataaaaaaatacgtaaggagcttcatcatcaaattcttaggtttctaaaatccaacgctaccctctgttaaattgctttaagacaaacgttgtttataaattatgtgtatgatgcattgttgagaatgttattagaaaaaaaaaattttaatactaaaactaattgcttattgcatgagtgaaagattagataaataaaaattatatttaaattaaacaatacaaaaaaatctcgaaaaaaaccgcggcgtaacgcgggtgatcacctactaatatatgttttctgtacataaaattataaaattttagatacaataagtaaaagtacatatgagtttaacgaaatttcagtttaagtaaaaaaaaaataaaacatttgcgtcatattttcgtacataacaagccatcaaaaccgcatattatctcaaacacaggcgaccacataagttgtccttcttgaatccacataggaccaacttcttgcggaattatccggcatccaacaacggataagaaatcccaattacagggttcttttgaacccaaatcccaacaagaggcttcaccacctctacaaaaaacctacaagcaccttgtaagaagagatcccgattcgccattggactatttcaaactgaggaagaaccttaacgacttcatattgaacaagccatgtcttctcggaatcgacaagggcacaaagacttttgcagcaaaagattatatcgcaaatgtcgcttggagaaagaaagtgagagataacagaaaacacatcttcgggaagcgtaagaagcaagcaagcaccaacctttaacgctccgatcattatgttttacgagtcaaattcgaaacaaccctacaaaatgatttatgaacgaagagatgagaatagaaggatttgaagatattcagaaattaatctttgcagtaaagtaacaacgaccttacagaattcagaagataacgcagactttgaggtattctcgtttaggttgttttcaacttaataagagatacaaaaaaggaatttcacaagtttggttgaaatttcaaaattatgatagtgggagtttttgtagtgtttaaaatcaaattggatgttgaacgggttttcacttttaaattggatgtagtactagtagcacggtcacagtttcatataaataaaattatgctgttactttttaaattaaattcttaatataacttctaaatatggacctaacaaactaaaaaaagaacgaaacaacaaactaattcaacggaatgatatttctttttgagatataatatttaattaaaaagaaatgaagaaaaagttatatacagaggagagaaacgaaaaatagagcacgccaatgaaataatagtgtctaacaaaatagaacatttaggttgaagatggtggaaccaagcaattaaagcttctagttggagatgttcgtacgatgtgtatgaggcaagtttcccactaatagcttcatcgatgagtctcaatgtaccaaactgggtggctagcttgctgatgtcggacgcctccgttttgtctagccaaatgggatagatcgttgcttggaagatcagcctggcaagaaccatgttaatacgatcaataggagatgaattgaggttgtgaagtgtggctctccaatccggattagttcttgtgccgagtagttggtaagtggtcttggacaccacgaagagtacatgcctttacttgacctcattgtcatggaaaagatcttgcataagaaatagaagcattgagacacagaacaaaataatacgatgtcaacgtaaaattgcgaataacgttaaatgtagacatattaactaactaaagtaaagagtcattgttgtattaactcaagaagaatttgtctgagtttctctactaaaagtcggaagcaagaagaagacggtaagatgtaaataattttgagtatttatataaggttaatagacctgtcggtttacagagatagtggaggagttaagaaagatcatggaaagattttttttcgtgatcgtgtgtgatttaaatttggagtagttattaatttctcgtaatatatgttaatcggcagttacttttgtcagaacgtgcaattcgattttttaggttcgtagaaaataaaggaacgcatgttctttgtatttacaatttttttctttaaaaattaattaacctaaatttgatgatatgtcacatttttattggtcaaatggcttgtgctttaagaagataaaggatattctatttatttatataagaaaacattatacaatagctcaactataacatatcatattgttgctttgtaaaaacaaaaggctgtaaaacaccagaaatatatttttataatatgttatgttaccttaatcagtataatttttattattataaattaattacaagacacatgaacagaaagctaaaaactataaaataattgagtactaatcgtcacaatacacacttatcacttatatagtcttcaatacctcctaaccaaatctttataattaaatccacaagagcagcatatgaatatacttgtatccgcctttttgtggagaacaaaatcacccatacaacggatcttgcataaatagcaaattggccgagagagacgattgtttggaagcaaatcaaatgaccccttgttaccaatcactaaactgtatccagaccttgagtgtattagattttgaaatacacatttagtatgaagagtggagccacattcattgcatttgtagaaccaactctttgaatgtacatcctcttcgcatatcccgcaacaatatctcgcattcacatttttctcaccgtagcataatgaaagaggatgatcatcatatttatctcttaccaatgtgggtaaagttgcgcatgtgaaacataaattgtagccaccacaatcatctttatccttgcaacgtagataaaaccaacaattcaagtcacaaccttcacaccttgagtaaaacaaatcaaaaaatacaaatagccaatgtggatgactttcatgtttaaatgcatcggaaattgaagcacatcgcacatcaatgctatgttgggtgttgttttcatccccagtaatattatatgagaaaccagtgcaataacgttgacatgtaacacaaaaaaacgaattttcgaagtttgcgccaagctgacttttggtacataacataagtttgtgtgtgcttatctcatgtcttttctttagaggaagattagcgcatgaatcatgaagaataaaatcacattgtgtgcatttatagcacatttcagaataaaaaggaagagtgcatgcacaacaacgttctcttggttcctctagtctcgatgatgatatagaagccttgagattgtgttcatggctaaaatgttttattagggtttgatctatcacttcgaatggtttgatttcttctttttcatcttcttcgggtaccccttcaagttctctcccatcccaaatgtttgtatttgttgcacattttgaatgaaaaaaataagaacaaatcgagcaagcatatgccccatagtcttcattgacatgctcataacataccctacaaatccacttcccagtggaaagagaagaaacatgagagatacgatggtcatgacggttgatgtatataacacgtggtaagaagatgcaagctcgatggatcatgaaacaacattgaagacaaagacacggatattctgtactacacaacccacatgcatcacaagtgaaggggatttttatcattacttggacgagttcatggtcatgagccttagtttggtcaaagatgataggttttctcgcacaagggatacatatactgaaagaacattgtgaacagtgataaagtatttgaggataccttttggtttcacaaagataacataactttgagttatagctatttgtgaccttgagagggtgtttatgacgagaaggaaggttagcgttaatgcattcctcgtggagacaaaacgagcagtaatcacacttgtagccttgtttgttgtcatggtaatcttcgtagcacgcatcacatttcgatgagagttttgtgtattttagaggagattgacaagtggggcatcgtcctacatccataattgttatgactttcttcttaccttgctttttattttgtttaagaacaatgtgtcaacttctcttttcctttttgtctttttcttttgcagggtgtttgtatattaaaaggaacaatcagagaaaaatactaaaaaagaaattattctctcaagttatactaaatcttttggacgttgaatttataaatatattttaacctgatttggaatattagattacctatttgatacataagagtaaggaatagcttttaagaaaaaaaagaatctatttctttgcgtatttacatcataatactaaagattcttacaacaaagatatcaatattctttccaagcaaatggtttttggaagaaggtagttagaagcttcgacgcgattgctattctttgagctttctccttgggtgaaaaatactttttgttggttactgatgagaaaagttttctctaccagttgtattatgaatctattcttttaactatcaaacatttggccctctatttttttggtcgttgtcgctagttaagcgattgagaaaagaagaggctcaacgactgaagttaatgatttcgtaacaccgtgatgtctaatacttattactaaagcaattaaactagtgaaatcattaaaaaaaaatactttcaaacactataattaaataattttaagtaataaataatcacgaaaacatagtaatatattaactaacataatataatattaacaccattaaaattaaaacaaataactgatataaaaaatattccaaaaacatgaaaactgaaccatagaaaagcaaaattatttcattaaaataataacagaccaaaattataaaaaccaggaaacaaaatcatcgtaaaaaacacccaaaaaaaaaaactaacaaatgtttttttattgattgtcatggactaaacattttcatttctacctacaaaaacatcttcatccgatatgatttcatctttgcatttttctcggtgacttttactttcttttttcgattctcccaaatatataattttccaacatggacaacctgacgtcctgaccaatcacacttttatataaaaaagatcaaaaaattaaaaggcagaatataaacaacaaagttatacgattcattcaactttttcttagaaaaaaacaatataatcagaatataaacaacaaagttatagaaacaagacttaagaataatatatacaaaaaaataaaagtaagaatataaacaacaaagttatagaaagaagactttagaataatatagggtatacaaaaacaaacttaccgaatcatcgtaatgaataccatccaatatacgtctaattttaaaatcaagaatcgaagtagtctctttcacatagaaaaccaaactcaatagtcttttgctaaaatattccacaacattaacaaatgtgcttaatattactgttactagatgaactaatataatagtctaatgatctaagaaaaacagaaataactataatatgtcttaacattaaaaaactcaatatgaaattgtagttaaactcaattaaaaaaaaacgaattgaatatcctatcataaatgttgttttgcatgacccaaactacattgcttcctcgctaaaaccgatggcacacctaaatctgggtgccattcacacctaaaaaatacatagaatacgggaaaacgggaaatctcttttttggcaataactacatcaaataaataagtaaaggattgataataataagggataataatataaacaatactcttttaagtaattttgtcatctaatagcaccgaattattttgttatttgaaaaattaggataacggatcgtagtcgaatcacattatcattcataaatttatttagttacccaacaatgatttggttgaatacacaattaaaaaaaaaaacttgtaaataacataaatatctttattttaaagttgattgtgtttctttaatcagtatagttttatccatttacaaattatgataccacttagacataataaaatgcatttaaaaattctataaataatttaattgctaactgccataatacacgtgtggcatatggtacgttcactctagtttcaaccgcgtaagaatctgggcttcccaagaaaactcttagaaaagccacaaaaacagcatatgaatatatttgtattcgccttatcgtttagcactaaatcacctgtagaacgagtcttacataaatagcaaatcggccgagagagacgattattcggaagcaaatcaaatgaccccttgtcacccaacactaaaatgtctcctattcttgagtgtattagattcttaattacacatttagtatgaagagtggagctacaatcgttgcatttgtaaaaccaattatttgcatatacttcctcttcgcatatcccgcaacaatatgtcacattcaaatttttttcaccatagcataatgagagaggatgatcatcatatatatgtcttaccaatgtgggtaaagtagcgcatgtgaaacataaattgtagccaccacaatcacccttgcaacgtagaagaaacataagagccaagtcacaaccttcacactttgttccggctctctcgtctatcagaattacaaataaccaatgtggactttcatgtttaaatgcatcagaaattgaagcacaccgcacatcaattgtgatgtaaaggtgaaaatacttcttaatatacgagaaaccggtgcaataacgtccacaagcaaaacaaataaacaagtttgcaaagtctatgccaaactgacctttgtcacataaagtaagtattgtgggcttatctggtgtcttttcttgagagggagattagcgcatgcatcatgaagaataaaatcacattgtgtacatttgtagcacaattcagcataaaaaggaagggtgcatgcatagcaatgttctcttggttcctcgagccttgatgatgataatgaactcttgtgattgtgttcatggctaaaatgttttattaggttttgatctatcactatgaacggtttgctttcgtctttttcatcttcttcgggtactccttcaagttctctcctatcccaaatggttaaacatgttgtagcacattttgaatgaaagacataagaacaaacaaagcaagaatatgctccgtactctccattaacatgctcataacataccctacaaatccacttcccaggaccaagagaagaaacatgagaaatacgatggtcgtggcggttgatttttataacacgtggtaagaagatgcaagctcggtggattatgaaacaacattgaagacaaagacacgggtattctgcactacacaacccacatgcatgacaagtgaaggtgatgcagcgcatcttaaactctccttttacttctctcttttgaattgggctttgttttaatttcttttacttgggctttatgtttcagttttgtttagataatccttagtcggttaggattagggtctttgtttcttgtataaataggacatctcctccatcaaggagcgggcgttttattgaataataatcagaagctttagctttcttcattctcttgactatcggctattcgtttcgaatcaacgatcttcaagctcagtctttgttcggctattccgaggaatcaacgaacaagtgacgcccccttctctcggctattccacggaatcaacgagcttagggttctctattggttacgctgcgccagaaggggagtttcatcggtacttgaaggagtttatgttcatgggccttagtttgttcaaagatcagaggttttctcgcacaagggatacatatacgaaaagaacattttgaacattgataaagtatttgaggaattctattggtttcgcaaagacaacataacacctggtcatgcactttgatgagattgagagggtgtttatgacgagcaggaatcttgacgttgacgcagtcctcatggaaacaaaactcgcagaaattacacttgtagccttgcttgttgtcatagtgatctccgtagcaagcatcgcattttgatgagattcgtgtatattttaaaggagaattatgagcagggcattgtcttagttccattgtatccatggttgcgatgttggaactttcttctaaccttgttctcttttttatggaacaaagttttggcttctcttctcacttttgtcttctttttttgaaggatatttgtatatatgtaaaaaatcaaagaaatttaggaattattattctttagcaaaaaaagatatatatgaattattctcttacatcgatggataatatataatagtactttaattggaaaatgagattacctacttgatacttaaaagttaggaatagctttcaagaacgaaaaaagaatctagtcctttgcctactcaaatgacatcatagtcacaaagattcttatttcaattttgttttttgaacaaagagattcttatttcaaattatcgcaactattaccaaataagagaaaaatcttaaatctaacagtcacttttagataacttaattagtttctctctaaattttaacgtatttgatagtagaagcaaataggtttaattcacttgatagtaaaatcactttctgctgaaaaaaagaagtccaaggagaaaactgtctttcttctccatgaagttaaatatggtagtgggtactaactattcaattttttttaaccaaaggaatctcataccaaaattcagactaattcccgtgcctataaaatccaaaatatattgccattaaagatttatggctaaaatgcaaggtttaccacaacttggtttttcatagtattagtaaatttgatcactaattagtatttttgttgtgtgtgaataataagtaaattttattcgaaaaaaaaactgttttacatcaagtgcagcttttgtgttaagtggttctcgaaagaaatataatagtcaaattaaatagaagtgaaagcagctttttcatcttgatccaaaccaaattgcaataccagcatatcttctatcaccttgttaacatatggaggagattttgttttggatttgcttgtcattgattagtattttcacttgagtagtgagaagttacaatcattgattatagcttcatttgtataaatctagtatcaaattatgttacctgctcatcacatgagacattctcgaggatgtatgagtctcttcaaaccaaaagcatctctacgccaggaagatgatatttatgttttttaatatttaaaataataatattacaatgcgtataattgtaacccgcataacatcttcaattttcgttgcctattctatatcatgtatgaaaaaagagaaaaaaaaatgttagatacttttcggtgagcgttgtattagcaactgatgtagttgatcgacttacaaaaaatgattaaaaataaagtctatagccatttataaattggattagccttcttgatagacatatttacttcttctagttaattaaaaaaaaaagatgactctttccgaactagtcatttacctaagtgcgctttgttttttggttaaaattaaaccactagacaacgtgaacaacgagaacttaggcccccaagcctaagcataagagaaccactaaatcacgagtctctcagcaattcttttgtttttgtatgactttttttctatttaaagttatttaattattcggcaaaaagctaatatattaattttcattaaaaaagaaaaattataaacttaactaaaaataataattttaaaaaacatttatcaagtggtagtggtcggatagtaagatgacattttaagaggtatcagtacattagatactacaatacagtttgtattacacacgttagaagcatattgactatagtatagtttagttttgaaatgcaaatgacgtcaaaatacataaaatttggagaatgtacctcaaaaataaaacaaagctaattgagtgtttcaatcaaaacattgatgtgtttcgtacaatgttctttattcagagtaagacgaatcggttgataacttggtaaactcgtttatgaaggaccttctcatataagtaaaattcttcgaaggaggcaaaggcggcacacaagatcccaaacccttcttcaagatctctgtaaggtttagtctttgcaacgtaatcacaactttggtttctttccaaacgaatgcgagaagatcattagtaatcacgaaaagggaaccgggtttagaacctgtatagcggaatgaataaccctctgcgataccttctcccgagtaagaattctcaaaatgtgtttcatttgcatccactggaaagggatcaagagaaggtgtatcgatctttacaacaaacattgcagttccattgggatgacgcacatagcgctttccttcgagtatttttgtcccaatgagaactctctcactatgttcttcagattcttcataagtgagcatcagtaagtaaagagacttttccgtcttacctttaggacatttcccagctgggcagccaatcgttcctccccacaaaccagcatacgcttcttgatcgacggctttcttaactggtagtttataaagtaaaaagtggtgaaagtgcatgtatggccaccctttataataagacatctcactgtaggaagctgtgagaccaagaccgaatgtatcaccagagctaagaaagctttggcgattcgaaactctaatttcactctgcgaaggtgttgtgttctttgaagaactagactcccctaaaacattcgtgttctccgttggtgtgacctctatcagctcctcttcatcaaaaaaatagtcatcaccgagattttccaacatctcgtttatttttacttgcatgggattgtaacacaactgatcatcctcctccaaattcatgttcttccaatttccaccaaacttgtgcattttaaggagaatggttctgcgttcaaccagcattgcttcatcatatttcaatgtgggaaataacatttcatttaatggttccaccacatgtagacttacatggcttgtcacaatattgagcaaattttttctatcactaaaagcgagcatccaaaatggaatctctccctcctctcttgaggctcctctctcaatctcattgcacgaactcttctcttgcctcggcacaacatcgagctgaagtacattgcaactcttctcaatgcccataacaaaaccagggtacaagcaactgccttctttgtctcttccatggaggaaaaacccgttagagccatcaaacccgcagattatctcaaacaccggtgaccacttaactcggtcctcttgaatccacgaaggagcaaccttttgtggaattatccggcacccaacaacagacaagaaaccaggcatcacataaacaacattcccaagttcagggttttgttgcacccaaatcccaagaagcggcttcaccacctctacaagaaacctacaaagggccttgtaagaagagatcccgattcgccattggactatttccaacaaaggaagaacctttacttcttcacattgcacaagccacatcttctcggtatcgacaagggcaggcagacttttgccgcacaagattagattgcaaatatcgcttggagaaagaaaacgagaaataacagcaaacacatcttctggaagcgtaagaagcaagcaagctccaaacgattccttgttcatcatgtactaaaagtccaattcgcaacaaaaccacccaaggtaattaaacacacaaatgataaaatataattatgaaagtactcaaaatccaaatttaagagtaaaatagcaacggccttaccaaattcagactttgaaatcaagaaacgcagcctttgggattctggtttaggtttgaatcagaaagcaaaagaaacgaacttttcaataacccatcaatatggaaaaaaggttatagagttttcttgaagatcttcaagcagagtacgatgggtttcagattatcgcaaggaaaaagttgaaatcttcaacataacaagaaaggcaaaaggcgacaaactgtttgataattgtttaacaacttaattaaatgtagtttcccaagtggttttaaatgtaaaactacgatatatacgtgcacatggaatttctcaagtgaattcaaaattatgatagtggaagatttatgtagacgtttaataattgtctaaataattgaatagtatgttgaacgggttttaattatcaatggtcatggttttgacaggtctaagttttattagtttttgacagaagttttaaagctattatttctttaccttgagacctagtctcgactcgaccattttccaataatttttcaatcatcgtttcctgtaaagattacggctctctcacgtttcatgtaaagatttagtttcatgtaaaccttttatttctttcatgctctaatttaaagatttcgtttcatgtaaaccttttatttcgttccatgtttcaactataaagtttattttttatggcgagcaatgattttctggaaagttctataactaatggctttacccacacaataaagatcggggatcgatcatcgatgagaacacggtaaatggctttctagcataaaaccaacagtcacttttggataaccaaattagtttctttctatattttaacgtatttgatagtagaagcatataggtttaattcacttcatagtagaatcacttgcgtgcgaaaaagtgatgctgaaaaaaagaagcccgaagagaaaactgttttacttctccatgaagttaaatatggtagtgggtactactaactactcaatctttttttttaaccgagggaatctcataccaaaattcagactaattgtcgtgcccatagaatccaacatttattgccattaaagacgtttatgggtggctaaaatgcaaggtgcattagtttttctaaaagacacctgaaaagattaaatgcatggtctaccacaacatggttttttcatagtattggtaattttaatcactgattagtattttttttttaacaatatgtaaaatttattcgaaagaaaagaaactgtttactgcagcgtttgtgttaagtggttctctcaagatatacaatagtcaaattaaacagagttgaaagcagttttttcatcttgatccaaaccaaattaccatacaaccagcatatcttctatcaccttgttcgcaaatggaggagattctgttttggatttgcttgtcactgattagtattttcacttgagtagtgagaagttacaatcattgatcatagcttgatttgtataaatctagtatcaaattatgttgcatgagacattctcgagggtagacatgatgtatgagtctcatcgtttctcttcaaaccaaaagcacattcgcgccagaaagatgatatgtatgttttttaatatttaaaataagaatatcacaatgtgtacaattgtaacatgcataacatcttcggtttttgttgcctattccatatcatgtatgaaaaaagagaaaaaaaatgagcgttgtatttgaaactgatgtggttgatcgagttacaaaaaatgtttaagaataaactttgtacatctttgtacatatttacttctcctttttttaattcattcgttgcagataaaaaagaaaagaaaaaaaagtgactctttccgatctagtcgtttacctaagtgcgttgtgttttttggttaaacttgaaccactagacaagataaataatttcaaatattttttctactaaaataatatgaacctaggcccccaagcataagcataagagaaccactaacaattcttttgtttatgtatgactttttctatttaaatttattaaattatttggcaaaaagctaatatattaaatatgattaaagaaagaaaattataaaactaaaataaaaaaatgtatttttaaaaacatttctcaagtggtagtggtcggatagtaagatgacttttcaagaggtatcaggacgttagatactacaatacgtagtttagtttgtattacacacgttagaagcatataaactatagtatagtataattttaaaaagcaaatgacgtcacaatacatttaatttggagaatgtaattgagtgtttcaatcaaaacattgatgtgtttcgtacaatgttctttagtcggagtaacacaaatcagttgatgagctggtaaactcgttcatggaggacgttctcatataagtaaaattcttcataggatgcgaaggcggcacacaagatcccaaacccttcttcaagatctctgtaaggtttagtctatgcaacgtaatcatagttttggtgtctttccaaacgaatgcaagaaaatcattagtgatcacgaaaagggaaccgggtttagaaccgagatagcggaatccataaccatctgtgacaccttttcccgagtaagaattctcaaaatgtatttcatctgcatccactggaaagggctcaagagaaggtgtatcgatttttacaacaaacattgtagttccattgggacggctcacaaggcgatttccttccagtatttttgtcccaatgagaactctctcactatattctttttcataagtgagcatcagtaagtaaagagacttttccgtcttacctttaggacattttccagctggccagccaaacgttcctccccacaaaccagcatacgtttcgtgatcgacggctttcttaactggtagtttatagagtaaaaagtggtgtacgtacatgtctggccaccctttataataagacatctcagtgtaggaagctttgagtccaagaccgaatgtatcaccagagctaagaaagcttttgcgattcgaatgtctaatttcactctgcgaaggtgttgtgttctttgaagaactagacttccgtaaaacatatgtgctctctgttggtgtgacctctatcagatcctcatgcaattcaaaaaaaaagtcatcatcgagattttccaacatctcgtttatttttacctgcatgggattgtaactcaactgaccatcctcctccaaattcatgttcttccaatttccaccaaacttgtgcattttaaggagaatggttctgcgttcattcagctttacttcatcatctttcaatgtgggaaataacatttcatttaatggttccaccacatgtagacctacatggtttgtgacaatattgagcaagtgttttctatcgctaaaagcgagcatccaaaatggaatctctccctcctttcttgaggctcctctctcaatctcattgcacgaactcttctcttgcctcggcacaacttcgagctgaagtacatcgcaattcttctcaatgcccataacaaaaccagggtacaagcaactgccttctttgtctcttccatggaggaaaaacccgttagagccatcaaacccgcagattatctcaaacaccggtgaccacttaactcggtcctcttgaatccacgaaggagcaaccttttgtggaattatccggcacccaacaacagacaagaaaccaggcatcacataaacaacattcccaagttcagggttttgttgcacccaaatcccaagaagcggcttcaccacctctacaagaaacctacaaagggccttgtaagaagagatcccgattcgccattggactatttccaacaaaggaagaacctttacttcttcacattgcacaagccatgtcttctcggaatcgacaagggcacgaagacttttgccgcacaagattaggttgcaaatatcgcttggagaaagaaaacgagagataacaacaaagatatcttctggaagcataagaagcaagcaagcaccaaataattccgtgttcatcatatactacagagtccaattcgctgcaaaagcaccaaatctaaaccaacacacacaaaaaaaaaaaagatttacgaacgaaacgtattcaatgctaacaactgagggagttgatgatacttagaaatgaaatttaagagttactagtgacagccttaccaaattctgactttgaaaacaagaaatgcagcctttggattcagaaagcaaaagaaacgaactttacaatggtttttagattacacaaaggaaaaaggttgaaatgttcaacataagaagaaagacaaaaaggagacgatgtgaggaattcttccgtaagtgaatttaaaaattatgattgtgggattattttgaataaaaagtttttggaggccatttaaaccttataataagaacacatggcgtcgaactatgaaagaaaaaaaattcatagaaattgatattcatctcaagtggtttcaaaattatgatcgtggaagatcttttatagagctggataattgtttaaaattgaagaggatgttaaataggttttggcaaagtccaaacttatggtcatggttttgacaagtccaaagtttaataattttataagaaatatttacatatggggtaaaattgactttctgaaccatgttttgacaaagtcatttgggcttctcatcaattagctattaaggcttttttggaccgatttgtcttctgaattgaacagttctcgttcgatacggttctaaatttttgtgtcattatgttattaaaaaaaatggaaacaaaaccaaaaaaacgagagtaaagagaaatgaattatgatactttactcaaacgagtagcaacggaattatgattatatgtaccattgtttcggtagtatatacgtgtaatatatacgaattcttacattacaaacattggttaatttgactgtcatttgatcacatatgttagaggaattcgaagtatggattgttacaccatttccggttcttttaagaatatgtgcaatgtttggtatctataatggtgcatacggctagttagccaaattctatatatttagtacgatttatatgatatttctgtttaaatgttattctttttatataattgttatttatttttaatgaatattatgttacacaatattattggtggagactagatagtattctaatctagacccttaaactatataataatattgagatacacgtacacgtacatgagcgctccaaacagttatattctaaaaatacataaatcacataagttttttcctatatgtgtacacaataatatttactggaacttacatggtacaacattaaagtagttgtaagaaatctctaacaattatttacgaagagattagatttaaatattttgttagtatatctcaatacgtatcatgcatatataatatttaaatgaaaatatatgactatctaaatattttcgctttctatatgacaccattcatagtctctacaatgttgttagacatgactaaaaccatgtgggaggtaaagtttacttttctaagtttaattctggaggtaaaatcatgtgggaatcatgtgggagcacccttgagagaagatcttctaaagtctaatctcttctcgatttctttaagctttatattcaaatcatgttttgtgttttcatgatcatgtctcagtagtttgcttgttaggtttataaattctcaaaagggattaaattgttagatcgataaactgttaggaaaaaccaatagaattcttcacctagatttgattttatcactagttctcgattgatcacctagaatgtaactcatataataaaaggttaaacacaaaagtacgcttattaccggaactattttagatgggcaaaagtagctaaataaatacgagagttggcttagatactttgtgagcatatcaaacccattcgttaatgcgtgtttagttttacggatttacagacaagttagaattcctactactatgcacaaataatcaatacatatgagagttggttgattatagttttgtgatttgagttctagaacggttcgataataatttttaattaattgctagatctacaattctgatatttcctgagaaattcttaagcctaactattcctccaccagatttacatcttaaattttgatttttttgctatttttaattgtcagttatttatgtttagtttaattcaaaactattagtctattgtgtaaactagagagttttgtggaattcgactctaacgtactacaatgatctcttatttgatagagtggtcttttggcaatttgacctatattagagatccatgcaagcatgttatgtcctcctagagaagaatagcaagattaaaaaaaaaatgtaatgaattgtgcataagatacaaccaaactcatatactatggaaattaattaaatacaagaggctcaagagataatattgtttcatgaagaaaattcatataatataaatataaaaaatacagtcatagatcactaagagcatctatgttggtttgctcatagaaaactaagagaaaaataagagactcaccattaagaaaatagaaactaataaaaagagagtagagagactggtaagaaactctgaaatgtgctatttattaaaaagaaatacacaatttataaaatttattcttatgctggcttaattaggaggtcataagctggaacagaattgcataaaaaatatggtttttaggtaaaatatatcaaattatgaacgccatttgtttagaggttgtggaggacgttcatccattttaaaatatattgcatccattctagcacttaattcatatcgtttaccacatagaggatgctttaaatctggacggtacgcttcaacctcagtaaaaaacttcatgttaatcccttgcctgaaaagacagttccaacgtgatcgctcggttccgtcatccttgaatttaatgattcttgtacctttaaagtttaaatattggactcctacattagtgtttccagaacggcaatgatattgaagaattctacttggaccaagtgtgttcttaattacaatctcaatttccttgcaagcttcatttcctacaaaataaatggcagtaactaatatgaaaaatattagacgactcatttgttcaaacttgaaatatttgttgtggtaacaaggacatcatcatgtagtatttatagtttcttggtgtgaaagatgttttttctttacttagtaaatagtattgtttttaaaagtgtaagctaaatttagaggcaaacatgaatgaacaaattaaaaatttggtcaaaagagattttagtgtcgaaatttatggtttaccaataagattaaaccaaatgaaagcaacaaacttattacaattgacatcgaaacttatcaacagtttcgataagtttattggaaacagtttcgaaagcaacaaacttattacaattgacattgaaacttatcaacagttttttgtccccaaaaataaaataaaaaaccatatcaacagtttattggaaaattgtggaattatatcttaaatgtgttgtaaattaaaaataattcatttgaaaagaagattatgtgaaaggtatgaaagaaaaattagcttcataaccaataagcaaatatccaaattttaaagaataaagtaagcacgcgatgaaatattttgatttgaattaagcaaagatgcaaattaagtttttgtgtgaaacttagagactaactgaaaataaaataaaataaacagttatctatcaataggtaaaagacattgagcaaagagaatcacatgggctcatgaaaactagaaagagaattaactgggattgtatttataactgttcctgaacacaaaacacgaatataagttatcctgttttcttagaaaataactatccatgtaatgaaattcttagaaattaaactgctctttgtcaatagaatttcaagcaagttttaacgtcgagtttgatttgttcatcaaatgctataacttcaacttttgttggttaagaacattttgttcatctatgttctttcaaaattggtttcggtgtcgaccgacaccaaccctagtgtcgctcgagaaccaatgggtatccaaaaatactcaaaattaaaatatatcctaaaatatatgagttatatatacttgtaataacccaaatacccaaattataattataggtccatttttttgcttgtacctcatatacttttggatagttttgataaatttcgatatattcaaaggatagaaaaatatttttttgggtatttttggatagacttagttatcttaaaatatccgaacgggacctaacccgaattcaaaagaaaccgaccacaaaccgaacataatattttactatggtttataaataatatatgtaaaaaggtagattattaattaaacaacaaattaatgcttaatttagatttataatttgattattataaatttttatatttataaatatatttatttaaagggagatttgtaaaactaccctttttttactacccttttgaaacaatacccttttatgttgtctatttttaaaaatatcctttcttttgaacaaaatgaccaaattaccctcatctaatagaaacatgtaattagaaactgaactttttccgccaattttttggcgccaaaattttttttcccgccaaaaaaaattccgccaaatttttttttcgtaacaatttttttctcagccaaaaaaattaatttttaaaatccttgtaaatatttatttgcggcaaatagatttacaagggattttaaaagggttttaaaagatttacaagagattttaaaaaggtttaaaaagatttataaaagcttttaaaagagttaacttaaaatctattttggcgggaaatatttttttgaaattttttgccgggaaatttttggcgggaaatttattttggaatattttatgcaaaaaaatattaatatttcattttgttaacttaaaacaatttccaaataagggtaaaatggtcattaaaaatttaaagagcgtaaaaataaaaatggataaaacaaaagggtagagttgaaaaggggcatcatgaaaagggcattagaaagaatttttcttattggttaaaacatatactctaaaccgtttattatactttttatcattcaaacatttgtactgtaccacttatttttcattgactacacatatttctcatactgcgttttttcttaacaaatcgcactatactactaaatccatttgatctgcattgccaaatccattcctcccattggaagtctatatttacaataaagatacacgataaatgagaccaccattaatggttctacatccatacgtgctcactaatcactttgtgtgtgctctatttcctgaatttgttacgtgtgattagactaccggaaggaacagaagattgcattagtcgaaagaattttgctcttcttattttatcgcttagtagcatgtttcactttgtggatatcaaacttctgacttttattgaagctagctaccactactttcaataaactggttaatctcaattaaacaattattggtgacggttgcagtttcttggaagctgccactctcaataaactaatagaaattgttgtcttgacttttaattttttgatacagtaccattaaaacttaagaaacttaaaaaagactcacatataccaagaatccgaatccaacccgaacccaaaaatattttgggtatttttggttattttttcatttttactaaaataaccgaaccgacccgaacccgaaccgaaaccgaaccgaatttttagaatacccgaatggttctcaacctcctacccgaatagacccgatacccgaaaaaaaagaaccgaacccgaatgggtacccgaatgcccacgcctaactcaaactaacaaaagcaccaatcgctcatttccaaaacccattaaaacaagtgtagtatcacaagtcaatgaaatgtctaagttgaataagcaaagagaccaaaactcatttataactcagttagtctaaacttgaaaccagtaattgttaccttaatatcacaaaacctgtttctagtccagtatttgaagcttgcaacttctcagaaagcaaccatgtcaatccctgcaacaaaagaaagatggaaccgattcaagtcttagtgttttgcaaagggtttcatttcttaaacccaataaataaacacttctttcgtcaagaacaagctaaccaaactataaatcagaaagtacaaaaaccttctagcaacaattcaaaattcaaagacctcaattcaaaattcgaagagaagagcacaaagtaaaccaaattcttagaaccacttcaattttagctaagctaacggaaacccagaaacataaggatcgaaatacaagagaagagtccagagaagataacagaaacccagaaacataaggatcgaaatagaagagaaagtccagagaagaaaacaaacctaaagacgtcgataaacagtgaagcttgatgaacagaggagcttgacgaacagaggaagctagatgaacagaggaaggtgttgaacagaggaagctcgtcgggcaaatcgccgagagatcggagaaggagaacaaagtcgagagaagaagctgcgtcaaacgcaagtgttttagggttatgtttttttgtgattttcaaaaatattcaggacattctgatcattttctatgtcgatcgcaatttaacgctgaattaaaatagcgtcaacaccctaagtatatttcttttttttctgaccaacaaagtcttctgatctattttactgatttcaacatcaaaaaattatttgaaaacactccgcccccacccacccaattctacctttaccggagtatttttaacgtacggttgaaaaagaaaagaaacaaaaaaacccggcccatctgtatacactcaatagacccatgattcttacaaccttcaacaaaatctaagcccaattcacggcccatctcaaagcttccgctttcatctttcacaacttcgatcatctctctcagagaacacatccgatgcttctccgatcgccattcacagagccaattgcagagaacaaggatccacgtttgatgtgtttcttctgattcacgacaacaaagatctgattctcaattgagttttgaaatcaagctctcatcactctaccacatcggctcgagccttcaccattgtctcttacactaagagcttattcttcgttcaccatttctctattactgttgtctctcatagtagaagctgagcaaaatttggatctctttcgatcccgatctcttctacaaaactccgccatttttgtagtacctctctcgtgatctgcagcaaggtacactgaacttgtctcgatccacttcctcttacgctttccgttttcaaaatctccctctagaactgtgattagctcttaagttttcgtggtttttgctattcctctaatgaacttagttagatctgaatttgtgttacttaagtttagttttagtcactgaaaattctgaaccatggatgttacatagatcgtataagttactgtatatatccgaatttggtgaaatgaaaaagtaagaggaatctctaatctgaatcctgttattgaaaaagctttgactatttgcagcttgcatgcttggagtgtgttcttgtgattgagccaagaagttggggcgagtatggggtatcagaatcatccttcgggaagtaactcgttccatggagagttcaagagatgtcactccaaaccgtctaaaggtgcggtggcgtccatgattaattctgaaattggtgcagttttggctgtgatgaggagaaatgtacggtggggtgttcgatatatagcagatgatgatcagttagagcattctcttatccattctttgaaagaattgcgtaagcagatattttcatggcaaagcaattggcaatatgttgaccctagattgtacatacagccctttttggatgttatattgtctgatgaaactggtgctccgattactggcgttgctttgtcatctgtttacaagatcttaaccctcgaagtttttactcttgaaactgtgaatgtgggagaggcaatgcatataatagttgatgctgtaaaaagctgtcgtttcgaggtaacggatcctgcctcagaggaagtggttttgatgaagatacttcaagttctactggcttgtgtaaagagtaaggcgtctaatggattgagtaatcaagacatttgcaccatcgtcaacacttgtttgcgtgttgttcatcaatcaagctccaaaagtgaattgttgcagcgtatagctcgccacacaatgcatgagttgattagatgtatcttctctcaacttccttttatcagccccttggctaatgaatgtgaattacatgtcgacaataaggtatatcaaattaatctttcctgccatcttttttaaatgtttgttgtacatgtttatgccctatagatagaagattgaacatgcacaaaattgttttgtgctctgctaagcatgttgatgaataacttgtaaggtgtattgtattgaccatcttgaagctttctgatgactaagcgtgcaaaaattagaagattgatcatcttaaaacttatgttgatgactaagttgtaaagtgtattgtattgaccatcttgtcaagactgtttgctcttcacaaatttctaacgctattctttcttatctaggtgggaacagtggactgggatccgaattctggagaaaaaagggttgaaaatggaaatattgctagcatatctgatactctcggcactgacaaagatgatccaagttctgaaatggttattccagagacagatcttagaaatgatgaaaagaaaaccgaggtcagcgatgacttgaatgctgctgcaaatggtgaaaatgcaatgatggcgccttatggtataccatgcatggtagagatttttcatttcttgtgtaccctgttgaatgttggagaaaacggtgaagtcaattccagatccaacccaatagcgtttgatgaagatgttcctcttttcgctctgggtttaattaattctgctatagaacttggagggccttctttccgtgagcacccaaagctgttgactttgattcaggatgatttattctgtaacttgatgcagtttggtatgtccatgagccctctgattctttctacagtttgcagcatcgttcttaatctctacctgaatctccgtactgagcttaaggtacagcttgaagctttcttttcatatgtacttctgaggattgcacagagcaaacatggctcttcttatcagcaacaggaggttgctatggaggctctggttgatctttgcagacaacatactttcatagctgaagtgtttgcaaatttcgattgtgatataacttgcagtaatgtgtttgaagatgtttcaaacctgctatcaaagaatgccttcccagttaatgggcctttatctgctatgcatatacttgcattggatgggttaatttctatggttcagggaatggctgagagagtgggtgaagaattgccggcttcagatgttcctacacatgaagaacgatatgaagaattctggacagtgagatgtgagaattacggagatcctaatttttgggttccctttgtccgaaaggtcaagcatataaagaaaaagctgatgcttggggctgatcgttttaaccgtgatcctaataaaggcttacagtatcttcaaggggtgcacttgttgcccgagaaacttgatccaaagagtgtggcatgtttcttcaggtatacatgtgggttagataagaatgttatgggagatttcctcggaaatcatgaccagttctgtattcaggtgcttcatgagtttgccaagacgttcgacttccagaacatgaatcttgctacagccctgcgtctttttgtgggtacctttaaattgtctggcgaggcacagaagatacacagggtactggaggcgttttctgagagatactatgagcagtcaccacacatactgattgataaagatgctgccttcgtgttagcttactcgattatcttgctgaacacagatcagcacaacgcccaggtgaaaacaaggatgactgaagaagatttcatccgtaacaacaggacaataaatggaggcgcagaccttcctagagagtacctatctgagatttatcactcaatccgccacagtgagattcagatggacgaagataaaggaaccggcttccaactgatgacagccagtcgttggattagtgtgatttacaaatccaaagaaacgagtccctatatccaatgtgacgcagcatcccatctggaccgtgacatgttttatatcgtgtctggtcccactattgctgctacatcagtggtttttgagcaagcagagcaagaagatgttttgcggagatgtattgatgggttattggccattgcaaaactttcagcatattatcatttgaatagtgttttggatgatctggtcgtgtctctctgcaaattcacacccttcttcgccccattatctgctgatgaagctgttcttgttctaggagaagatgccagagccagaatggctactgaagctgttttcttgattgcaaataaatatggtgactatattagtgcgggctggaaaaacatactggaatgtgtcttgagcctcaacaaactccacattttaccagatcatatagctagtgatgcagcggatgacccagagctgtcaactagtaacttggagcaagaaaaaccttcggcaaatcccgtgccagtcgtatcacagtcacaaccctcagcgatgcctcgaaaatcatctagttttattggtcggtttcttctgtcttttgattctgaggaaacaaagccattaccaagcgaggaagaattggcagcttataaacacgctcgtgggatagtgaaagattgtcatattgatagcatattctcagacagcaagtttctccaagctgagtctctgcagcagcttgttaactctcttataagagcatccgggaaagatgaagctagttcggtcttttgcctggagcttctgattgcggtaacgctgaacaaccgagacagaatcctactgatttggccaacagtttatgagcatatcttgggtatagttcaattaacattaacaccatgcacgcttgttgaaaaggctgtttttggtgtactgaagatttgccagagattattaccatacaaggaaaacctaacagatgaacttctgaaatcactccaactggttctcaagctgaaagcaaaagtggctgatgcatactgtgaacgcattgcacaagaagttgttcgtcttgtaaaagcaaacgcatctcacgttagatcccgtactggttggcgaacgattatatctctgctatcaatcacagctcggcatccagaagcttctgaagctggattcgaagccctccggtttataatgtcagaaggagctcacttgttaccatcaaactacgagctctgtttggatgcagccagtcactttgctgaatcccgagttggtgaagtcgatcggtctatctcagcaattgacttaatgtcaaactctgtgttttgtcttgcaagatggtctcaagaggcgaaaaactcgattggtgaaactgatgctatgatgaaactaagtgaagatattggaaaaatgtggctcaaacttgtgaagaacctcaaaaaagtatgtcttgatcaacgcgacgaagtgagaaaccatgcaatctcaatgctgcaacgagctatagccggtgcagacgggatcatgttaccacaacctctatggttccaatgctttgattccgcagtcttcatattgctagacgatgtgctcactttttcgatcgagaattcaaggaagactctcaagaaaacagtggaagaaacgcttgttctcgccacaaagctcatgtcaaaagcttttctgcaatctcttcaagacatctcacagcaaccatcattctgcagactttgggttggtgtcttaaaccgtttggaaacgtacatgtcaactgaattcagaggaaaacgcagcgagaaagtcaatgaactcatcccggaactgctcaagaacacattactggtaatgaaggcgacgggagttttattaccaggtgatgatatcggaagtgacagtttctggcaactaacgtggcttcacgttaataagatctctccttctcttcaatctgaagttttccctcaagaggagcttgatcagtttcagagacgaaacgcgaagcctgaggatcctccggtaccgggaaatgaggtctgagacggttttggtggaatagagaaaatttgttctatacagatgaaaaagcttaatcaaggatatcaattttttttttgcagtatagcttttttgtttttaatatagggggattataatactttggagtcttgagcttttgttttttttatggaatgttatgttgaaattatgggtttgattggaaatatatttggaggcaatttggaaactgctgcgtctattatacaaagaacttgaaaaattcaatggtactgacaaagaaaaatggtactcatcaaaaccagaaaagaaaagtaaatttttggtccaaatctcactattttaataacattttttaaaaacaaagaattaagaacaaaaacaaaatgacctataaaattttggactctaattcttggcttgtgtgactttattaacagttaaatattacaaattttcaaactcttaaaaatttaaactttataaaacgttttaaatatttataatttataaactttatgaagttttaaatattataaatatttgttataattttgaatgttataaatttataaacgaaaagaacttgaaaaattcaatgaaaacgagtaacgacaaagaaaaatgataatcatcaaaaccaaatctcaatattttaataacatttaaagtttttaaaaaacccaaaaaattaactagtaggcctgggcataatacccggaaccgaatatccgaaccgaaaaacccgaaaaataaccaaaccgaacccgaatccgatttttagaattacccgaatgggtcctcgaccttactacccgaaaaaacccgaaccgaacccgaaccgaatctaatacccgtgggtacccgaatacgaatgtaacttaaatatattagttatatatatatatttgtaatacctcaaataccaaaattaaaattataaatccgattatactagatttttttagtaattcatatatatttggatatatttgggtaaaagtaacaaatgttatagttttcttttagataatttaagtattttggttacatttggttatatttgtataaaaagtaaccaatatatttacgggtaattgggtatttcgggttgatttgggtatatatgaataaaaaaaccgaatctaacccgaacccaaaaatattttgggtatttttggttatttttacatttttactaaaataaccgaaccgacccaaacccgaaccgaaaccgaaccgaatttttagaatactcgaatggttctcaacctcctacccgaatagacccaatacccggaaaaaaaaacgaacccgaacgggtacccgaatgcccacgcctcaattaagaacagaaaaagaaaaaaactaactttcagtgacctataaaagtttgggccctagaagagtcttttcgcaacaccaaaaatggcagatccgcaagcccaacaaggcagtggcattgccaaaagatctggacaaaaaaaaggccaagtggtgtacaaagcctagatgtaggatataattactcaaccgtcgaacatattttccatagatcattcatagacgtacgcatcatcaaatcaattcatcgtcgtcttccacaattgtcatcaccgatcgattttccgactccgacgtacctcctcttccccgttaccttctcaggtctcaatctggctttctctatttttcgcctaattcctctttttctgattgtgattctgctttctaattttgatcctaattttttgtgcttatactccggctaaactcttccatttgttccgatcaccggaattttcgtcacttattcgtcatcctttttctcttttgatccgtcaattttacttttctgtcttttttttttctcctttttccccgtgttgacatttctttcttctgtacgtgatctagttatcttagggttttggactgctatacaaaacaatcaattgattttagttttatcttttgaatcgttgtaagaatttcaatagcctagtcttgttgatggttttgggctattgaatctgttcttaaagtttcagcttaatgtaatctgttcttaatcagaattagggttcatcatcattgtgtgtgttgctgattctgcagagtttttagtagtcttcctttggaacaatgagtgacgtgtttgatggatatgagcgacaatactgtgagctctcggcgagtctttcaaagaagtgttcctctgctatttcgcttgatggaggtaaaattgttactctaatcttttctaagatgtgatacttttcctactcaggcattgccttaccttccttaagatttgaaataactaattctggtttagcttatgaatgtaacaatgtacgaattagagatatcttggtttgtgtttttgatgcagagtattgtgcgatttagatcctttaattactacttcgttgtaaggacatagtattggtttctgattacgaagagagcttgtgattagtattggtcgctgatcatcgccatttttttacactggggatacttcggtttttgtttgttactgagaacgattctatagatagtttggtttgtgtttgatgactataaacttcttgtctccttcatgtgttgctaggacatagtagtgtgcctttcttttgctttctttggagattgtgattagtagtgttcgctgatcatcgggattgttttttttcccctagatgagtatgctctgttgattgcatagataaaaatgcattgatgataccttattaatttgcagaacaaaagaagcagaagttgtctgaaataaaatccgggctggaaaatgcagaagtattggtatgtgatatgcgtaacgtgaagttatagaagcttctctattgtccattattcattttgatgcttctctgtccttttcttcaccagattaggaaaatggatctcgaggcaaggacccttccacctaatcttaagtccagcctccttgtcaaattaagagaattcaagtctgatctgaacaatttcaaaactgaagtgaagagaatcacatctggacagttgaacgctgctgctcgtgatgagttgctagaagctggtatggctgacacaaagacggtatgtaaaggactcggtagtattgtttcaattttatctcatctcatatctttgctattaaaacgacctatgattttctttttttattgaaacgctgagatcaggcttcagctgatcagagagcaagattgatgatgtcaactgagcgtctgggccgaaccactgacagagtcaaggacagtcgtagaacaatgatggagactgaagaaatcggtgtttcaatcctccaagacttgcacggtcagagacagtctctcttacgtgcccacgaaacggtattgtctctctgcaacacatttactccatattctcaacgatattctgaacaaagtgacaaaataagatgagaattaagggctatatcataaagaagactatgttttcttgttttctttatcaacgctggattgatatcgcgctaaccaaaatttagaactctgttgacagcttcatggagtagacgataacattggaaagagcaagaagatcttgacagacatgacgaggaggatgaacaagaacaaatggaccattggagccatcatcatcgcattgattgccgccattttcatcatcttgtacttcaaactcaccaagtaagcctctgtaactaaatccgaccaaatcaaagaacaacggttgttttcgttttgtgagtctttgatttatcctgtttcttctttttgtgtgaaaagttgttttgccacctttgtattctaaatttgaccatacatactttaagcaagtaaagcttcggcctaagtgtcacgtatattgtttatattgttcatatcaaatccagaactatacatggttaaacattgagattaaaagcctcaattatttcaaacaatcgaggtctacatctcgcacaattgttcatatattggatctagaactatacatgatcaaacattgatatcaattactagtgtttttttctttcatatttgaatttgctataatcagcgaccaagctctcaataaccctatgcttcatgttatccaccaaaccggccaaaatctgtaaagggccaatcaaaaacataaatcatgtataaacccggaacacagcattttgagtctccaatcgcatatatgaaacaagacagtttcttaccgcattggccatgtttctcctaacatcttctggtacaagcgcgagaactgaaggaagcacgaagctaatggtcgtttctagtcgacctttgagcctcgtgtgccttccacgccggtctgggtataatgctccttttactccaagagtgaaatcagttggttccattactcggtcaagcccttgaagctcccatttcgtctgaaaatcgtaattcaaatgttaaatcaataaaaattctgactagtgaatttgtgattcatgtggtggtacaaatataatattaccatgttgagctcaagaactttggttatgtgtagaggtacgtctgatgggtaatcctgaccgttggatttgcatctaatccgcatgaccaccactggacacgcagtgaggaagaaaaattttattggtaacatttggattctccattcttcctgcacaataatttcatccgtaagtaacaaagcctcaaaaaataaacatagttaaaaaacatgaggtaaggaaaatcaaaacatgctactagcaatgatgttacattccaataattcaatggggacctcttgacaacaagaataatatcaaaatcttaaagagattttactggtttgtgactttgtgtatcttgtttcatttctcttatggatatatgtaattttatatataggtttctaagaacttactaggacacaactaagatttgtgtattcttttgtaactacgaaacaatagaaatttctataaatttatttttaatccttaattgaatacaattgatactattgaggattataaatccttaattattttgttattttcactatcaccaaaatttgaaagtcgatggtcgaaaaactcaaaaagatttatcaatttttcgaatcactaaaaattaaataatcaaatagaataaacacttttaatcacatgccttggagtaaaagtaagtaaaggagtcttgaagaatggtacctcattaagcctatagtttttgggtttatccggaaacattgcttcgaaaacccttgatttgtcttccaaatattcatcaaacaaggcctgcaaagatcggcaagagattcgatattaaaacattcatgtgtgtacacatatacagaccctattatagaatgagaaagagacctgaggagactcgtggagagcgatatcggttgatattttagaggaatacttggcggattttacaggtgacaagtgacacttcactctccaccgttttgatctaacctgcccacaacttccgatcatccccgggcatgaatacaccgcagagcttaccgccatttcaccaagattggatctttgatctttcccacatatctttatctctcaatctatctatactaaaagattgcgtcttggtttctctctatacgttgagacttttgtggaagattgagaaagagacagtgaataaaaccgtcacggtagagatttggaatattggtttatttggtcttttacgtccacgtggcgtaattacaagacgttacatgttatcaaagtcttgaaatctatatttgcttactcagtcttttacgcattcggtcgtggatgagactgacacaacatcattcaaagttgaaaggaactaaaaccctcactttcagacagagggttgacaaagcttaggcctgattttttcatctcactcaaatttcacatcaatttttgtctacatagtccaatctggtttaaccatttcgaggcgaaaatgtaccttcagattaaaagttcatacatctgtttttacatagagcttggtttaactgattttcgaactaaatccgataaaagaccaaataaacccaatgcttaaaagttttagttaggccactctggttttaaatttggtttcacactagatcaaagattagtgcaattaacaaaataatttaaatttcaaattattatatttttaacataacacacaatactaaactaagaaattataagaataatcaaaacaatatataactttattttcagctaaaccaaagaatttggaaaatttgcgccaactgaaaaactaaatgatttcttaacttgactatatcaattaaataacttacaagtagcttcttactgatatatgaacggattgagaactatacatggtcaaacagaggcaacaaagatagagtttactcgattatctttgtaattttctttcattcttgaacctgctataatcagaaagcaagctcccattaaccttatgcttcatattctccactaaaccggtcaaaacctgtaaaagattcaaatgaaaaaacacagagatcatgtacaatcatgggatgtggtaaatagagctttatgtaacagttttctaaccgcattggccaagtttcttcgaacatcttcaggtaccaactcaagaaccggaggaagaacaaagcttatgttcatctctagttgacctctgagccttgtgtgctttcctcttcggtcagggtacaatgctcctttgacttccaaactgaaatcagctggttccattactcggtcaagcccttgaagcttccatctcatctgaataaccataaatatccgttacaaacgtagcaaatcacaaatactaacacggtaatatcaacttcgtgcctactcctagtaacaagtttgaagctcaaagaaacaaagaaagagacgtgtgtgtgttgaatgattaccatgttgagctcaagaactttggttatatctaaaggtacatctggcggataatcttgaccgttggatttgcatcttaacctcatatctaccacaggccacacagtaaggaagaggaagtttattggtaacatctgaattctccattcttcctatacacaaattcgattcattcaaattaaaaaagcaagtaaataaaaagaaggacaaaacaaaaataggggcattccgagaattgaactcgggacctctcgcaccctaagcgagaatcataccactagaccaaatgcccatttttgaagacttattttactctatatctagttaactataacttcgatagtacctcgttaagcctatgacttctgggcttatctggaaacattgcttcgaatactcttgatttatcctctaaatactcatcgaacaaagcctgaaaaattccacaagatggtcgaaatctcaattaaacccaccaaaaaaaaataaaaacatcgatgcgtagtaaagtgaagagaagtagaacctgaggagactcgttgagaggaatatctgtggagagtctcgatgaatacgtggcgggttttacggatgacacttggcacatcactctcgaccgtaatagtgatctcacctccgtcgtcaccggccggtggtaacttctgaacatccccgacgataaaaccgaagacctcgccgtcatttctcccattatctctctcagatatcagatctttgatctcttcaacatatttctctctcactaatctccaagtaaagattcttgcttcgtcaagactctgtgaacaaatttagaagaagatacagagagagtaaagttgtataaagagagattaggaagatgataagagatatcagccttttgggcttctacgtccacgtggcatatcactagcttatccacgccatcaagatttggaatctgtagggtcttctttgctttagctccttcaccttcgcattcgtggatgagaatgacacgaaataaacttgaagatc

SEQ ID NO: 794 - DNA, 68697 bp, Arabidopsis thaliana
cactgacaaaaactttgtatgtgttacaacatggggactatcataacaaatgaccaaacccaaattcttaaatttttagtgaggcaagaagggtcacttcttaaatttttagtgtttgtatctagtcttaaaaaggactatcttgttttctatacatgcttgcaatttcaattcaaactctaccaatgatcaagttatttttatttaagcttatgataataaattcacttgcaattcaaaccataaaaaccacgactttatagaaaattgtcttatttcattataacttttcgtttgatattttttctcgttaaaaaaaatttcaatttttttctctttaagaaggtctgagttttttttttgttttttttttttttagaaggtctgagttctaatatacataatcatcaaaataaatgactacacaactcaagacttcatatcactcgaggatttcaggcacaacattaacccactccgtcttaccacatatctcatctgtatggcgcttctctaacgcaatcttagagaacccaattttatatcctctatcgtcttcatcataccactgcttcccacataactacaagcagtggcggatctagggaggaaaactatatggggcaccatattagtgaaaaaaatttaaagtaataataaatatggggaaaaaataaacatgaaatcaaataccagtgtaagggcatcgaacacagcttatgggacatagagtagggcacttcttccaaataagctaaccaatattaatgtaataagttgaacaattaaatacttatcaagaattagtgtggggcacgtgccccacctccttacactgtagatccgtccctgactacaagattcccatcataattaactattccatcgacagtcctctgatttaaataacatgtagggtaatcattaaattcgtccaaaccatagatatttctccactctttaccttgtgagtcataccaccttaaataccccgtgtaagtgcaagagtacatgacatcctctatcatacacgaatatagtatactaggactgatacctacaagtgctttgtggatgcagcatggagtgccacaacaaaggctggacctttaaaggcccacatggcaaggctctgctactctattcggcctcgtggaagtgttaattcagcattagtaacggaggctttagcgctgaggagtgctctgcaatcttgcttcaaaaggccgaactggagcatatcacaaggttggaggttcactcggactcccatatgttgattcattcaatcaactcgaaaactagttttaagaccaagtccagcaatggtttttaatgggtttctataatgggtttctaagatgaaatgggcctagataaaaaaaaaacatttaaggattccaccaatagatcataaaattttcaaaaactttacaaaatctctaaactacaaaactatcagaatttattaataaaaaataaatagaaaccttacttaattagaaactaatcagtgtggttgctctaaggagcttaaagctattattatccacgatattgcttgcttaagtgtattgttggtctctatctcttttcactttgttcctcgtttggaaaatgttgttgcatgttgattcgcttactaagtctgccattataacagtaaactctttctcccccaggagagtataattcacgtttatgtttcaatataattcaagtttgacccaaaaaaaactacttaaatttaactgaaaataaagaaaaagaagagaacattaattataaaaacgttttgagcattaaagaaaatacgctcataattaagtatagttaactgtttttcttcgctatattaagtttccaaaccctaacatcatcaactaattataggataactaggaaactaaaaaaaaaattggggggtttaaggaagttctttttttccctagggtttaaggaagttcctaacgacaatgttataatgggaaaaacgataatttcttgtgtcgtcataacaatcgcgacatgtcaactaaaaactaattaaacttgttagaaatacatttgaaagagttagggatcactctcttaaaaaactcacaaactcgagaatggacgtctgagagttctagatagtagatactagataccatcttttcccttcttgataccatcttggccatgttttgtgtgaaagttaattatgaagtgaaatcacaaggatgtatgcataattaacgcgtacatgccgttttctctagtttagactacctttttttgtttctttaaatagaagcaaagtacaaattaacaaatttgaaagagtgaaatagtaattccaaaaagcaagagaaacgtggaaagtgggagagatggtttgaagatgtagttaaactatctaaagtaatcgcttaatgattcaagaattaattcaggatattgctggttttgtgtgaatatcggtttttaacatatttgagaagatatgcttggagcgtgtttagaggatgcaatcaaaaaggataaaagactaaaaaagatttggaagatttaatgaaagtaacgtttgatgagaaaaaaggaaatgtgtaaaaaagaaatttactctttcttatgaaaaagagaaattttctcctattgtgattagaaagaaatttttgagagctttctctgaaactgtgtgcaacttaattttgcaggttttgtgcttgtgtgatcaagtggttttattattgaagcctagactcaaaggaaatttagctcagggttaggttatcctgattaaatctagactcagaagaaatttagttaaagatagagattatctttaaggtttcctgttaatagaagggagcggtaaatcaagagagatgtacttgttttacgcgttttacaaattggttgtaatttggtttcttattctactgaaatcaaatctggactttctgaaccacgttaacaaaaaatttgtctcatttattttgtgcaatttatattacctcatctgcacttacataattcattaatataaagaaggccaattcgagcaacaacttataattaaaaaaagacaaggaaagacttgattaactaatctaattaagtatctctggttcggcttgacgaccgcttattgctttcgttggttgactatttttagccacacttgaaataagacttgagatcttgatttataggaacaccatctccacaagcaacaataagacgataagcttgtttccattgcacaggatctttaatatacttacacatacatggtcctggtattatactagtctatcacaacatctgtccaacgtgggtatatctttcatatgttgcaggcataaatgaagtgactctttgcaataagagagcgttggagtggggaatgatgtcaagagtacgaccaaggtggtgaacatcaatgaaatgttcttcattttctgattacttagtatctcgtcaaaaatgttgtatgtttttgttttcttaatttgggcaaaaatgttgtatgtttctaggtctttaaatagaaaactgaaatcagaaacatgtggcaatattgagaagtggtggattctatttttacaaagcaattagtattcaaaacaaaccattgaatatttcggaaagccgattccataagaagtggagatagagtactttattggtattagaagacatcgtgaaggaaggaatgaaagaaagaaaataaaagcagttgatctcaacctatatatggtgtttgatttgatttttgtgtgttttacttttccatcaaaaataaataaaatgcttaccattgtaatttttgaataagaattataaatatgagcctctataccgtagaaatttgcatcttaaaacaaaatttctttagatttgagttgattagcttaacgggaaaaactcttaaatatgacatatgcttcaatttgatatgtatttatttatttatgttttccaccataaaccttcaacaatatatttatagtaacgagtttcatgattttgtaacgtgaatttgtatcattgccagaagaacacacaaaatcagattcatgaccctaatatccaaacataggacaatgccaaatctgtctcttacttatgaaatataatttgaattatatttgatcatctcttacatatcgtaagacatatccaacaagtcttcttgtgtgctctcttcgtttccccaaaacggtcctgtaaatcacaaattgcatcagtaaacgttgccatacacttcgtctgtttaacaattttagagacagaaatcaaagtgcaagtcaacgtcggcacatagagaacgttggtgagtaaaatattctctgaaagaggtaaaacccccatgtttactgcagaagttttacttccatccgcaaaccccaccgagcatggtggtatagaaacaatgttagtcaagagagagagtcttccagtcatatgataggaagctccggtatcaagaataacatcgcccaactttatcttacttatctgaacttttgttggatgtttgttcttgaattagctgagaaagagctcgaagttggtctggtgtaaactctgtatgaggagacggattggagctggttgcatgagctgcaactatttgtcctttaccacgtccagcacctcttccgccacgtccacgacccgagccacgaccattcccattacgttctgtccaccaatcgggaaaacccacaatggaccaacagtccttcttttcatgccctgttcgtccacagtgagagcagagaacaggtcgagacttgacaatggaagattcaatggaggactgagcaggagatgacatagcggaagattgctcatgtcgagcgacaaaacccactacttcttgacgttgttcttgagtccgagaagcatgaattctctgttcttctcttatgacttgagaataagcgaccccaagcgatggcaaaggatccatgttgattaggtttgtgcaaagtccactgaaccttgcagagtcaagacccaaaacaaattgatgaagcttttcatcgtctctttctttgacaattgcagttaacaccgaaccatgaggacaaactgcacttgcttgatagttctttaattcatcccaaagattacacaatctgccatagtaatcaatcactgtttgtccttcttgtcggcatgaggcgagttgagctttaatctggtgaacccgtacgttgttggtgacagagaaacgctgacgcaattcgtcccaaagaagatgtgcatcagagataaaagtcaccgtggatttaactttcggctcaattgaaactcgaatccaacccacgatcatggagttgactgttttccaattctcaaaatcaggactgtcacttgccggcttttgaattgtcccatcaatgaatcccgtttttcttttagcttgaagagcattcaacatctcttcagaccattcattataattatctccattcaacacaacagaggtgatcaatgtccctggattgtcggagtttgacaaggtataaggcgactgcacaacagatgatgcagagggaggctgcacaacgagcgctcctcctgaacccaccggattctcatcaccgatagccataaaactgaaaaattttaagatttttcttgctctgataccatgtaggaaaaggtattgaactaacttgatttattaatgaactcaaccttggtatttatacatgaggggatcgacacaagataaacatatctcgacttctaaacatatcataactatgatttaaacttatcacataagatttaaacttatcgcataagatacaatcttatcctcaatattgactcttgcatcatcatcatgcgactatgttgtttgtttctgatgatacacaatctcaaaagactccagatcatatgactctggctaaagcagcggattatgcggttgctgactctccatatcatgaggatgcggttgataagaatccagcgggcctggacaaaactgctgctgttgatattccaaatcatgacgctgcggttggcaagaatctagcggtgctagcggttgatgatactcgacattgcaaggttgctgctcttccaatgcttccacatgtgcaactgaaacaacggcttctcctttcttctgcttcttcttctcttcttccacttctttcttcttctttattgcttgtggagtaagatatatcttgcaaaaattgtaatcctagacgcatcaacaaaaaaaggactcaaaatagaatccaaaacttgaaaaccttaataacttgggaaccaagaaacacatacttaccttgttgctgttgtgagacaataatacatacatacatacaataatgaccatatgtgcaaaaggagcaagaaagagtttacatgaccatatgtgtttctctgcatcatccaaagtccacaatataataccaccattgacatcgttcttcatggtattagtaacacatgctaacctaccctgataaggtatcagcatgttcgcaaaactacccgaaggtaatgctatcgtatcaaacttttcagatctgacctcaaaactcattatagtaggattgctaaaccccatctgatcattataggcttggtaatatataacaccgttaatgcattgcccataataacgaaggatagaacgatgcttaaggttagttttgatccttctccatgtttttttttagctgatctcagtgttaaaaccctacactcatcgcttgtgttatcacgaggcatgcacattagtttttgcttaacttcgatttggatcgtatcctaaaaagactgataatcccttccagcttttttccggtttaggcaagattaaaaatatatcgacgtgtatatatgtatcattactcatttttgttagggagatttacattttatgtgtattatatataaaccgtcaaagataaagatttatttattatatattgctagatgtaggtagattcttattaacaaaaaagtgagcctatcgagcccatgaggctgccttttgagttttattaagaaagtgaatagttgtgtatattttctttttaataaatagttaaattaattcttatttagtaacaatgaaatatatgtacaaaaaccacatcgactttattctatttttggcctcttttacatattcataaataatttttattgttatcacttaggaaaaactaggagtctaaccaatagcagcctattcacaaagttttgtaatttaaagtaaaaatgtaaaatttacatttcaaaatagcgttaaacttcctaagttaacatattgacattttagattactcatctcgaccgttcgatttcatcgatcttacattgcatttaatacaaaaataaaccctaataccaagtaatttaatacgtcgttgctatatatatgtgggtaggcagtagtctaatagagtacatatataccacgcaaagatctttaaaaataatccattagctccaatattcagattttaagaaagatgggtttcttctcgaaactgtttagctgttttacgaagccgtcttcaaagaaaggttcatgcaagggtggtgtttgtgtccttaagaagcctaaataacaaggatgagtttgttactatgtagtagtagtagacaaaagtttattattattgttttctttcaatatttatgttttcctttattatttgcacttgatattttaattaattgagaatttattcagagacaaaagattctatatgctttttctttttctattggcaattcgattttaaacaaaaaaaagttcaaaattacatcaaaaacaaagcaatatattcgtaagctcaattctataaaaaaaaattagaaggtttagataacattgtaatgatttgaaaatttatgtataattagttggatgataggaaatctgacgtagaacctaaatgacaatagcttatatcaaaacaaaatcatttgagctcatatagtataatcggagtcttcctatttggtagctatttttcgtctcaaatttattgttcttcttctactatattctttccaaatcttcttctatacgatttattcttcttcttgacctttgaccttcttctgcggtctctgtttgtcaccttattatcttactttgattttcacaagaaaagaaaagtaccttctgttgagaattgataacttactatcttataatcttacgtacgtactcctttgaggctttgataaaggttattctattgatagcagcaatgtacaatgctagaaatacaaataggaacaacattagtatttagtagcatatgtaaaaacaagaaagcaaaaaactcaacaaaaggatacaaaaaaagggaggtagtgatgaagaagctaagaagcttgatgaggccaaaattaccgagacaatttgaactcaaagtgaatcagcggcaatatgagagaattggcctagtataaacgtacgtagctgaaaaccgtttgcctagattttaaatgccacagagatgatcagtatcagtgtattgcagctaatctgatccgatgcatggtcgcatataatgcttgcaaatttgaaagacattttcaatctcatatatacttggtgctatgtatgagcttgtcaagggtattaaaaagatgtcaaagattacgtgaacacaggaaagttaaaatcatatacatacatacgctctctgaaaaagaatcaatgcaaaataaagataaaaaaaaagcacatctcctaatttttcattaattttgtttttagtctattcaaattctcacacaacattaatatcatgatttttctcaagtgctttaaccacttttgcattcaaacatcgtcaagttagaagattagagttaagacaacaatttacacagctcaacgttctcaaggctttctaacatttacaaaaaccaaaccttaatatacccaaaaaatcgcttccttcaaatacggccggtctctaagcttctctattccaagattacttcatcatgaatctgtttccaatacaagttcttttctgttactcaacaacttcagcctcttccacattcttttttaccttctctatcatctccatcatctctaatcaaggagaaagattagtgattgaagaaagtaatcatatggattgattgatatgattctctgtaatatagactcttataaatatgtttcactatctactctctaagatattttatccactttggtaactatctttttataagaatcttctaaaacttcaagaagattcatttaaagatttccactaatggtgtgcaatacactgtgtatagtaaaatatatgaaatatcagaacagtgacagttgactaatttatcgatatattagtttatagagaatttgttgtggtaactcactgaccacgaaaatttaaagtaatatactaatgttgaatttatatgtaacggaaaaaaaagattcgaacaatttctgataagttttaaaataaaaatgataagtcgcaatgcaaacttcacagacgtttgcggaatattaccaaaaaaagaaaggaagtttgtttcgaaaaactaaagagctccttaagctgagagacttgtaccactaccaccaacagagttgttatccatcttaatcttcttagttggaggttcggattcttcttcttcttcttcagaaatggatgcatcagcctcttcctcactcttcttaaaattctctattatctccatcatctctctgttcacctgttttattatacatttgtgattagccaaagttaatcacaacaaaactgggaagaactagaatataagaagaagagttggtttctgtttattacctgcgggttttggagaaactcggagagatccgtcgtgcagcaagggcaggtcatgatgttcttctttgcacgtagtttacgtccgccattgcttctctctctcagttgagttatcccagcaaacttcgcttctaagcatgctttgcagaagttgtgtgcacaaggcgtcgtcactggaagactcagcacttcccgacagatttggcaactaaattctgtgtcaaataaaacccaagaaaacaattatgaattgtgctatatacaataataacacaagtgataatggacggtttacctttcagaagtctggccttcatagtattttttgctctcttattcttcttcctctcctcaggatccaaagccattctgctaacaggaggagacttcatccatttccaacgaccctcagcttcctgatgagggaaaagttacaaaataatgaaccaaccgaagaatattcgatatctgctctgttcatataaaagagagactttactaacatcgaaatcccatgatggactctcctttctcacaaacaggtcagcagcagtctcaagctccggaacattaggcaacggtcttggacgatcgccatgctcatcactgcagtatataattaaaaaaaattatgagccatcaaacagaaaatacagatataagacactttccggggaaaaacaaagatcaaacctggtccatggagctggctcattgtcacatctaacaaacaggtaacgacagaccttaaaagaaccctacagaaaacagaagagtgtatgtcaagaaagaaaaatctagctctgcataaaaggaacaaaataggaatgttagctatatattcaaacctgtactccaacattactccagcacttctcaattcgatagaccccatcatatctcacaccttcagcaggggcatatgcagaacgcttctccttccaagacctgaagattgaagagtcaggataactatctactcagagtataaagataatctattcttattcacataaagttgaagagagtctgcagaaagtgagaaaggtataagaactttgcacaaagaaaagctaacctgacaactcggacaggatagcccattttgcaactaagtcttagagattcattcatgtttttaaacgcctggtcagacgactgtttcttgttaattcttttgtttccactgagatcccttccaccactgcaacacacattcacacatattaagataaattggaacaaggctacttcaataagaagggaaacaggtgacaaatataatgtaaaaaatcaaaccttcctgtgtagagaaaccattcaccatgatcctcatcatcgtcataacctccagagagggccacagactgagctccaaccgctgattgcccggcaatgccagcaatatgcgggaaatgagctccccactgcctacactcttgcctgtcctcccaagattctccaaccaaaacaccttgctttctagtgacatcattctcagctggtatgggaccaaaatgatcacgaggtattgtcacaaaaaacttaccgctagcagcattagctttcccagtttttactgcccgctcggtagtaaatgctttctcaggacggtcttggttgcggataatatgatgaaccttggctgcagttgcctcaacagaacatttggtaacatttgctaaacgaatagcagaaactagagctaagttgatgcgaggattttttgccacatgtctcggaattttgcttcggcatatcatacaagttagcttcccttgacctactgcccatttctcgaaacatttcaaacagaaattgtgcccacacggtgtctacaaacacacaagtacaatacatccattagtctgctacttaaatacactaatcatcattatcaagtttacaaataaactagcgattctactacacttatgtgtactaatcacaagattcaacaaggcattaaaactaatcacaagcataagactggttgcaaataagccattagtgtgctacttcaaatattaatcatccttatcaacaacaaacacataaattagccattctactacagttatgcgtactaatcacaagatttaacaagacactaacacagatcacaagcataaattcgcgattctactactattatcaacactaatcacaagatctaacaagtaattaacacatgtcacaaacataaattagcgattctagtagggtttatgtgtattaatcacaagatctaacaagtcattaacacaagtcacaagcataaattagcgattctagtagggtttatgtgtactaatcacaagatctaacaagtcattaacacaaatcacaagaacaaacacataaattagcgaataaactcaaaaacacattgatttgaagaatgaaaacgaaccgtgataggtctttctggcaattgaatgcaaatagaacaaaagatttctaacttcttcttctcttcttcatcgacaccatcgtcaccacccccactcatcagtttctgcctttttttggctttctcagcttcggttaaagtctcatcagcctgaatcgcacggatcgcagcaacgagaactgaaccggaagattcaggtcgagcgtttccggtacccggagcggcggagggaacgacaacgccggagcaatcgggacactcccactctccagtggaagaagcgagtgattcggggaggagacacggcacgtgccatggagtgacgcacgtgccacaagtgagagtctcttctgacggaggattcacctgacaccgcatacacacaccgtcaccgtcgcaaggaagctgagtttcaatcgccattgttgaaacgagtgagagagagatttagagagaaaatgttgttttccagatttatgagagatttaggctaaataagtagaggaaggcgaaaagtgaagaggcgggttttgaaattttggggaaggcgaagagtgaatttcaaaatgatttgtaaaaacctaaaaaagaaaaaaatctcacagtttcgataagatcgtgacagaatggcaactaatatattttattttccttaattgttttgggtcaaatttttatgacaaagacgtgattagtggtggtttagtggaaaataactgtttctcaaatttaaattatagttataattcatttttaaaatctcaaaatgtatatattaaagacgaacatttattttttttaagattaataacttatataaaataggtaatagtttgttgtcaaattatattaaaaaaaaaaagtgattagttttatgacaataattatatcgcatatttatctataaaatttagagttatatcgcaagtcaatagttttttttttttcatcaacatcaatcttattattgaactgcagagacaaagtcacgatggagtatgtctgtgattacatgaggagtaaaattagaaaaatgataagaagtatgtgaaggtagtgcatgtttagctaatgtgtctgctgccatgttggaatttcgtcggacccatgtgaagcgacaatcctcaaatcttgttttccaagccacaacctctcttagccaattaaagaccgcaaagtttggattcctgtcattgacacaaagcgaagaatgagaaatctcctgagaatacacaatgagggaggtggcggaaaatatttgggactaccagaacagtttgataagaagaaatctgagatgtttcggtatattgttgagaaagtcaaagaaaaaactcaaggttggaatattttaaagttaatactctttgttctgaacgagataattgttgtttaaagtttttgcacagtaattaaaaaaactattttttttctttttttttaacactaaaaaacaattaatttttatttttattttatccttatttaatgttttttctaaaaaaattagtagaaataatatttagaaatagttaaaaatatacctaaaatctatcaaataaacctaaattatgtgacatgttagaacattatttgggacaagtttattttcccaaaactataattaagaaaatactatacaccagtttaaaaattggttatactggaccaaatatcagcgacaccaagattaacttgtacgggttacaccaaaacaagtaaaagaccattaaaaacaaaaacataaaaaataacaaagaccggatgatttcacaatattgtttatacaatattttacaaatcatcaaatcgaaacaaccacacaactgtagcacaagtcacacaacttggggaccgtaagcacagaattaatccactctatcttaccccagatctcatctttactgcgcttctctaacgcaatctgagcacaccaaatttcaattttatcttttccgtcgctttgcaccggacgccacataactacaagtttcccaccatagttaactattctttccgccccactgaaacccctcgtagggtggtaacacaattcttccaaaccctggatctctctccaccgtctatcctcgtaatcataccacctcagaaagacgtcatggcaagcgtacattacattctctatcacacaccaaacctttactcttcttatacttgatttgcttacaactttccatgtatcatctttgggctcgtaagtgtagtcatttatctgtgccgctacgtaaagctttccttccaaagcattggggttgacgttaattaatctgactgcagtttgactatcaccaagacgcggaaagtatctgttgggccacacaatgtagcggcgtaactcaaggccagccctaaaactaggcaaggctctccaagtctgagtcttgatgtcgaacacctcaaaccaatcgtcagactcgtccatctcgcgacctcccaagacgtatattctctggtcgatgagaaccgcgactggatccgatcgagctaccgtcatgttaggaccgtcacgccacgtgttactccgacaatcaaatatccgaactgaggaagagcggttgaagtgtccaccgattacgtagatttccgaaccaaccgctaccgtggatgtacgaagtactggtgaagacgaaggtagcggaatcaacgaatagtcatgtatagtaccggtaccggtgagggtttcatcaggtttcatccaaagagtgtaccactgtggagatgaatggttagctgattccaagcagaaatagaggcatggctcggtggttccgatttcagatcgcgtcttgtatagttgcggggaagagagaagagaaaggaaacttttggagacgagagagagattaggataactccatttagagatacgtgcaagaatgttctctatgatttcgtatgggagtgacatcaacgacggtggctcagaactcaaacttctcttctcttttggttgttcaacttcggagatcatggtcgccggaaatggtagaagcatgcagtgaagaagatagatgagaaattagggttatatatagattacatatctaaatattgtggacataattagttgtggtgtcaaaaaaaaaaaaaaaaaaattagttgtagtcattcattgtccaaagatttgtttatagacataaatcatagcttataagatttttttttctaaaggtaaataatggttatagtttataaataattaaaatataaagatctacaaggcttaaaaataaaaattcaaaaggaaattaaaatctacaaaataaacctaaatgtaaaaaccataaaacaaaaaaaatcaagatacactaattcaattgcattaattcataaattttatccttatttttaatatattaatttctttttgtaaaggtaaacaatggttataaataattaaaattggaaataaaggaccttaaaaatataagatatacacaaaaccttaaaaagcctcatatcaaaaggaaattaaaatctacaaaataaacctaaatttaaaaaccataaaccaaaaaatatgaggcacattttctttcttttccaaaatcataaaccaaaaattcaagacacaataattcataaattatattcgtttttgtaatatagtcccttaatgtattattaaatcatactttctcccatggtttggttcccggttaaatcagtcggcaattggtacaatcaaattggttattaccaattaagataaacccacgtggcatagcttgcccgaatcgtagtggtctccatgtaaacagcaggaagatgggatccacaattattcattcaaaacgcaacgtttttaaactcttcgtcttcttcttcccccgcgtataaattctcatttctgtcattttgatcagatccaagaaaccaaaagagtaaaacaaacacagagaagcttcttcttaaacgatgccgtactataccagagatgacaacgacgtcgacgatttcgatgagtttgatccaacgccgtacagtggtggttacgacatcacggtgatctacggccgtccgattccaccttccgatgagacttgttatcctctctcatctggtgtcgatgatgatttcgaatacgagagacctgaatttactcagatccatgagccttctgcttacggtgatgaagctcttaacacagagtacagtagctattctcgacccaagccacgacccgcatttcgacccgattcaggtggtggtggtcatgttcaaggtgaaagaccaaatcctggttatggatctgaatccggttatgggaggaaaccggaatctgagtacggatctggctatggtggacaaacggaggtggagtatggtcggagacctgagcagagttatggatctggttatggtggaaggacggagactgaatcggagtatggatctggtggtggtggaagaactgaggttgagtatggtaggagacctgaatcagggcttggatctggttatggtgggagatcggagtctgagtatgagcgtaagcctagctatggaaggtctgaggaacaagaagaaggttataggaagcctagctatggaagatctgaagaacaagaggaaggttacaggaagccaagttatggaagatctgaggagcaggaagaaggatatagaaagcctagctatggaagatctgaggaggaacaagaggaaggttataggaagcctagctatggaagatctgaggaacaagaggaaggaagttacaggaaacctagttatgggaggtctgatgatcaggtggagagttacattaagcctagctatggaagatctgaggaacaggaggagggaagttacaggaagcctagttatgggaggtctgaggaacaggaagaggggagttacaggaagcagcctagctatggccgtggcaatgacgatgatgatgatgagcagcgtaggaaccgttctggttctggtgatgatgaggaagggagctatggccgcaagaaatatgtaagttgaagaaattaatattttgttgaatcctttggtgatcatattgtagagtgtagagtaatccaaagtttatatctttagtgattgttttatgatcattcatgatttagccatctataaacatcattataaagaacctgtctaaagtctttgtttggatacatacatgtcaacgaaatgtatctgtttcacagtttacatgaatagaaagctagttctaggattccatttgactttggtggtgtagtattcgattgaatatggacaacatttcgtttggttgaattatgcatagcttgcatctaggttgtgtggaaattaagtttgattggttagcactgaaaaccctttgttgatcatagtgtagagtaactcgttattgaactaaagttatatctttagtggtggttcttgtcgattaatgatttagtcatctgtgaacatccattaagaagaacaatgttgtctagttacatacttacatgtcaacattattttattgaatttggccatcttgaggatatctgaaggtctctctttcctttcttatggtcatagttcatagcagcggcatcattaacctgatgtcattgtatgggtcattacataggttacacttttgacgtagtcctaattatttccaatacacaatttgcagggtggcaatgactctgatgaggatgaggagaagaagaagcaccgtcacaagcatcaccaccagaagcgtcgtgacgaagacgatgagtaaactaaaccctctctgtgctagagagtgtaatgagaatgtgtgtttgcttagcctcaaaaatctactaaataaagagctaagtcacatacctttctacataatatcttccgacgttggtgttgtgtttgtttgaatctctgtattattactacagagtcttcgtactggttcataataagacctttaagtggtattgggtcaccatgtaactgttgctactctgtttcgttttctatctatcgttttgtgttatgatttacttttctatccttatataattatgatgatcatttcgtgtaatatcagaatgttttttgcatgaattggaattagatggaaactttgtttaagaaaatatcaggagtcttgttgcaccatggtcccagtcctcaatagtattggcgagtctaaaccaagaagctagaaccaagaagctagaaataggatccaagactaagttaggaagactgatatatgtaactaagacttcatgaaccaaatataaaccttaattttgtggatcatatgaatacagcgcggcacattagtctcccacacaaaacaagcccaatagtgtgagatggtcacgcctgataaggttttctatatgccttttagttctcacatacgaattcaaaaactctatccagtgaaagaaagaccgtaagaagaagagagaaagagacaaacctggttctcatgcaggattttcaggacaccgagcagaggctcatccacgctttgatcaggctagccgaaactctaagggttgcgactcggcaatctttgtattcgacggtggtgtttacattccaatggttggtttgtgataccgaaccgtttaaattaaatacaatttgaatttggtgaagaatggttggtcatgctcaaacaagtgagggttgatcttgttcagtctagggaagatcgatcgtgctcggccatacctggtattggattagtgtagtgttacaatgatttatgtatgtataaatcagtatcaagagaacagtcttttgaggaaggctgacggaaacatctcgacctagtactccgtgttagggtgtttcgggccgataggtgaaatgtaggcttatcaaactggtaggttgaactcactgattaagacactcttctctcagttatactttcacattgttgaagcttctttgattcgaatgatcaattggatcaaggtgataattagtattccacggaaggttggcgattaataaaacaccaattctattcatgtaacgaaattgaactttatttattccaccaagtcaaaccgaaagaaatgaaatacatttatcagcaacccacttttgggtttctctcatatcctttctattctattgggtttaaatttaaatcaaactataaaaaaaatgcccttgaacaagagttagccataaacacttttttttagccataaaaacttaatcactgattaattaaccgcagagcaaaccctacgaatttctccatttgtccccgtcttcacaccaatattactcattttaaccattgaccttgcgaactggacattgaagttgcctctaggtgccataaactcttgcactatggatcttgtggccggactagtccaaagaacgtgatcggattgaagaattcctctgttacggctgagattgatgaaataagatgtgtcaaaagtgtttccacttccggtgtcaagatcaacacgtgctgatccgtcgccgttttggggacaaagtctttgaagttgtggtacaaatgtttggtccattgttggatctgctgtgtttccgctcgagttgaatatcctgttcgtgataaacccacatgcagctgttccgatcgtgtgtcctcctcctattaattcatataggttcatcttcagtttgattaacaatataattgaaaaatatatatatgtaatatgtacaccgaaataaaacttaattttctttgaaaaatacgaaaatgtttggtttaaacatgaacctgatcctagagttatccttattcttatgcaaattaagtacgagtgacaataaaccatgcagtgcacaacactaactattaaagtgaatattcaaaatatgaaagaaaaaaacacgtacgaggagtttccatccaaactaatgtattggatctattctgatttctaaacggtgatatataggttacataccaacaagagtgacgagatcgcgagtgttgaggcgaaaagcggagaatttcctttgttgaatggctagagagtcacttggagaaggaagattgttaacgttcgatgccaaggaaactcttccatctctacgtcctgttggaacttgccaactttgtccgtttgtctacatacacccatgcaaattaaagccaaacaaacgttaattactctctgtccgcttgtacattatttttgtttttactttctttgtaaccaatactaagttaatattatagaagaaaccaagtaaaacaaacataaatgttacacataattgtttgaaaatataatattataaaatctatatttttttcaaatatatgttatgtaagttcttaagtatcaacgtttagtttgtaaacacaaaaccaaagaaatgaagaaacgtaatctttgtattttggcgtatatataccttgtaaaattagttaatataaaacaaaaaattgtgttgcctttgttaatcctctttacttactcatatctaaatacaaacacaaaatattggcatttaaaacaatcaagacatagttctttgcttatatatgatatattgattgttgtataattagtatatatataaacttacgagagaaaccgaatcacgagccgctaaggccaagatatcagcacaagagacaacaccaggacatgctgcctcgagctgcctcttggcatcgtcaatgacctcaaaaccatggaggttaacgtttgcgccagcggttctttcagagttaggtcccgataaaagcaccgaaccatcacaaccttggacaaagcaatcatggttgtgcattctcagtaacccgggtgcaacctttggatctgaaccaaagtgagatgccacagtggtccgaacaattgtctcggcattagggcacgtagtcgagtagaacccgatcctcgtaccttggccataaacggcgatgagacaactaaggaagactatgaccaaagcaaatgatcggaccaagcccattttttctttttgttggtttgtgttttagataagaccgcaagtgtgtttcgagttagtagatagagtttgttttagatgcatggaaagtgatacgagaacgtgagtaacttatagagggattgagaagtcaaatggtgatgttgaagtcagcgaaaggggctagagtgttgaggtaatttgacaaaacgacgacgttgtaatccaattcaaaactgaaaaccgcgttatgtgattggtcatgagctggcttcgcgcgttgacgattgcagatcatgttgggtttgttttttctcttttgttcgtttctatcaaactaattcctaattaatagtgtgtaatcatttataatgaatgtgattatagaatattgttttagcaggcgttaaactttgattcaactctaattctttattaaggaaactcgtattagtgcatgatattttcatctacaatgcaccgactttggactggttaatcgaataagtgttaaaatactttaggaaaagaaaaagtgttaaaatatccaaaacatgaacatccactattcaacaaaagttcactgaccgtctcacaaaagtgttaaaatatccaaaacatgaacattcactaatcactattcaacaaaagtccacggacatcactattcaacaaaagtccacggaccgatccatcgtgagagattagtgtattgaccggaacatatagatagtatagtctttaacaaacaaacaaataacaaaatagtatagtgggttttcttaataattaagctttgtttctttgactggttcggtttgttttgttcgaattttagtaatctggaaatggaagaatgatgtcgaatttttcagttcgattttttggtaaagatatatatttcggataaagatcgggttctacccgcaccaggtttgctatatagaatgatgttgtgatgataaagattaattctatacgtttactttcataacagattaatgactaatggcgacacgttgattggtggtgatcactgatcaatagccagaactcatgctgactaagactaaccatcgttgttggtccataggaattttttctgcaattaatttttatttgaaacaataaaaatttgtaacagaatagtgacatataacaaataaagagttttctacttgtccctttaggatataataaagtcagatgttttaaaaagaagagttttctatgaattcctgtttcttaaaataatttttgtcaatatagatgttattttcctataaaaatccatgcatgacgttaacaaagactagaaaaattcaaaaattgaagattatcatatattatatcttgtcgtcgttgatgtatattcatcgaccaaattttggtctctacacatatgtatatattggcgtcgaagcttaaaagaaaaaaaaagtaaaaacccttatggtctatatataaatcttgtttttatggtaccaaaaccatattctaactaatcgtaacgcaagtgatcgtctttgcttcaaatgtaaagctagataacctgaacgagtttggatgctggcatgctgcgaccttgaagtcggtccattgggtttttatttgtacatacggacaacattaattgcccatgagttgctaaaatccttctctgggtcttgttacaagcaccctcttcaaattagcctctatatattttgcatgaaaatagtctgagatttccccgcaaatgatatttgaattggaaataatttttctctaacccctaacccctaaaccctaaacactaaattgcataatctcaatttttctgttgagcacatctatctaaagatgttaattgagctgttcagatctaaatgggtgaagtccaaatatgaacaaaactaatgatacaaactcaatagcaccgtatccaaatatgaccaaactcaatagcaccgtatccaaatatgaccaaactcaaataagacaatgattaattagacagtgtatggaacctaaatatataatataattttctattttccgcaaaaacacattttctctcaaactcaaagaattgcatattttttaaattacattttttttttgccaaaattgtaaaaatattttttggagttaaaatgtcaatgtaaactccaaatagctagaaaatattttgaaatagacaaatttagtgggagctttgaaactttttcttttggtgaaaatattagttggggtattcggcttaaatacattttgctaatcagtccggtttaatattttctcgaaccggaaccggatcaatccacaattgactccaattacgtggcgaatcgtgaaaagatcatctatggaactgttcaaaaacgtctctttattttcttaaagatcaaaaacaaaatttctaatcatggactccaatttctctgatcattccctctaatttcggatttttgcatcttctccgatcatcttcaccactatgggtgcttcatcttctacagacgacaaagaatcatcggagaaacgagaaatcgaaagccttgctgcttcaaccggagctcttcctctgcttaaacgatccttctccaaactcgtcgattctcaaaccaatactgttccttttcaatccttgaaggtataattcgatttccgttaatctgggttttcaatagaatcgtgtataatctaacttagggttataaaaattggatctttgtttcagcaaagttttggtttgagctacgatacaattactactgaaggagagcaaaaagtttcagacttgtttcccaaattgttggagcatttaggatcatctttagtagatttgttcttcgtgcctgataaagaaggattgagttgggttgagtttgctagtggttatgtcaaatgttgtggaagaatgtcgaattcgatgtctttcaacactttgttgagagtttactatgtgacagctaaaaatgcaggcttttctccaaagcttgagtttgaatctgatgaagctgattgtaagattaacgggtcgatttcggttagtgaattgcttgtgtttctttggatgtgttggacaatgtcttgggatggtcgaagctctaaagctgctgaaatgaaagggtgtttgtttcttccggatattagtcatttgattctatcagcagtggtgtcttgcactgattctgaatctggaaatagtttggatgtttgggagactgatgtttctggtttagaacttgaacttcctatcgggaaattcttaacgtgggctttgatgacagttccttgcctcactgagtgcctttctcacttttgtaactcgaggcttcaaaatgtgacaagtgcagaggtattctttttttacttgcgaagttgtttcattgcttatattctttaaagagtctatcttagtaccattgtttgtgtggttaagtatacaatgggtttgaagttttaaaagaatgctgagatatgtgaagtttgaatttatgaattgcaggatggatctggaccttcaaagtccactgctgtagatgattctgcgtccaagacaagcgaaaacacccttctaacatgtggaagggcatgggcgatttctttgacgagcaaaagtacaataagcgaggagattttgagctcatgttttcccggcaatagcggtgaaccaaatgaacatcttctataccggtatctcactgccttatatctgagcaacttgtttatcttttcaagtgttttgaatttgattttaaattgtcattcatgtgaacatctgtttgtttattgaacattctgtttctacagtgtagttaagttatgttcgtctctctttcagctcatattatcacgggaaaggcatgaatcgactgtggtccaacgttgaagggtatcatgctcctatactagtgataatttctgcaagttgtaaagtcgaacatgaggctacttcaagcgagaggaagtgggtcattggtgcaatcttgcagcaaggttttgagaacagagatgcattttatggaagctctgggaacttgttctccataagtccagtctttcacgcattctcatcttctggtatcgcaaatatcgaacatttttcggcacactcgcttttccagtagtccagtctttcatacttatgtgttaacaatcttcaggtaaggagaaaaactttgcgtatagccatctgcaccctgctggcggagtgtacgacgcacatcccaagcctgttggaattggattcgggggaacacttggaaatgagagaattttcattgatgaagactttgctaaaatcacagtccgtcatcatgcagttgataaaacttaccagtcaggctctcttttcccaaaccaggtaaagccacaacaccataaaggaacaaaatgagtatatcatgcatgtcaaattttgtgctcttggatcttaataacatctcttgctaaatatgatttctacagggttatttaccagtagaggctttggttctagatattgaagcatgggggttaggtggaaacaaggctagggaaattcaacaaaaataccagaaaagagaagagcttttcactaaccaacgtcgaaaggtaaaagaaaaacaccaaaagagcatgacatctattatgacatgcgcaaaggttttcaaatttgacacctttgttttatctgcagatcgacttgaaaacgtttacgaactgggaagattcacctgagaaaatgatgatggatatgatgggtaatcctaatgctcctagaaaggaagagaggtaatgaatgaaagacgagaactggtttgatatatacacacatatacgttgttgtctcttaaaatatatatgcaagaaactcttttgctgttcatgagctcttggattcaatgtgtaagttatgtatactagtgttgccaaaacttgaaccagccagttgatttgatatttgcctataaaaattggtttttattcccagagcttcaatagcttccataacagtgtcatagtcccggttcctgaccaaaagttcatccattgcggttcacataaacaagaaaacaatacaaatctatcagtcgaaaccctaagcttgagacacatatcgagttgcacacagcaaacgatcttacattccgaaaagctagatttgtcaaatcaatgagattacaccaagagatattgatcgtgcttggtgcagcatcacttcttgtcttctgcttttctcggctgcaaaacaccataagaccaaacagagaggtaagcaacagacccgaaaacagtacgcgtaaagaaaatgctcgaaaatgttatcgtttcagacatggttttgcttgcagacctatatcagcttaaaacttcatatgctgttatcaaagttttcttctttctagactcaaatgagacattgaaaatgtgcaatcacataccttaacaccaggagcctcttggagaagttcttcatcagggataatcacaggccattgttctccagcttcacgaaacatttgctctgtctcaagatactgacctttatcaagaatcatctttctaatcgactgagccgaggttgcagctgcatcaaaagcttcctcaacaccattaacaaaagtgacagtgatctgcggcggctgctcatcggttctacgtttcaccaaaacctgacaattgggattcgattctttggccttccttgcattgcattgagctaagaattcaacacaagacgcaagtcttggatctaatgtgttgaactcaattcttacttttgatagaaacttcaacatcttctttagatatcaaacacttgacctaaatcagccattatacagatcattttagagaattaccaaaaaccctaactttacatatctcgcattagattccatgaaaaaacagagaatgattgcgaatctatataaatttgatattcagataacaacatcatacatcgtaacttccagattcataagagtcatagagatttgaagattaatctacctaaatcagagcattcaaatgattcgtgaagatataagaagattccatcacatagaaatgactcgttcttggaagtaaaggtttcgaattttaccggtcgacggaagctctccggttacgatcgtccggcgagatttagttgggaagtgaagaaggagaacgcaggagaagactgaagaaagggtttctgctgtgttaagtgaaggtaataaccgatggttcggtttgtgatgaagccaaatagaattaattaggcatgcgattccgacagaaccgaaccgatattaggacaaatcggttctgttcttgatgaagtgagtaaaccgatcgggtggcttctaaaattatgttttggttcgattcagaggtagataaccgacggttaactgcattctaatactacagtaaaacctttataatgtcgggactactatattttatgaatttataactgaaattcatttatctataaattaatattattatttcagagtataaattaatatttattaataaagttttatttttaattgttaaattttagaaaaatataaattcaaataatttctaatgaaattgatagtttggattttataaaaacaaacaaatttagggtccgattggtgacatgactaaaaaataacaaacagaaaaagaaaaaaatgataaaataggaatgaaaaggtgtgggtgtaaaggaaaaataaaacaaatgttactgtaaataataaccaaaacatagaaaaaattgtaataaaaattaaaaaataaagagattatttttaattaaatattaaatataaaacgaacataaatttaatttttaattaataaatatttaatttattttcctatttgttcctcatcaaattttgggaaggaacaattttcttctaacattcctaaaaaaatgaggaatgattaggaatattgtgaggtctacatgttacaatttggaaaaaaatattactagtgattggtgaaaaaaaagaggaacatgttgttcctccccattccttctctaaataatggtcaccaatcggacccttacttttggatttgatagttgttggggtcggattcccccacaagcaagaccgagccaaacagtctaagaataacaatcacctcatagttaaacatataaatggcccctagcctagaacaaagcacctcgggaccttattcgatcgaccgtcccgaagagagtttgtaaaatggctcgggtgttaatcatatgaacacagcccgagccaatcgtgagaacgctgcgggaaacatctatatcggctcgggagacagccaactgagcttaatggagtcatcaagcgcgccccgagccggtacataccgtttgccccgaagccacctctcaaacgaccaccgagccgtgaaaaacacgcgaggcaaagacttgtaaaaaccattcattctccaaggatcttttccggtaaaataggatcttttatgggactttcggaaatgataaaggagaatctttgaagataatgtcgaaatcaggaaatctccccaaaacctccgaagaataaggagaatatccttaggacgattatcctctagaatcgacctaaggataaataagaatcttccgaagaatatcggtagggaggcggtttaaggatcctatataaagtgccttagggacttcacaaaggggggatctttggatactcacaagaaacgcataactttatacatattgagaactacgaatggcttgatcccttcacagggtacgtaggcaatccattatggatgcagctatacctttttaaaaccctaattctttttctgttcttgagcaaaccctaatgtatttcagaagagattagaacctcttttattatcgagtcttggatagaatacctaatgaagaaaaattattagatttgttttccctctctaaacaaatctattgtgtgaatccttggttcaacaataatttaaatttagaagaaaaaaacaaataaaaattgacaatcaatatcaaagacaagaaaattcactcatacaagtgatatacataaattcaaattcattactagtgacttcaatagttcaattattggatttaggccgcctatatgactattgaaatgaaaatctgtaatttttagaatttgaaaacttaaacaaatttttagtttttttttagaaacgtttatagaggatactagaataagatagtttaaaaacacaatattttttggtagaaaaatattgaaggatatgttcagattaaaaatgatgtaccaagttgtatcaaatgtataaacatttttattaatttttatatgatagctaatttctgattattattttctttactagctatcttttttatatattaaaaatatatatatatatatatatatatatatatcggtttaataatactaaatctgactggtatgtcaattaaactgaataatagcgaaagaaaaaaataattgatagcagaatgaactaaaatgaataaagtttttgaaaaatagtcacataatgtaaaataaatagtacagcagattaatgatgttgtatttttgatttttaataattttaagacgcctgtatatatagtagaattactttttaaaaatatgaaaacgtaaaatgttatactatcgatcatgtttattgtttgtttagtaaataacaaacttgaagagaaacatgaactaagactatgatcatctcaaagtatttataagccatatgcaattttatttttaaacatatgttatcaatggccagaggaacgcaagaagatttggagacgtaataatattatccgatgaggaagttggtataaagttgcgtattgtgcatgtaattgagttactggcggcgttgcaaaattaattcacacatgttatttacttatttatatatatcacacatgttcatgtttcattttgatgtagttgtaagctctctctttctttttttttttccaaaaacatgttatcgatcttagggttacgttgggaacattatcattttgctaaacgaaaatgtccaaattagaaattgggaaaacatttaggtagtatgaaaacaagatgatcacctaaacatgttaagtttgacataacaatataataatgataaatatctatgaaactttgttaaatactcataagtcataatatcaactctttggttggtggcctaacatatgtcatgtaaaatttcgtcattgagaagaacagtaaacaaatttggcttctaactactctagtttcaaatttataaaaacaaaaacttcacaccaatataaaataattatgtatgtgttttaaaattttcatattatattttcttaccttctttgtgtgttttaaaaataaaattttatttaaatgtgttaacttgactttagcattgtacatggcaaataaattaagatttttatttaattaggaagtctattgagtacataaaaaacactaatgctacataacaaaagcaattgactttctagcatatttttttctccttttttacaaaaaaatgtaacaagaatattcattcacacacacgaacacatgactactacaagtctacaacataacttatacaactcagaaattccaaacgcaatccaattcttctgtaccggacgaatcacgaccgtcgaaaggtttgccggagaattgagtttcttgaccgtcaagcaacagcttcattagcgaataattgtcttgtaaaaacagaggatccgagtaaaacagagaaccaaaaccgtctttggactcgtggacaagtcttttgtcttcggtttcttggtcggagaagcaggtcacgtgagacgacgaaccggtgaaggagtctcgttgagaacaatccattaacgaaggtaaaccggctggttccattcggttaatgtgtggatcaagcattgacattggaacctttgtaccatcggcacgtttttggaaaacacgacatataacccattcgttctacattcacaaacaaccaaacaaaagaattaatttcaagtccccaaaaaaaacaaaagacagaaacacacaaaatctcttaatgttattaccttagctgtttggggaagattttcaatacaatatttgccttctaaacgatattcatgcataacccaattggttttaactcctttaggagctcttcctttatagaaaaccaaagttttcttcatacccacaagtgattttcccttgaatatctctttgtcttttcctgtggctttccaataaccggcttctgtcgcccggtttgtccttaaaccggtcgggtatttccggtctctcacacagaagaaataccattctttttctcccatcttagccttccctgttccaacaaaaccagccatgtatcagaattcagaaccatgagtttaatggtagaaagaagacaaacaaaagacttgaggaaatagaaagataaggtgtgaaacttacatggtaagtcccaaggctcaatcttgttgagatcaacttcaccaatggcagtagcagagaagaaagtgttgaaaacctttggtttgaggtagtgagttatgagttcttcatcagtagggtgaaatctgaatcctggtggtagatctatatgttcttcatcttctaccatttcgacgattcttgatgcctcgtaatccattttatcctaatagggtttctaaaaatgatcttcttgtaagatttttgttgttgttgtgtttgttgttgtttggagacgaagagggaagggtttttgagaagagagaagaaagttgaggtttttaagagagaggaaagtgtttgagcaacgaagctcctctctatatactagttttcatttgagaaataagaacactaaaataatttattctttttaatatattgaccaataattggtcaattttttcgtatcaagttcttctttagaacaattatttgtattgaaattcaagagttttacctactataaagaaaaagaaaatctgttatcttacttctaataaatatattattatgtatatacatgaggtttcgcgtttaaatctaatacaactatcaaatcatattttaaatcagaaaatgctatttttagttttcttaataggatagagaaaagaagaagatgcgtagattgttaggcaacttaagatgtgtgattctcaaatatcgttttcaattaaaaataaacctttctatttcaagaactttattatttccaagtttcaatttgaccaggaacacttcacctgtaactccctgtccctttttttgtttatgtgataagattgttcttatcacattaaatcgtgatgtttttgtccattctttatctcattatcaacggttagattttacctgtttagtaaactgtgattattgatttgataacaattcataattgaaactatgtgattattcatttatagtagtttcgagttataaatttggtactaatacgtaaggttactaatataatgggattgtaaatataataattcagtgtgaatggtttgaagagaatgactttttactggtctttctttttaacaaaaagaatgactttttttacatttactattcttacggtacgggtcactattattggtgttgttatttaggataagtattagaaagaaaaaagttcacatggttacatataatttgttttatttgtttaacaaatgttatccatctcgtgaaaacaatgtatgcatgcatgaaccttgtaaagtatatttttatattattaaagcaactggtcctcttgtcttattccagtgtctaccgttataagaaattataatattaatatcttttttttttttcgtttataatactaatatctaaaactatatattaaaaattcaatgaaagtttggatagaaaatcgatttccatgtgaaggtggtaatgatgatgaatgatgaggatgttgatgatgaaattcagttagactttgaagacattttgaacaactttacttaccttcgccatattatatgtcaagtattttcttttcatgatcgaatcacgtgttttgttcatacgaggttgtcatttgcattgctacaacatgtgcactctattttttcttagcgtcatttcgtttgatttataaaaatatataaaaaatcgtatgtatatggctggaatgaaatttggatcgttattgaaaggtgaagtaataattacgtttttcatactctttttttcaaattaaaaaaaaaaatctgattttctagacttaaaacgagcaagatatataagtttgacaagttgcaaaagagaaataaaatttatagcaccaaagagaatgtaagactctagaaggttagatgcatacattcaaaagtagtcacttatcagttatcactatttatttattgatcatgacatatatgatatagcatgacatatttaacaattcttggaagattttcaagatccatttcaagaaaaccttaataaaaccatttcaagacatagcgtgtggcaccatcgattttatttttgggttaaatttttatcaattactcgggtcgtcggatttactttctttcgaattgtaatcggggtttttattattcttgtaataaatttacaaggtaaaatgacatgcaaaaattttgatggtaaccgttaatagagatacaataatggagcacaatgactctagaaggttagatgcatacattcaaaagaatgacaatatgtaaccatagaactaatcatttttcatgttatcatgtaactggaaatatttttaaaatctttatagaagatgttgtatacatgagtaactatgtgtattatccatataaataagtcgcgaatcaggcattaggcaatatgatttgttgaaattgcaagcaatcacacaatcaatggaagctcaggttctgtctgttacatataatttatggtttcatctcttgttgttcgaatgattttgccttacttctatacccatattgttttcatggtagtgtggtggattttaaggatgagttgcttcgtgtacacaatcgatctcatggcactttagtaatgacttcggtcaagtacaaataaaatgtaaagaaacattggcatgatgttcaatttagtgtccgtaataggttagggtgtattgtcttacccaaagaccgttttctggctcaagagtacaataagattaaggcctagctagaaaattggtatgctagaggtcgttgagaaattaaatttcaatgcataccgtttgaagcttctccacatattcacaccacgaatgtcttcaatatcaagcacttatacgcttatgaattggacgaagaggttctcgatcttcctcatgctaggatggggcggctcatgaagcatatatactactctattctttttgatgttgagttttgttttacttttgactttttcatcgctttagttatctttttcacaagtagaatcctacttcggttttgtttctgatatttggtcgtttctcttaggaaaaagactagctcaattttaacttaaaaagcacttagtcgtcgttcgttttgtgtttttattcacaagcagattcttgtaaataggtgtcattcgtttttgtgtttttgtgtttttgtcacctttttatagtagagaaaatctaaaaagagattttgaagaaaatatatctcttatttttccgcacaattttttttagaattcaacggacctgagaataattggataacctgtattacaaatttacaataatttaccaatgtgttatcagtacttttgtgatatttttttttttttgataaaatttcaatgcctaaatgttttgaaactatatagatatgaaatatatatcacaagacaagacaagtagatatgaagtatatatacaaaagagagaattctttataaacgggaaagaatataacgtttggtgatagattatagtcatataacacaatcataatttcattgaaaatgtgtattagtgtattaaactattaatcatgtgacttttagactgagttcccttcttaaagcaatcaatagttggactctcattgggatattttgtaatattggctattaatgaaatcaaatcaatcattctaaagctaatcctttcttttttgttttagcagtcctttccttttcaggaaatattaaaacaaattccataaaaatatcttagttttggtgagcccgaaacacacgtgtcgatttttctttgaaacggcaagagttttaatcgtattggcaatgccaaccttctcatggacacgtcacacgtactagcaattccaaaatgcgcacgtggtggtatatcagtggggaagagaaaatggtaagcatcttctaaaactattcttaattatcataattaaagtatttgaaaataactaatttagttaattactttagtttaagttgggatttgaagtttgactaatgcttccttgggcgaaacatgggcttgtgagagggaacaagacatgagtcgatagttcattggtttgtagaaaatggataatataaatgttgtattgttaaagttaggcgatccaatgtcaaaaaaaagttaggcaatcgaatttgtagatatactaattaaattaatcacttgctaataggatcatggtcaacactttgccgtaaagcttgatttgttgtaattttataattgtgctgttagcttagtttgataaatcgaatcttccatactaaaattctaagtaacgggattgaggaaatctcacagctctctaacccttttctgaaactaaattgaaaaactagatatatatggtttttacgagtgtctcatgatcacgttaacttagagtacggtgcaatgaagacgcagtttcaactaattcaagtactatatcgactttagacatattgagagaaagagttgaagacaaaaagcgttttctagagatttatgtgttttggtattttcggggaaaatatcggtattgaactgaagttttttccttgaactaaataaatcgatatatatatagtagatgcattaatgcataacgtattgcttaaccttgttttaattatgtaaagaagtgttatatggaaccaaaatcttacaatcccttatgttgaaataatataataattttcttacaaaaaacatatgatggtcgataattgatgtcaatatatatttatttcagcatgaacaacggcttcgcggcgtttccttctctattgttggaacgacgcttctatatctttcccttaaagagacaaaaaaatgaaaaaaaaaatgaataacagtagaaaagttgagacgtatgaaccaatgttgagatacaaaatttagcaaatttatggtggttcaggcgttgagtgattaatgatttggcatgcaaaccctaactcatagctacaatcaatgcctgcgtggtagggtctaaacgaccctagttccacaacgttaggctcttggtctatgtttaccttttagaaattgccggagtcattaattaaagttaacaaaactttctaagaacacatattgaacccaaatttggtcatggaagttacttcttccgtgtggtttaaccgagttaattttataaattatccccaacatagaattagtccatcggttggtttaaatcactcaatttagtagtttttgtcagtttttttccgttctaaaatatctatatatatacactcacatatcatcaatttgacgctcatttgtgagagcctttttggctatctccagaaaagcttcttcaacattgatttttgcctttgctgaagtctcaaagtatactatattcccctttgatccacaccattggtcagctatctcctttgcaacctgcgtaagataaacccgcataaattagagtttagatggatcaagagaaaaggtgtttttagagaatatgtactcaatcttacaactcggggttttccattgtttacatcagttttgttgcccatcaaaacaaaaggaaacttggtaggtgtctcaggatttgcctgaaaattatgaggggtttgaggtaagagctagtgatattaagtactcaatataatacaggataactgtaatgttatccgccagaaactagcaaagagacggttttggatcccgtctctaggagatgtagggttttcgattatgaaattcagatattaaaaaaaaaaaacggttttgcgacctgtttgataaactcgtcgtgccagttgtcgatagattcaaaggttttaagagtattcacgtcatagacgagaacacaacaatctgtgtctcggtagaatcgtgatggtaaacttttaaatctttcttgtccagcagtatcccaaatctgtgcgaaagaaaaaaaagtgtttttgaataaaaaagattaacttgtggagtaagggattaatatatttacttgtaaaatgacttgtctttctgcgatacaaatctccttggtgactaaatctacatatattgtagaattatgtagctgcttaaaatccttgtcattgtatcttcggccacaagttatggtttttacaacgatgggaagatatagaaagagataacgaaaatatagcaagccgaagatttaacagaaaccaaaaaaattgaaatgtgcaatctaaagaggataccgcttcaacagtgatgttttgcctaccctgcatagagagttagaaagaaaggaaaacactagtttttaagagaaagtctcgaaaatcttgaaaaatagacaaagttttaactagtatacccgctatcgccgaggagaatgatcttaagctttgttttttccataagcacacgaaagaagtctacagagattgttccctgattctatttctgaaattttcaagttatgggtttttggacagaaatcaaagaagtctactgtactgtttctaccatctacgacattgtctatcaattttaattatttttaattttgaagagagaacgggctcttatatgaaactatgaaccgttatgccattgccaggccagcaatcaaacccaaaaatctaaatattttttactttttgaaaatcttattatataaatcttaatacgtttcacaagaattatatacactaaaatatatatagttcagcacatcctgaaaagtgtgattgaatttactaaattttgacaagtttttatatgatcatataatattgatacgtatttcacaagaattttgataggtgtcaaaaaataatagcaatgcgtaatgtatgttagttaaatttacatgattatataacatttattgaaatatttttttttacaacgaaaattcaatcaccaatatccactattatgcataaagacaatttatatttttattttggcaaggattatgtatagcagtataggaaatcaaatgtatggtaagtcgattatgaataatagcaaataaattagtgcatactttatcattaatgacatgttcacacgatttcaaaagagagtaattttgacatagttcggtaatatgaacatctattataaaatccccaacttatgtacaccaattgatttttgttttttctaaaagaatatacaccaactgcattaatatttatttcaaaacatgacatttctaataacatagtagtatataatatatactaaaaaataggagtacagtcagagctgaggaaggatgaattcaacaacttcagtaatactatggtcgtcaaccccagggatgggccaaaacttatttgttaacacctataaagtaatcaagccaagtgtatctttgtttaaattttagagtagttagtaaattattcacttggcccaaaaaaaaaagaagtaaatgatgccacttggtttagaacaaagaaaatttaaattatgaagtagaaggagtcgaaaatattcgaaaacagttatagacgggattatatatatgaatatatctacccattaatttaaaaccattttttttcctagttgctgaaatatgactttatcaattttgcttaattttcatctttaaagacagaaaaacgaatactagtgtattatccattgtgttttgaaagacgtgttatccattgttgtcgccaaagaaacatagtgtcgccaaacaattctccataaccataatcaatagtaaatcagtaaattaaatagaagtgagagcccgagcgaaaattgaagtacatccactaatgagtgtttcttagacacaaaggcagctatagcataggcaaagcaaaagtgagagctagccaaaccgcacttactttcacgtatatatcttcccttatgctttgttttgtgcttaagaacaagcaaaagcttaatccggaggagttggtatgttacatttttacaaaaaatttaaccattgcttttagtccttatcgagtcaaagtgcgtttcgcgtcttttggttgttttccaagttacatgttacttagctcaagattgaagcttttggacaaagtttggataaaacaacgtgtgagttaataaggaggctggacaggaaaaacaggatcggtcgatcatgtaccactccttgacagcttgactatggatcgatagaaactatctttagataatataatccggaaattttgggggcaagaatctttaatttctcttcttttaggactcttatattagtcatggtgtgtatattcagctgaagaatcactagaagcctctttagtgaaaagtttaactatttgaaaaaaggatcaccatccacgtctatttttgttgcgttacttcaagcgtatattcagctgaagaattaaacaattaaaaaggtcaaacactatttgaataattcgaaaacttgggggtttttaaatcagtaattttccataaagattgaaatattccaagctttgtgcttaattcgcttctgctccagcctagtccttaagttccatgatcacctgaaaacctcgtaaatgatttgtaaattttctcttgaggtcggtgaatttaactttgtgtggcttctatttctctatttctttcataccacataatatgttagggtttgagtttggtttagggttgttttagacaacaatcattgatattaattctgtcttcttctgattcccattgtgtacaataatcttattgatgattttgggttactgattgttctcataatttccgatttatgtagtctagtctaggctatagtgatcttagctagctatgaaatgtttttctttttctatcaggtttgcgtgcaggagaattgagtttccatcatcgctaagtttgctgattcttcacaatgagtaatgtgttccacgaatacgatcagcaatatagcgagctctccataaatctttcaaagaagtgttccttggctttttctctcaaaggaggtaaactgatatctcgaatctcttcctcttctttttttttctttaataaccaaaacgttttaccgatcactatagtctataatcttttcaaactaggagaacagaggaagttaattaaattagagtctcctctccttcatggatacttgaattaatgatcttgaaaactaaaatgttttcttagagaagtgtagaaaaaaaaaagatacacaatcttttagagatgttttggtttgggtttgatgtggtattgtatcttttaaattatcatcattttttagtccattttttgcctagcctaagatacatagatgatactttactaatttacaggagagaagaaggagaagctgtccgaaataacatatgatctggaaaatgcagaaaaattggtatgtggatatagaagtattctatctatgtttcccctatgatgattctctgccttttatttcactagatttcgaaaatggatcatgcagcaagtaaccttccacccaatatcaaatccatccttcttgaaaaattaaaggaatccaaatcgagtctaaaaagattgagaaatgaaatcaagaggaacacatctgaaaacttgaaagttactactcgagaagaagttcttgaagctgaaaaggcggtatgtaaggacatggttttgttcaatctaatataatcttgatcttgctagtaaaacacattttggtatatttttattgagttaaggatttagctgatcaaagatcaagattgatgaaatcaaccgagggtttggttcgaactagagagatgattaaggacagtcaaagaaaactgctggagactgaaaatattggtatttcaatactcgagaacttgcaaaggcagaaagagtctctccaaaacagccaagctatggtagacttttctcttacttaataggtcctctagtttttgaaactatatatttttcaatatcccaacaaggtgaattgaactaagtggcaaataaaatgattatttagggatcttccatgaagtagactacttttctttatctacgacatcatcgactgggctaaaacctagtgaatttgaacaagacttttctcttatttcatattcattgattcattagatatatatatatatatatattatttatttttgtatgaatataataactagtagcttttcaaatagtttgagatgatctttttgcttggtattgctttaaccaatgttataacgttgttacagcttcatgagatagatgatactgtcaaagagagccggtcaatcgtgagaagcataaagatcaaggaattttttactgtgactgcaccaattatcatttactttttattcaaactcgtcaagtaagccttgcatgcatgcgcttcctaacctgatctcggattctgaacaattgttgtgttcacttgtgaatcgtggatttattcttctattatctgtttgtgtgaagttctttcttttgcttcctgttgcattcttgacttgtcttcgttaatcaaatatgaaataactcttgtttattcttcatatatccgatccaaaactagaatttccatacgttattttggaatatttttttctaaatattttattacacaaaaatttgttttcaaaattagtaatagtatttcatatgattgtgacacgattcgcaatagatttctattttagaaatgtaatagatttctattttagaaataaaaataaaataagattggagcaaactaaactcttaacaatttatatatgtggtcaaatcttgtattcaaatgacaaatgggtggttcaccagatcaatgtgaataagaacatataaataaataaataacgataataatattaaccgacataacagtagtactttcctacatgttgagccgaagttgaattttgacattgtactatatcttagctgttaataaagaaagaacaaaaagttagaacgaaacatttcattgtacaatcatatataatgtatatatgtaatgtaaagaaatgaatagataagtaactaaataaataaactttataaacttgctctactttagcatctcaaccaataatgtaatagacctagaaattaaatccacatatagtttaagggacttaaacaaaattgagaaaaaatgaatttgtttaaaccaaaatagatatatcaacaaataatgactcaaaatataaagtttaagtctcattatattagaccatccccataaaataagtcatccatattcatatcatattagtgatatttgggattttttacgtgtcatcgtaagcctagaatgagaggaagagacagttgcatagccatagatgacttgccgggctagcttggttacacttcttgccccaacacacatatataaataagtaaatactttttcgtattatattacgtacgaaaaaaaatcaactaaaactatgtagataagtaaatatatataaaccatcatctccataatataaatcgaatatagagtaatcataatacaagctaccggcaagtcatccttggctgaacaacaatggcctttttcccacattcaaggctttagatgagacaatccattcacaccttcattttcattctgtaagattccctaaccataattaatactcataatggacgaaaaaaaaaaaatgagagcaaaagaggtgttgtgaaaattctctcgtttgtgaatgtagtttttgttccaagaattgtggagataaatagcaaacgaaaaaaaaacatttggagaaaagatgaagagatctttcaagtttgtatgtggcattgtcttgctctcttgaagtataaggtgtatcgtacttatagatctttctaccagtttccaattgctcattaatgttttggctttgctgcataggctcgtcttccaatagcttcgtacatttatgacagttttatatgttcataattagtcttcaatatattataagtttatattctaattcctcgagagaggcatgaatcatgctatattatagatttaatcccagcaatgaaaggtggatatataatgcacgtatgaggaactttactattatactatatatgcacatgaatttattctggttgtttttgtaatattattcaaactaaccaaccaaagaacgaaaaaattaatctttagtatactcatgaccttctattttactaaacttaactttttttttctcttgtaataaaaacttgtcacgtcataaatcataatatactgatatatgatagacaaaccaaactttagttctcttgcaatctaaaatgaatttcaactgatatgttttcttataaacattgaaatgggtacacaactctaaccagtggagaattgaaaagaaaaaatagtacatttgtatactatttaagggaagtactgacaatggtataaagaaggaagtgtgtacttgaataagttatcgagttatgtgaagtctttatcatacaagtacacttttacatatttaatttaataactcacatttcaaccaatagaaagtacaactacattattttttctttctcttttagttttagctccttgtccactgttcatgtttcactgggatgattttctctagaaagcaatcgtatatcctttttctgcaacactgctgtttcgtctgttgtatattgcaatgcttcgggttctcaaagtatagtaacgcaaggcgaaaaaaaaaaaaaaaaaaaaagtatagtaatgcaattgttaataaaaaaaatgatttgactatcttctgatcaaaatttaaataaacataactatatatacatcttctacattataacatttcttaatctcgtgtattgttgtttttttctttttggtagttcataaagcattaaacgttgttataggatcgatcagatcgttacttgtgatggttgaggtggatattccttccaatcacagaatcctaatcatatcagtatagtcattttcttgttctctaaagttctataaaataattgatttattagtaaatgtaacaatctacgacatttaaatgtcttaattcgaagattaaagagtgatttattttggttttgggataaaactgaaaagattgtgacccacgtcgattgcaatctgcaactactgccatcaatagatgatttagtcaattttaaaattaatcactatttgcaactaaataaatgttgatcatgcgatagcaatatcctaatggctagtgatgaagttataaatggtaaataatggccccttccctcctacttttcaattttggaaaaaatattattaattaatcttttgaaaactttagagcatctccaatgagtttaaaacattaatatgatgttacatattgagtttaatatgtattcttatggtaaaatatgtattcacttgagcatgttacatattggaataattatctgattataccatctgaatttaacttgaaactttgtacatacgtaggaaaaaaatatcgtgttgtataaaagaaatctccaatggagttttttattatatataattaatgtgtggttaacaaaaataatataaaaatgaaatacatatataacattagaaataaattaccaaattcgtaaattttaattaaagaatcattcaggtgtctttaaaaaataatttgaacagtactatacaaatgcacaaatttggaacaatgctacatacacataagaggagtgttaaggtagccaatggcagtgattgtgagaggaccagggtagcctgccttcttcaactccgattctatagagtgagcgaccattctagcatcataaccatcgggaaccggacagctgttgatgtcccaccacaccatcgtttttggctcctgcttcgcctcgttcgtatttcttgaatccatggttttcaacatacaaatatcagtcatcctcaaaattcggattaacaaatcgcttctttactcagatgaaatcaccgaccgatggatggtgcggcggaatagggcaagttacacatgtttaccgatactagtggctgttttatatgggctcagattcgtggcctatcatcaatgcctggaagacaccttccaagactcggatgttctctacaacatatcgatttttcttcagatatccacggtgcaatgtgtttttgtccatttatttgaatggatcctacatttaatcaaaaaaaatatcatgtgaattgattttccaacatcaaaactacatgacaaaacattaacgctttagtactaaatacaaaaaaaaaacatacctatacatagcacaatagcagcaaataaaacaaaagagacaacatttgttttaaccatctttctcttttttctttgttaaatcaaaagattacgaatttttgatatttttgtatttgaatgagaatgaagaaagagttgtttcgtatttataattagaactctaactctattcaagcgatccttcaaattaacattagtaaggaatacaatatatttggtcaaccaaattaaaaacatgtttccaaaaagattagattccaactttgactacattattacaagatatacatgacttatttagataaacgtatttggtaatttgcaaggtaaagcaaacaattattttctaagggtttattctgtcaagagatatgattagatactcattcatttctcaatattccaattcactagtttaggaaattatacttattgcataatcttgaggctcacgcgcctactacttgtatataaacaagctcaatatctctttgtgaaatatatcaaacatacatcttctacaaattccaaaatcaatgggcaataaatagatttgtctaattaaaaaaaaacaaatactgatatgggattctaatagaaaaaaaagaaaaatatacattctatttacgcgcatttaatccaaggaaaatgttgatcttcactatatataatgtctatcaaattaattctcttgcgaaggactctttgtttgctttcaacctagactttgtctaagggagtgaatatcagtagttgcaaaaaaaaaaaaaaaatcatgattgaaatattgttcaagttgtatctaagtaactacgaaaatatgcttaaactgatttttcttttataaattattttatagaaattttaatatgtgtttgtatacttatcaacatattttcacatgtttttagaaactaattgtaataacaactcgattctagcatctctttattaattaactttatcgatttaactagactttatatcctatggatttaaatggttcagataattaagaaatccaccccaaaacacttggatgcgattctatcggaaaagatcggatcaactgataagaacatataaataaaaattaaagtttattagctagtttttttttttttttttcactgatgaacaaaaaccgtggaaccaatgaaattcgtataaatgggcttcataagtggcccaagccttgttccttgaaagggcagttctgccatagctaattttttttaatcaagcccaaatatggtttgtccgtaaatgagggatttccttttacccaaatccaccggaaaagtattagagacaaatacatcatctcttaagtaatgtttcatttgatagaataataacttgcggaaattttctttaagaaacacatggcttgggccaattcatggacttcaagcccatttacactaatttcatttgttccacgtggcttgttatcagagagagcaagaattctaaaacctttcccacataaaccgtcgtccgatgaaactctataaccgtcaataaccgccgcgatttgaaaaataaatacaaaaatctcattctccattaaaccatttaacacaacatacgaaaaactggtaaatcacaaaagaaaaaaacagagagaaacacacgaaaatggagaaaacagaggaaagcgtcggaatcagagtttacacggcgactccgccgcaaaaaccatcaccatcaccaccttctcgttcaccaaaacccgtcttaatctcttcattgccttccctcccgtcaggagccgccgctggaggaggaagaggtcgaaaacgtcgcatggtggcgcaaggagttcaaaaaacggtttcgaagacatcaatgctcgtcaacttccttccgacaggaacactcttgatgttcgaaatggttcttccatcaatataccgtgacggagactgtaacggaatcaacacactcatgattcatctcctcttgcttctttgcgcaatgtcttgtttcttcttccattttaccgacagtttcaaagcatccgatgggaagatctactacggtttcgtgacgccacgtggactcgcggtgttcatgaaaccgccgcctccagagtttggtggcggagatgttatagcggaggcagagattccggtgactgatgataggtataagttgacggttaatgactttgttcatgcagtgatgagcgttttggtgtttatggcgattgcgttttcggatcgaagagtcacgggatgtttgtttccagggaaagagaaagagatggatcaagttatggagagttttccaataatggttggaattgtttgtagtgctttgtttcttgtttttccgaccactcgatatggtgttggttgcatgactggttaatttattttcacttttctgttttttggtttgttttagtatctatttcgtattttccttgtaatttagattatctgatttaaactccaatgttctactatttttatctattgtattgttaaataaaatgttgtgttgattctatctagacttgtttgataggaggagtacattatgacgttagtaaaagcttcctcaatgcagtactttttttgttaagatctcaaactatgcaattaattaccaattgagtccgtgatgtagtggaggccaaaaaaaaaaaaaagagtccgcgtgggctttgtcctttttgttgtgtaggcatgtcatgttggcccaaagtcttaatctccacgttgtgttttgtatctattttatttagattagattatgagttctttagatttgagcttatcaacccctgagttgtataagtgttcattgtcttcagtttctgatgaattgataggattaaaaagtgattttttttcataacacgttccttgtttcggcactctttcaaagatatcaacatagtcaagaagacgagaaggtcccttgttcatatcccgcaattctacaaagaaccagcgttatcaaagactaacaagaagaaaagtgacaaaatataagattggaagaaagaagaaaaaagagaagaagaagaaatttcaaatatgtgagggatcgaacaaaccaaaatactagtatttatatggttatgctttgatatcatgtcagaaaattcatcagtatgaaaagaaaattcttaattttattgattagccagtaaaattatctacataaacacataacttgatctacaaattttctataaatacgaagataaaaagtctacccaattagcaataatgaaatggagttttgtttttcctagtaacgatatgaaaatttattcgaatcaatcttgtattgtaatattcgaaatttgatcaccatgttttcattaagcaaaaattctccgttttcaccaagagtcacttaatgaacttagccagcttttacaatatagttcattcaagttcttttttttttttttttacaatatagttcattcaagttctttttttttttttttttacaatatagttcattcaagttcttttttttttttttttttacaatatagttcattcaagttctaattcgagaatgttcaagtcatgtgatatatcaacgagacttgtttttatacgaaaaatgctaattttaataaaacaaaactcaaataacgtttctttagttcggggaaacagtcgaaaaatgataaaatatgtttcctaagaatctttatcagtcgtgcctccaagtggggataatataataaatgtaatgaaaaaactttattatatagtatatatttgtgatttggggtggtctgaaataaaggtactatatacttatccacataattgcactttttcaatgttagacttggcgttcaattacttcttatccacaatattgcactttttccaaatcgacttggcgttcattagtaaccacaacttctaacatcgacttattacagccacgtatctctgatatgttgaagattttatgacaagaatataggcaaaaaagaggaaagaaactgaagatccactatatagtaaatacttgtagcttcatttaaaaaaaagaaagtgatttcaatgttaatttatttttcctacaagtaccaagctaaaactgtaactaaatgactattattatcagcgtaaaaaaacacatactccttttgttttttttttttgattttctagaaaaaaattgtttcaaaaagattgattttttggttttcaatgcaatatttatttagttataattgataaattgtaaacttcaataagaattattgaatatcattggtttagagttattgaaaattataaattacaaagaataatacatttaaaagcaacatttaatatgttttcttaatatttgtgtttttcctaaaaaatcaaagaaaaaagaacacaaggagtatcaatctgtaaaatggatttgtttgaagacaaagattggtttttttggggataaaatactatatttttttagtattttaattttttgttggatcttcttagttctttaaaaatgagaaaattaatgtttatatcatgtaatttgtttctttcataaatatgttttttttttctttctctccaaatctaatcatgatattgttttccatggatatggctattatagaaagctaggaattaaaaagtgtttcaaggttttaaatatgttttttgtttgttactctaaagtttgttttttcttctgaaatttcatttataaacagtaattttttaataaatgtgtgggtaacaaaaaatttattgacatagttagaattagaaaacatgtaaattagaagttaaatggcctttaatcaaccatttttacattaatttaaaaaaattcagacttttaaaataaaaaagttaaaaatgaaaagaaaagtaaaagtaaaaaaaagtgctgaccactgaccagattgaaaaggaaaataaaaagaaagccaaaaagagacgaaaaagagaaaaaaaaaagtccacaaaaacaaaaataaacttgtggctaagaatcctcacgtgtgatgacgtggcactctgggcgaatcaaaaggttgtacaattcgaaagatcacaaacccaaaaagcaaaatctgtaaatcttttttctttctctctcgcaaagacaaaaaagcattcccaattaacaaatctagaaatcaaaactcagacaaccaccgataacaagacagtcgtttctctctctcttttaaacaaataaaaattggaacttttttcctctgtcttctcaaaaagtttccgctttttgctcgctggagaagaaagaaagaaagaagtgaaaaggaatcattaccatggctgatccggcgattaagctctttggaaagacgattcctttacctgagcttggtgttgttgattcttcttctagctataccggatttttaaccgaaactcagattcctgttcggttatcagattcgtgtaccggcgatgatgatgatgaagagatgggtgattccggtttaggacgagaagaaggtgatgatgttggtgatggtggaggagagagcgagactgataaaaaggttagttttttttggaacttgtgaattgattttgatttgttaaatggaaatgattgatgggtttatgttagattggtcaaatcttagttttattgataaagttatgatttttggtttgtttatgtaagaactaggttttcagagcttttggggattcgaaaattgtaaatctggattctcaaatgagtttttttttttccttttgttataaagtgatttgagatcttaattagttccatttggttttgattgatggttataggttttgatattgatttgcttaagaacttttcagggttttagcttctctgtgattggaatcaagtctttgatccctgtagcttctagcttctgtttgttgtttgtttgattaggatacataacaacgatctgactctggttcttatgttattcttcaggaagaaaaagatagtgagtgtcaggaagagtcattgaggaatgaatctaatgatgttactactactacatcgggtataactgaaaaaacggaaacaacaaaagctgcaaagacgaatgaagagtcaggtggtactgcttgctctcaagaggggaagttaaagaaacctgataagattctaccgtgtccgcgatgtaacagcatggaaaccaagttctgttactacaacaactataatgttaaccaacctcgccatttctgcaagaaatgtcagagatattggacagctggtggaacgatgaggaatgttccggttggtgctgggagacgtaagaataagagtccagcttctcattataaccgtcatgtaagtataacatctgcggaagctatgcagaaggtggcgagaactgatcttcaacatcctaatggtgcaaatcttctcacttttggctctgattctgtgctttgtgaatctatggcttctggattgaatcttgttgagaagtcattgttgaagacacaaactgtattgcaagaacccaatgaaggcttgaagattacggttccgttaaaccagacaaacgaagaagctggaacagtcagcccgttaccaaaagttccatgctttccaggaccaccaccaacttggccttacgcttggaacggagtttcgtggacgattttaccgttttaccctccaccggcttactggagctgcccgggggtttcaccgggggcatggaacagcttcacatggatgccacaacccaattcaccatctggttccaatccaaattctcctacactaggtaaacattcacgtgacgagaacgctgctgaaccaggaaccgcttttgatgaaaccgagtcacttggtagggagaaaagcaaacccgagagatgcttgtgggttcccaagacgctgaggattgatgatccagaggaagctgctaaaagttccatctgggaaacattagggatcaaaaaagacgaaaatgcggatactttcggagctttcagatcatcaaccaaagaaaaaagcagtctttctgaaggaagacttccgggaagaagaccggagttgcaagcgaatcctgctgctctttctaggtcagcaaacttccatgagagctcatagaaagaagaagaatctaagcagctgatttgattgtttttgggttcagtcttgtgttccaagaaagcaggtgagtccttttgtacatatagctatatatacacacacatgtttgtgtatatatatataatggttgacatagtgagggataagtagtttttggattgcagagtgaaagtttgttgtatcataaatgaaaaaacctcaaaactgtagttaaataaatgtatcttgcatgaataacttattttccctatcatgacattgtatgttcacagacaaattcaaacaagtttaaaggaacgtttatagttatccacatgatgtatgattctcagaatcttgagagtgatctaacttattggacttcagtagtagtggcagcaacaagcttgttttcggcatccgcggaggagcgaaccactgtcttcaacttcttagatgaccgcgatgtcaagtgtttaccatggtaaatcaggtttgctttagtagatgtgtagtcattcttataaccagtccaaaaatcacccaacaaagacatgaaccaagtctcgaaaaagcaagccgcgatcaccaatactgcgaaaataacgcaaacacagcttcttcactgcaagcaaatggtcatggttgatgcatgaatggagagtctattgacaacatacataagcaaaagcaatgtggtagatgcatgaagagaagatattgcaagctgccaactacggttcgatatttgtataatctaggattaaaaatattaaagaaaccacactaaatggattgacaaagtcagctatatcagaagatttatcgtctattgaccaaaacaaccaatgaaagaacattttgatactatattaagagataagtagtaaattaatatagaagaagtttgtgaaaaacgccaaaagaaaaagaaagccactaccttgtttgttcagttgcaatttccaggaaatttagtaaggaaattagttgcaattgtgacattaaattcgtgttagtctttttcatgactagaacaataagagtactattgaattagtcatcgtttaattgatttcttacgtttggtcaaacaagtcacggattatggtgagaaaacgattacttaattgtggaaattagctataagaaattttcctttgctttttatgtttttcttagtctacttgtttgtctcgctgccttactcttgcaaaatttatacgaaatttcgtctgaatattttacataaagtaaagtaagtattcatatgaaatttgtatcaaaatttgtcaagactagtaagaatgaactgaaccacacaatacaacaattcaaaccatgaccaaaaatatgtcgatttggtttagaaaacaaataaaacctctaaaaaacctataaaaccaaaaagatactccttctatatatattttggagatttttttccaatttatattataagatgtattcaactttctacgaaaattatatattaatattttataatcatttgtattgtgcagttttttttataattggtaaatttttaaaaatttaaatatttcttaatttacgtgtttttagtcaaaacatcttatacctacatatacatttttgcagccattttatgaaataaatcttgtagttggaaataatttacaatggctgccactgaattttaatgtttgtttttgataattagaaaaaaaatcttcgaattaaatatttgacatttaacaaccttccctaaatctctccacattaactacacaattagttactaaaataaaacttccaaaatatttaatatcatttaattactacaaaattatcatttttaatattgcttttctccatgactataacaattcgattataatcatcaaaccgcagagatatttgataacatttaattactacaaaattacaatatatttagacaataattcataaacatatcataaataagatcaacattaatttaaaaataaataatacattttgcaaacttttatgtatactaactttaaaaaataaattgttccgcggtataccgcgggttaaaatctagttaacatcttatattttgacaatgaaggagtatccccgaccgtatcatgtatgatatctaagacacacatacatattttaacatttccttagttttcttaacaatgtaaggggtcaccaatcaaaaccttaattgtaatatatacataggtgtataatacaatttaatattaatatgaccaacttctttccaaaaaagtacaaaaaacaattccccatcaaaggtgcagaagaaatttcctcttaattctttatttattatcttacaccaagtctttttgtaagtttctcctttccctatccttcttggtctcttcttccaactgcaacttcctctcttttgcctcgccaccaaaattgtgtccacattgacttattcatcatctatatatacacaaccataaaaacaaactcatatctccaacatctcctccaaaacattcttttccttgtgattcattattttgcctagttttacttttcaaatagacttctaacaaaagttatgactgaaaaccaattatatagctttataaccatgaagagttcattgtctaaatgcaaacagtcttcttctttgtctttccctttgtttggtctgatcaacttcttcctcatcggttttttcagatgggtttcttttgctcagttatttttctctaggttctggcctcttgttcaacaccagcaatgtgtttccgagaagaagagcaaagatcttgagttccaaacttcgatcaaacacgaagaatatcgtgatgatgatgatgatggtctttgcagagaagatgtagggatggttatgaaaagcttagggctttccactgaccaagaaaacgagggacttcaaaaacagtacagttccaaggaggtttcgaatctgttcgaagagaaagagccaagcttagaggaagtgaagcaagcttttgatgtctttgatgaaaacagagatgggtttatcgatcctatagatttgcagagagttttgacaatccttggcttaaagcaaggatctaaccttgagaactgcaggagaatgatcagatcattcgatggaagtaaagacggaagaatcgatttctatggatttgtgaaattcatggagaacaacttctgctgaaatcgtatttccttaaagtatcaatttctgcacttcttttcttcttgctttgagattgtgtctgttaatactgttgtctccgcaccttgtataaactaccaaactttcatatcaaaagctctgctatagagcgtaaaaaccaatgagtttggaaataattgtcacagacatgaataatctgccaaaaggtgttattatacactatttacacctagagattgatgactaaagggatctcaaaaaatgatgcaacttattttagtactacttacaataactgaagctcgtgaggccgcaatagaggtgcaagagctctccatcactctataattcaacctttggtttatagcttcaccagtaatcacagcaagaacactgaccatctaggaaatgatggaaccgattggaatctctgataactatgtatcgttttgagatcttcgagataagcttaattgcagagtgacaatcatcacatatcctcacgtttttagtcacgtacaatggtgatttctctggcgtttttatcagaccatatgccacagctagcttctcactatgataagagaggttatcttctctctgttcttcatcgacatcatggaaagctccagcaacatcaggcgaataccctaatggtttaatcttcgacataacttccttaacctttgcataaatcagcgtaatctcggggtgttgattatcctctgcaagaaacacatgggtttgattacgtatccctatccagcttactccaggctccttcttaacacctctgttattcatcaaagaacgcacttttgccacaccttcccactcccttgacttggcgtggatattggataacaatacgtaaactcctgagtcgtttggatacttctcaatggcatattctgctactttttttcctaacctgtaattccggcgaacataacaagcatttagcaaagttctccatgcaacaacatcccattcaattggagctgttctcatgaaatcctcagcatccttgaacattccagccttgctcaaaagtccaacaatgcatgtataatgctgtatatcaggctggacatcaaatttcttcatcagctgattaaagtaatgaagcccttgctccacaaaaccaatatggctacaagcctgcaaaacgccgataaaagttatgcggttgggaatctctcctgtaaaaatcattctatcaaaggcttcaagcgcttccctccccaatccatgatgtgagcatccagatatcattgtgttccaagtaactatatctctaaaagtcatgcctgagaatgctttccttgcatcctcaatgctgccacttttggcgtacatgttaaccaatgcattgcctaccattacatggttcctatagccggatttcaaaacaagtccatgtagaagatcgccctgttttagaagcgatagctctgcaattgaattcagcaaaatagcaaaggtgtactcatttggtggaacctctttagtatccatctttgaaaacagattcagagcctcctcgaaagacttatcctggaagtaagcatccatgatcgttgtattcaagaaaatgttttgagcgtgtgtatcatcgaaaactctctgagcataaaggactttaccacatttgccatacatattaatgagtgcaccacaagcctcaacttcagcgttgaaaccaaacctcaccattcggctatgaacctgcagagccaaattcaaatctctgagattggagaaaagccgtaaagaagacaaatacgtgaggttgttccaaacaaaatcttcgttagctgtctttctcaaaacatcaagcccttctttaaaagcaccacactctagataaccactaagagcagaactaaacacagaaagatcacaataaggaagatcatccaaaactcgtatagcctcgccattccccgaacacaaagaatacatgtaaacaagagtgttccgtacaaactcatgagaaatcaaaccatacttaagaaaacatccatgaaactgtttaccttcttcaatcctcccagagtttgaacaagacttaaaaaccacagtagctacaaactcattaggtctcgattcaccagaaaaaaacatacttttaaaaagcttcaaaacttcaaaatcaaacccagaattttgatatcccttcatcatcgcacaccaagaaacaacatttctctcaggcattaaatcgaacagcttgcgtgcacgaacagtttctctgcatttcacatagagattgatcagagaattgatctgatacgcgtcttcagctctagatgattggttggtaacaatcaaatgagcgtgaatcgattctccaattcttagataacttgaattagcacagactttcaaaagctcgtttagacgatcaatcggaaaaggagttttttttgatttgggtactaaagacgcgagcttgtcccactttaacaatcgttgttcgatcacagacaaggctgacatggcgccaaaattgatatttttcttcccaaagtaaccagagattatgaggaaggtgcttttaagttttaacggaaagtttcgaagtcaacaatcactagtctctttgactttgacccatttaaacatgtacattacggcttagaacttttaaataaaactgttgtgaaaattattaaaaaaaattacattaattgttctttatgctaatttatatttattatttatttatttttgtattgttaataaaattagatctataatatgtaattacaatttttatgtttagatttatttgtgagtcgaaatatcaatttatatatattatgtataaagctgattatttataaaattttaatattttttcacttcatgaatacatataacaacaataatgatattttgatacaattatatataactatgttacttttgtggtttaagattttcctaactcgattataaataaatcaatttcttattttatgtacgtcaacaacattgtgagactcataattaaagtttggattgacatcaactaaaaaagatctgaaaaatattcgtacaaaaaaataaaaagatagcaaaaatgaatgtcactgaagtcaacacttttggatcttttgtcattgtatatatcaatattagagaaatgatcttgttttggatgatttgaaatttgttcaacttgattataaataaactatttatggtttaatttattctccagatataatactccaacaaaattgttataggctcatgattaaatatagaattgatataaactgaataagatttcaagagtattatgaaagattttagaattctatttataatctagtgttattcaattaaagattaaaaaaaaaatttacttgaatgcaatgagtttttgaccaaccaataaaaatagagaaatttaaagagaaaaataaaaaattataatacgaatttctaaagtagaactcaaattctctctaatacaacatcacccttctctgttcaacaagcacctcacgcaacataggtaaactagaagattatcgtgaagcaattaccatcatatcggcaaattttgctttccgtttgtgatttttttttattttcttgaaagtaaacagttaaagagatacatataagtatataacatgtttttccggcgaaattcacagcctttccggcgagctacatcatgctcagtcacactcgaccctcaggtaaactctaaagatcttcttcctatctagttgctatcactggctctatctaaactttgtctaacattttcggaaaaacagtctatttccccacaataactatgacatcatgccagatagagcccgaactatgactacaatccagttgtccccgaaaagatacttttcgatctatatctccccaaaatcgatagtttttatctatttccccatatatttgggtttaatcggtttgctgaccaaacccaataaaaattcactcaacccgataccaaaccactttatatgtcaagcctctttaaaaaaaaaagaaaaaaaataataataataaaaaaaagaaataacaaaattgttgtcgtcttgttttctccattcttccccataaaattccagattatgcttatttgaaaaaatagtttatctctctctttgattgttacgatgggtgttagatttattttgaatccacatacaaatttgtcgtaactaattaagagatattcaacaaagcattttaaacgcattctaattgttaataacgttaacatcgacattgacctgaaaactggaatcgttactaagaatatggctaagaaagagaagatcgaggtgagcttccacaggaattttacaattcacaaaagaacaacccaattaaacaaaatcaacatctcaattattaaataagttttatccaaattctattactgttctttcaattgctcatcttaaaatcaatctgggaattacaaaaaccagaaaacaatcaacacaaaccatcaagtcgacaatggctgattcagcgttatcaatcttctacaaaatgaagcaagtgatttcaatgggtggaataatgtgggaaggtctcaattcgagtttaatcaaagtcgatgaagctttgcttaagcagcagatccgagtggagatgaggaataaaaagaaaaggggaaaaactggaaaatatatctatagccaccatcaccggagccgacatcaccatcaccattgaaaggaagaagaacgtcatcgtgttgttattgtttcataataattcaattaattaattaatttatttatttagtgatactcggttagattaggtttattctggtttagtgttttcattagttagttataaaaatagtaaaccgaacaaaatcaatggctgtgggtaaataggtgaaaactatgcttatgggatagatataggttttgaactatagattcatagagatatagattgagaagtatcttttcggggccatctggatcgtcttcataaatcgggctctatctggcatgatgtcatagttctcgtggagaaatagaccgttttcaacattttcttctaatcaacactatttctaatttaacatgaaaatggtataagtttttcaaaaatagatttgtttcacattttctgtaatcaacgtttatttctttgttaacttgtgtttggagtaatttacactctagcttacattattccacaattttaaagtttgttagctaaacatgaaacttttccttttccaaatctcaatttgataaatctaaatcaaatccgatattatctgaatcccatattatttcaatttcgataaattttataaaccgtcttattacattcttataaataagagacattcttatcagataacttgtctccgtccatatgtattgtttacttagttgaattctttagtttattaagggattaacatatatatctatatatatttttgaaacagaggaattcgagaagggtaacgataaagaatggtttattataacggagaggaacaaagttgatcaaggtttaagccaaacaaagagagttggtaatggtgcgaaaaggcagaaacgtgttgacactaacggaggatattggcacgcaacagtggctgcccaaaagatcaacgctggagatggtgtcgttggcaacaaaaggccacttgcatactacgataggaaaccatcagaagacgtcaaaactgattggttaatgcaagaatactctcttgatcacaacaacgacaaggtaagtatgtcttggttcccaagttatttaggttttcaagttttggattctgttttgagtcttgtttttgttgtgcgtctaggattacactttgtgcaagatttatcttactccacaagcaacaaagaagttggagaagagaagaagaagcagaagaaaggagaacctgtggaagcatcggaagggcagcagccttgtaatgccgagtatcatcaaccgctagcacctctagattcttgccaaccgcagcctcatgatttggctgagcagctggatttgcatcaaccagaacagttgcagctgcaacagcctcatgatattgtgtatcaaccacagtattgtttacttccagaacaacatcagctgcagccttttcctgataacttttctgagttgaacagctttcaacagcaaccagtgatgatcccagacgatttagaagatttcttggctgaattaatggagccacattcactggatggagatgaagaatccaacaattatgggttttttgaaggcttatttgacacagaaggaattaatgataaaacattacactaactgatctcagtctgtaaactttgtatactaatgatgatgtgttagtataaagctgtaaactttgtatactaatcagtgtgcataagtattgtttagcaaggaagagaggaataccgtgttctttgactctaaagtatgttcatcgtctatgtgatagcacaagccaatgatatcatatgactcagcaaaaaaaggcaagtaaactcctctaggaaatcatcatctccatctatttcttcaaagctcattaagatctctgcattttaaagggagaagataattccaaacctttgtgagcataatacctttttatacattgcaaagtcaactctatttttaaaatttttgactatatcgagaatagtcgacaattgatttatttctattactaatggatttcatatattttaagttgtcttaaagaaaatacaaccaatatatttcacttacaaaattggtctatacttttctatatattcataatcaactacatttaaaagtgttgactagattgagatttctcatgatatacttaaatagttaaattcaaaaaaaaaaaaacgatatttttttctttgaacataacttaacgttacatttttaaaaactgatcttgaatatgtgctaagatcgagatgattggttctaacaatcaaatgagcgtgaacagatatactaaagattatgaacaaatcattcaacaaaaggctgttaatgaagtcgaccatttatttgtctcatagtaatattaaactctaaccgattgccctaatgcaacatcgttatttaaacaagatcagtttcagttcatcagagaaacaacaatgggtttgctaaaatgacacgatgtatgcttgctcttagttcccgaattcttgaacactctaaacccaaaaaggttcctcaaatattgaactcaaaatgaaaaaaaaaagtgagaatcggcctcttgtttcatttatgttggaaggcaactatgtcattgcaattactctctaggttgtaagtatgaatctcgttctaccttcttaggaatggttgttaaattatgttgctacatgttctactataagggtcatgttactgtacgtataaaaaccatatgtttgtgttacaacatgttctattatggatctttttttactaaaccaaagtacaattttttgttgtgtgttttactcagttatatcttttactctttcatcagcttacaaacttcaaaccaaaaagcattcaaaaaaaataaataaacaaatgagaccaacaaggcaacacataattagccatcatacaaattcaggctaaatttatgaaaataacaatccacatcgttgcttttaaaaattagaggtacccaccattgtaattctagcatgtgtatggttgtctaagcccaccacacatgttttcatacggtataagaagtgtcaactatctcaacaccagaattgaaccaataatatgctcatcagtgttaagcaacaatcccacaatccttcatcagaaacaaagccttcatatctatgagactggtttagaaacaaggatagatatgaaggttttgcttttatagctgatgaggaatcgtggattgtggcttaactatgatgagcctagtactggtccaatcctggagttgagataggtgatactttcttctaccgtatggaaatctgtatggtgggcatacatggccagacataagcgagagaaagagagcccaatttcaggagttttctcaagaaggtgaaagctctatagagagagacagagagatgatattttctggtgatgtgttttacaaaggtgcacactgtgtatatatatatattgtgtttagaaatttaaaaggtagaaaatcttatccaacaactaccaccaaatataggtaattgcatgtctatatattgtgtttagaaaataaggtagaaaatcttatccaacaactaccaccaattattaggtaatttcatgtatttgtgtttagattcactaaaaaagtttattatatatatatatatatatattagattactgttttccaattttttgaattatagtttttttcccacgaatactgttaggacaataatctttgtaaattataaacacatatatataatatatgtatgtattattttgatttggttaaaagaataatattataaatggacaataaacgcaattttgagtaattttgaattattatttattttgtggtaaaaaaatatatgtatgtagtagataatctaacaaataataatttaaaactactacggattctgatttttaccatatttttggcaattaagcgattatcctgacttttccgattttgttgagcaagttgagcatgatatgctcaaagatttctaacatatttccacacttttttagaaatctttgagcatcgtagagatttaatactggctcatggaagtaaagatcttaaaatattcaaaaatatttatttattataaacggttgtgttagtatatttagtttaattgatatagtttattacaaaatatcaattatattttcggtacattagattaattaatatatttttgttatactcatgtttctaaatgatataatattatgattggtattttataattaataattagtacatttcatcatgttttaaaaacagttaaggtaaaaagttaaaagttttactatatcgttaaccaacagttttaatacaattatggttaattaatggtttaagttactaaaatatttaatcgtatatttatagttacggtttttaaccgttttaaacggttactatattgttacagtttagatatgatatgaattactgtctcaaatatggttactgtttgattttggccatgcctacctttctgatcttctgtaagatctataacccataaggttactgtttaagttgttaccttgtgtgggaatgttggattggcctagttttagactctcagattctttagctttgtacttatgatgtcaagttaaaatagagctccgaaattcttgcggtaaacatgtacttatgatttactagaaacttcaaaaaaatagaaaaacaagctctttgttttgacactatcttgaaactagaatttcgagaaatagaagaacaaactcttgcttttcattgtttgtaaaaatgcaaccttgttaggttacgtttcacagtcctcatcattggaattaaggttacagttaggaagttcttaagtagtttcttcaagaatctcctaccccgagaaaatctatatacctcggggtttttgtagtcattatatcttctgcttctgatgatgatagtaacgatgatgatgatggttgagagatggagacatgaggtgtgaataaggccaaggaatttgcagggaaggtagagaagtgatgatgatgacatgagtgttgcaatggcatgcatgaagaataattcttttcttggagatattgagcattgaggttagtactttcatgacttacactacctgtaaaccacacaataagaaaaataaacatcaagaactcagaattgaacccatattgctgtgtggtgttttaaatctattgtttagtattaaggagacacaaaccaggaagaaagttggaggtttgataattctggatgttatcgaaagatcttatgtcagaagctgattgcttcctaatgattctattcatgagactgtgccaatgattcttaacagcatggtctgttcttcgattgaaaagcttagcgatcttagaccatttgttaccatataatatgtgagctctaagcagcttctcttcttcctcatcagtgaaatttcttttgttaatcttcggatcgagctggttaaaccacctttgtctacaacttagaccttcaaacacatagaaaaacaagaaaaaaagattcaactttcatgtccaaaaatagagtaagtacgaaagaaaaaaaaaacaatattttacttgttcttggttccatcttctctccaatgaatttccagttctgaggaccaaaaaccgccacaagctctttgagtttgagatcctctgaaagtgtccagtgtccacccctatgtttcttcttcttctcctcttgatgcatctttctcaatggtaatgcattgttttctccaaacccattaaatggcctctgcaatgaaacatcacaaggggtattttgaaaaacatgagtctcctccaaaactatgttacatttatacataaacagatacataatgtattgttgtgtgatatttctctgtttatcgtattaaaatgtgtgagttatagaatagttgttgaatgtttcttaaaccttgccatgtaaagaggataaattttggtacacacacattttttctaaaagaacttgacagcactatatgcaaataagatctaatctctaacacagtaacactaatccataaatgcatacaaaaatatttgtttcttacgaaatttcggaagcactggaaaaataatactaggaatttgagatctagtctaaaatccgatccattctcggatccaaattttggtgtttttaaagatcaggagatttaaatatggttcgaaatctctttagtaaataaaagaataactcaaaatatcaccaaaacaaattttacttttataaattggagtgtttgtaaaatggatgtgaagtgtttttaagagatgtgtgttagacaaagattgatgattgatgatgaagtgacaatggtgaagacaaagattgatgattaagtatttaacaacatgattagtaattagattaatcagaaagatatgatatgtttataccttgaaagctgacaaagtagactgcattggaacgatactcgaacttccctttgattcaactaattagaaaaaatgaaaactactaatatacatatagtagatttttgttaaacaacaaaaataaatgctttgatagttttgacaacattttaaggtatttattttaactcactaccaaaatatgatactgatgaatgcaaaaacaatgactgattatttaaaggtaggtttataaagaaaagttgttgaataattagatcatgaaaacaatctaatttagttctaaattgtctccatcttacctaatttaaaattaatttaccatttagaattaagtaaaaaatctagaattaagaaagaaatcagtcatattttcttgtacatttgactatggtttacatttcagttatgttacttaattctaaattgttttcatatttagaagaaaatatacaatttattagatcatgaaaattgtataaaacacagaacttcccattaaaagtagaattttatttttcaaaatttcgaacttaattttagttatagaatttcattgttataagtcaatttgtattatcaattttaaaaataaatttctcaaccaaatataataaattatagccacagaaaaaaagccacaggtgaaaaatgatcggacggctgagatcaattgtgcttcttcttcttcttcttcttcttcttcttcgagcctttctcttcctaaaaccctaaatgtttctcactaaaaccctaattcgacgatctctctcaaccttcgcttcttctccttcagattcacttctcgccgataaagctttaacctttctcaaacgccatccataccaacttcatcatctctctgcaaatttcacaccagaagcagcttcaaatctcctcctcaaatctcaaaacgatcaagcactaatcctcaagttcctaaattgggcaaacccacatcaattcttcactctccgttgcaaatgcatcactcttcacatcctcaccaaattcaaactctacaaaacagctcaaatcctcgccgaagatgtcgcagccaaaaccctagacgacgaatacgcttctctcgtcttcaaatctctacaagagacttacgatttgtgttattcaacttcctctgttttcgatttagtagtgaaatcttactctcgtttgagtttgattgataaggctttaagcattgttcatttagctcaagctcatggctttatgcctggagttttgtcttacaatgcggtgttagatgctacgattagatctaagaggaacattagttttgctgagaatgtgttcaaagaaatgttggagagccaagtttctcctaatgtgtttacttacaatatcttgattagagggttttgctttgctgggaatatagatgttgctttaacgttattcgataaaatggagacgaaaggttgtttaccaaatgttgttacttacaacactttgattgatgggtattgtaagttgcgtaagattgatgatgggtttaagcttttgagatc

SEQ ID NO: 795 - DNA, 44499 bp, Arabidopsis thaliana
aatggcgttaaagggtttggagcctaatttgatttcgtataatgttgttatcaacgggttatgtagagaagggaggatgaaggaggtaagttttgttcttacggagatgaataggagagggtattcgcttgatgaagttacttataatactcttattaaaggttattgtaaagaaggtaattttcatcaagctcttgtgatgcatgctgagatgttgagacatgggttgacacctagtgttattacttatacttcgttgatacatagtatgtgtaaggctgggaatatgaacagggctatggagtttcttgatcagatgcgggttagagggctttgtccgaatgagcgtacttacacgacgttggttgatgggttttctcaaaaggggtatatgaatgaagcttatcgggttttgagagagatgaatgataacgggttttctccttcggttgtgacttataatgctttgattaatggtcattgtgttactgggaaaatggaagatgcgatagcagttctcgaagatatgaaggagaaaggtttgagtccggatgtagtgagttatagcacggtattatccggcttttgtagaagttatgatgttgatgaggcgcttagagtcaagagggaaatggttgaaaaaggtatcaaacctgatacaatcacctactcatctctgatccaagggttttgtgaacagagaaggactaaggaagcgtgtgatctttacgaagaaatgctgagagttggtcttccaccagatgagtttacttacacagccttgatcaatgcttattgtatggaaggcgatttggaaaaagctctacagttgcacaatgaaatggtcgagaaaggagtattgcctgatgttgtcacttacagcgtgctgatcaacgggcttaacaaacaatctcgaacaagagaggcaaaaagacttttgctcaagctgttctacgaagaatcagtccctagcgatgtcacatatcacacactcatagaaaactgcagtaacatcgagttcaaaagcgtagtatctcttattaaaggattctgtatgaaaggaatgatgactgaagctgatcaagttttcgaatccatgcttgggaaaaaccataaacccgatggaacagcatacaacattatgattcatggtcattgcagagccggagatatccgcaaagcgtatactctatacaaagagatggtaaaatccggattccttctccatactgtgacagtgattgctctggttaaagccttgcacaaggaagggaaagttaatgaattgaatagtgtgattgtgcatgtattaagaagctgtgaattgagcgaagcagagcaagccaaagtgcttgtggagatcaatcatagagaagggaatatggatgtggttcttgatgtgcttgctgaaatggccaaagatggatttcttcccaacggcataagttaatctagtgagtaaaatcatttacatgggcaatggatcaaccatgcaccagcaacaatgatgctaatcgtgggagatttttcagaataccgcggtttcgtagctgctattcaccgtttgaagttgaaatggtacaatgttatctttgcagtttgtgtaatatatataaggcaaacaacttaattattgtaagacattgtttataatccatcatcaaagaatgaagatagagaaaccattgcaaattgaactaagagaacatcttataggttttggcttgaaggatgatctgtctcgctccacctattggtgctaacaccgcgattaggactccaactattatcgagatctgtaaatcatcaaatatgttcaagagttaactttttaattagcattatgttataacatagtcgatatatatttgtttggaagaaaaggtaggctcatttacccaagatgcaatccaatgaaagctccaacgtttttgttgtttcatgaccaaccatataatgcatggcaactgccagaaaacaaaacaaaatattattttgttatattgaaactgttctatactaacataacattcatatatatactcatgcataaacttagttttaggtataaacttacgaagtaggacgttgaggagaaaacaagaccgccgaaaaaatggaatatatactgctataaatcccaccaacgctacaaaaacaacaacacatatatatacatgtaacatgttacataaagtaaccgtaatctaattaagaacttaactacgtacgtacgttttagtaaaatacatgttttggttacataccaacgtatgaagtacgtcccacaatacgaaggcatgtggaaggagtgaacttgagattcttcaccagacacgactctattccatcaaatacgggcattgcaaatacctgtttacatcattatactacttatctctaccagtcttgcgaagtttattattcaaagagaatagttggcgttcaagaaaaaactggatttaccataatattggaatgctagaaatcagcttattcaaactaaataagaggttgtaaacgtgaggtgccagacccttgttgagagtgggattataggccaaatgcatcgaaaaccatctctactgtgatctctaaacatttgaccggaaaatgttcaggagtgacgatacaagtttaaaaacaaactgttgatatatacaagggtaactcatatttgaatttgattagattgattaaattattaaaaagagacgtacctataatgccttttttttgccaaaactttagttataataatgttctgaatttgtttttccctttaaagacattgaaatagcagtcttcaagaaaaggaatatccgtgtcgcatatttaagataacttatcatcattgtaaaaacaactttaattagatatgtatccaaataattgccgacaaattagaagaaaacaaaaggaacacgaaggacttgctttcatacactaactggtgtcactagtcgtcgaagactaacgctgtcgtaagaaaatcagttccacgtgttccgtacgctggatccgccaactgtttagatttttatttttcacgttattatataaagtcaaactctaattagagaacatgaaaccaaacttattataagaaagaaaaaaaaaacagaaacaagaacggtggaagagacaaagatgtgtagttccgattctcttcagcttcacaatgtcttcgtctatggtagctttcaagatcccgacgtcatcaacgtcatgcttgatcgtactcctgagatagtctccgcaacactcccgggcttgtacgtacctttctctgtttcttcttcgattgagttatttttctgtatagacttaagatttaatggccggttttggttttgttcatcagtcaaaggtttaggcttaaaggacgtttgtatccatgtattgttccttctgagaaaggagaagttcatggcaaggtttgattcttagatgattctttggttttaatttgtgtatgaaatatgggattttagggttttgatttgggaaatttggtgaattggtttgtgtaggtactaatgggagtaacaagtgatgagcttgagaatttagatgcggttgagggaaatgaatatgagagagtgaccgtcgggattgttagggaggtaaaagtttaaaggttgatgattataaattttggaacatgttggatgattataaattctgattttgcacatgcaggacaattcggagaagatggcagtgaaaacatatatgtggatcaacaaggctgatcctgatatgtttggagaatggaatttcgaggtttgatgatttaaacaatgtatttttagcttttgtgaactcattatgactggaaaaatggtacattgtttcgattcgcttcttaggaatggaaacggttgcacaagaagaaattcatagagactttcaagaaaatcatggaatgtaagaagaaacctcagggacagggaaatgatgatattagccatgtcctacgcgaagatcaataggataagactccatcgtcttggatggacttgtgtttgagtatgttctatatataaccacctttgttaaattatcaacaacaaaaaaccttcgtttttaaaaatctaaaataaataaaacgtagagagtgttgtattgatgtaagatttttgtttttgtataaatttaaaatttatttaacaaaaaaacggttttacaataaatacatcgttactgaaacaagtataaactgaataaaagagctaacgacaacaagtgctaaaccaatatcgtagtccgccttcgtagataggtgaacttgaagtaactaaaataaactaaaatacttaaccgattccgcatattcttatcgaccattttggcaagagagagggctggaatggatgactcgccatgccttcttccatttctctctttctaaagagctgaaacacatatctgaaaacaaacatatgaatttgcgtcaaggccgaatttgtagatagatcaaaatatcatgtggattatattattatatatatgttatacttgcaagtatttagagatttttgcatcttacttagcttgtgtgtgtttggtctatttgaagtatttgcagaaattctatcccacaattttgtttgtccgcctctatccaaaactgatatgcgttcaattattctgataaaaatttagatacatacgcaattaatcatgagtatttaaatccttaaaggttccaccatctaaatgactaaaaccaattagtaatcaataccaattgggttagtgggttttgggaaaatttaaagttttgtactcaagttggtgtgtctaattatttattatttactttatgaattagcataattaagcaaagaacaaagaatattttggtcaaatatataaaaagattaacatccatctgaaaaatcttttacctatagtttttgcaacttgaatatttacctcaatagataaaaactagagttatttttttttttttttgtcggcaaaaaactagagttatttatcaaagccaagttagcaaaataatctactatgatgacaaaaatttgtaactaaagaacataattccacgtcgttcaccgtttcgtgttcctacgtgttattcttttttttggtcacgttataaaacctcaaaaagctctagaggatcagagaaaataacataaccaatcccaagaagaaaaaaaaaacagagtagagattgataaaaaaaaaatgagtagctccgattctcctcagcttcacaatatcttcgtctatggtagctttcaagagcctgacatcatccatgtcatgcttaatcgtattcctgagattgtctctgcaacacttcctggcttgtacgttacctctctctctcgatcttgatcttgatctcgaatgataattctctctgttttttagatctaaggtttaatgccgattttgggttgttttcagtaagagatttaggcttaaaggacgtttgtatccatgtattatcccctctgagaatggagaagttcatggaaaggtttgatttcttgagatcattctttgtgtgttgatcttgattcttgaataattttagattttgagaatttttttggtgaattgtttggtggtccaggtactaatgggattgactaatgatgaacttgagaatgtagattgggttgaaggaaacgaatatgaaagagtgtttgttgaagttgtaagaaaagtaagtttcaagatttattgattgcatcttcaaaaacactttttagtggtcttgatgaggttatgagaatatatatgcaggacaattctgagaagatgagagtggaaacatatccatggatcaacaagaatgatcctgatattggtggagaatgggatttcgaggttcgatgatttaaccatttttgttttgttttgttagctctttatgaatgatgaagtggtgcattggtttgattcgcgtgtttttgttaggaatggaaacgattacacatgaagacattcatagaggcgttcacggagatcatggaaaggaagaggaatccacaaggaaagggtagagatgatttcagcaatgtactcaaagaagaagatcccgcgaatgctccatcgtcttgaatggatttgtgtcgagtatgttctatatatcacctttgtgtctaaactccatattaaataaaaaaagctggagagtctagctaggttattgtggagactaatgacaagaatgtttttgtcatgttgtattgtaagatttgagttatatatcatgtggattgtattattgtgttatacaagagtctttaagagattttggcatcttacttgtggcgtctattgaattaagcgtgtatggattaagtgactgaaaagagaatttgtagtaccgaccatgggataagggttttgaaatatcctcaatggttaaagaagcatactataaacattggaaaggtatgtaacatcttttggttacacaagaaagataaggttcttgaagacttggtatgtaataagaagttaagaaccaagtaagaagtgaaggagagacgaaaatggagaaattcacagagtacttgcaaattttataccttttacataatttacaaatattacactctcccaaagagtaaagaaaaattaagtgagagaggacttaaaggcccaaatataaagcccattaggcctatatttaatataaccaatctggaccgttgaatatttattaagcccacataaatcgtgtccgttgattagaagagcccaagagaactctagggttttgtcttataagcttgatctcgcattaggtctttgcgcctcttgccatcttttgtcactcatcttcacaggaaacaatggtaagccctagctaagatctctctttactccatagtttcttcttgattttctcctcaggcttcagattttgggtttcgtttcatgtagaaatcttctgcatttcagtttgatagttatggtaacgagaatttcatgaacatatggttctattcagcttcgtagatgtttttcttcatgggttttggttacgacttgcttgagaatcgaaagtagcatatttgtgttttttgttcttgggatttagaataaagtttaagactttagatcactgatgcgtttaaagtttgagactttagctttttgttctgtggttgaggtcactggtgcgtttaaatgtatgatctttcgttcgttactttgaaaaaaatatggttagatctttagatttattcctttgtatatgttggtaggtgtttgtgaagtcctccaaatcgaatgcttacttcaagaggtaccaagtgaagttcaggagaaggagaggtattgatctgttgttactgtcaagctagacttcgctttttggtctgttatatagagtttatatgggattaggtgttgtgacctgaaagttgttgttcttataatctgtagatgggaagactgattacagggcaaggatccgtcttatcaatcaagacaagaacaagtacaacacccctaagtaccgttttgttgttcgatttaccaacaaagacattgtggcacagattgtatctgcaagcatagctggtgacattgttaaagcttcggcttacgcacatgagcttcctcagtatggactcactgttggtcttaccaactatgctgcaggtattgaatcagttctatacttttgttttcccaatatttgattctgtgtgtatggtttcttaaagacttaatgtttttgtcatgctagcttactgtactggccttcttttggctcgtcgtgttctgaaaatgctggaaatggatgatgagtacgagggaaacgtagaggtatgttgtgatcttttatttcatcttgaaaataaagaaacttgagagttttcatcttttgattaataactgaatcaaaattgatgaatcaggccactggagaggacttttctgtggaaccaactgattccagaagacctttccgtgctcttcttgatgttggacttatcaggactaccactggaaaccgtgtgtttggtgcactcaaggtattgtgttttaatgtggttgtctgtgttcttatctgttgtatagtgtgttcatgatttgaagatgatgctagcaatcctttaataccctgttggtttgcttcatgaaactatagggagctttggacggaggtcttgatatccctcacagtgacaagagatttgctggtttccacaaagagaacaagcaacttgatgctgaaatccacaggaactacatctacggtggccacgtctcaaactacatgaagctgttgggggaagatgagccggagaagttgcaaactcacttcagtgcttacattaagaaaggagttgaagctgagagcatcgaggagatgtacaagaaggttcacgcagctatccgagcagaacccaaccataagaaaaccgagaaatctgctcccaaggaacacaagaggtaaaaacaaataaacattactgcctttaatctttcttgttgtgattggtttgtctcactgggttcttgattgattgtgtgatattaaacaaaacaggtacaacttgaagaaactgacttacgaagagaggaagaacaagttgatcgagagagtgaaggcattaaacggagcaggtggtgatgatgatgatgaggatgatgaagagtaaatcaccaatcaagccttctttgtctcatgcctctagtagctttttacttatttattttcagactaaaacactcagtttttgttttcacattttagttgcgtttgaagattttgaattcgaggatatgttttgtttgaagaatttattatcatctcttattacaccatcgtcattttcaggaatttgcctgtcaatagttagattttatgcgtagtgtggttttagtgcttgtggaaaatggggattcttgaagtaatgaaagtgatcattagtgatgtcttctgatcgggtgcttgatacaaattctaacttgatgttacttaatagaaaagattatcttcgtaaagtacatgtatgtgctatcaccaaaaatgttcaacaactctagcttgattgctttgcttgttacttgctagttgctactgtattgcattgctcttttgagcttcctcaaagttgcctgtttaattcttatgcttctgtctgtagagtttgtagcatgtaaaggacttatctcagacgcttgtcacatgtaaagtttgattgtgccgcttgagcaattgagccatatgcgtcttatatctcgctgtcttcctccaaaaccatcggttcaattatggctgtgcatatatatatgatattctttatttgaagaatttattatcgcttatatcaacatatacacatgaagactcaataattaagtgatattttttgtcactatttacacagtaaaaatacacatgttactgtactatccttatcttacatcaaatcccaatactaaactttccaaaatggatctgcacattttaagtgttacaaactcatgtgtatcaatcataatcactctctgaaagttcaacaacgacttcacaataagcagagcatctccttaatctcaagagttccactgatgattagagcataaactcttattcattctctcacaacccaaacgcagcataaacttctttactagttacatttccgccctaactccgcttatctatcttttcacaaccaatacaactcacagtcacacaacactgcaactctcttagctttctcagccacatatcaacaagataaaacctaattctttctctcaagctgcacagaatcagctgcttcttacttcgcgtctcatatggtcggagtcccgtacaacacagccagaaacaacggaacaggggatgctctgtttctgagaaacaatgaaacaggggatgctctgtttttgagcaacaatgagtataactactttaacaacttgaccggagcgttgactcgcaaatctatatggacaagcaaatctttcctttttatagtagatcttcttattaattaagagagagtgaaagaaaaggaaaaaactaactatttcctttttatcaatccttaacggctaaattacacaaaatctatgcaaagatatcgaaatcaaatcttcacaagatttttgttttaccgattagaagagtgacaaaactaaaataaaaacgcatttttttctaaccctaaggaccaaattttctatttcacaaagttgtctcactcactttcatattcttcatcatcttcttagggtttcctaaacctaattcgtagtttcactctctcaatttcattcgtcttcgtgctttcaattactagaaacaaaaaaacagagagataatcaacaagaagatggccattcgatctttaccttcttcctctcgctgttcctcttcttcttcttcttcttcttattcactcgcttcaacgagtctaagcaatagacttgagaccatcttcaagaaagcttcagagctttgcactctctgtgatatcgaagcatgcgtcatctattacggaccagacggagaactcaagacatggcctccggagcgagagaaagtggaagacatcgctctcaggtatagtcaattaaacgaagccttgagaaggaagaaaagtgttactctttatgacttcctgaacaagaagaaggacaagacgaacttggagaagaaagcaaagataacggacaatgatgacttgaagacttgtctgaagaacgtgaatattttaaagtatccactcgctgatcattactctcccgaccaagtttctcaactgattcagtccttagaacctcatgtctctaaagtccgagaaaggattcgttttgttgagtcgcagaaacacaaggagacaaaaccggatcatcagagtttagcatcatcctctctgaatcatcagacccaatctttgaaccctagccagttttcgctgtttatgtataaccatggagacaatactctgtctcagatcccagtctctgcatcaaatttcaatcaggattatttctcagcgttacttgaacaatctgagttgaagagtcagataatgaagcaggatctttgtggttatgagcagaacatgtgcatgagtaaccatggagatgctacgctctctcaaatcccactctctgcatcaaatctcaatcaagatttctcagccttactacaagacgaatctggcttgatgcaacaggagctttgtggttatgatcagaacatgtttatgaacaacaacaactttcaacattcttttgtctcaaacacacaagatcactctgctcctgtggtacaagaatctgtgaacaacaactatgggttgatgccgcatgttccttgtggttatgatcagaacctgttcacgagtgatattaccaacaacaaccttcttatcaacaactcgatgtttctctgataacaaagctcatgtcaagagagtgtgaaactgttttttcatcttcaagaattttaatatgtttgttgtggatgttttattttgctaagtattgcataacgcataatgttttcttgtatcaagctatattttactatgtgaacgtccaatttatcaagtgaatatatattccaccgcatcaaaaagttatcaattatttggtatatagcttcgtgaaaatatcaaaccaaatcacttattttaagaaaagcacaaaaaggattaaggataatagaagaacagtgtcctaacttaaagcttcagagtccatattatcactccatatttagggacacatatttcaactttttacactccaccatagttaggtatgtgagcctaacaaagttctcaatccacaaaggaacttcctcgatccctgtttggtttagacagagacatgagatgttgcttgagatatctggaaaactcttcaactttgaacatccactaagatcaattcagatatttgaagttagcaccagtgggaagagactctacatttttccttttcatcaattctaaaagtcttcaccttttaccaaaacttctgaacactaaaaggacagaggagactctcaaagttttattgagctctcatatccttaaaccggaaagaaccacataatcttcactactaatagaatcaggagataaaggccaagaggagagtgaaggagtcatcacaagacaaacaataaatagcagtctgaatataatttaattgtgaagcttgcaaacattattagtgtccaaaaaacagcacttgttttcatgtttactgaaatagtaatgcttatgttgttccgtttaaagaacatgtgatgatcgcacagagaagagagaatcactgaaatagtgttgaaaaaagagaatgttacatacctatgatgagaaaagacaaagacaaagcgcactgtggaggaatcagaacttagcctgcattgtaaaccgcatgatcaagactagttaccggtacacagtgttcctgacttcttcaacgttgtccttatctgtcaacatttcacatttatgttcatgtacttgttaaaagaccctaataagctacctacttgatgttgctactatagagtgaagcaatttggtgtatacctcctgcatcaatcatgatacaatagtgacattggaaacctctatggaaagagaaagtgcatgtgctgctaaatactatccaactaaccataaacaagttggagataattcagcttattataacatataactggtgtttcactacggaacacatgtgcttagttctacttatacaactaacacacacagaatgcttatgcagcccacatagagctacttcttacctctctctctttctcactgtaaaataaaaatgaaggaattaaaaatatagaataaacatagttttaaactaatttggaaatacatttgtctaacattaaaataatttataccaataagtttatacttagttacttgctaaatcaaataaagtgatgattagtgattacatatgcctatgattacaaacaagtgtaactatgatttatgcttcgaacccaatcattttgagacgttagaaaggggtaatttggggtcttcaaacttccttcttgaatttgtctattttatactcaagtcctcggatgggctgttctgaaatcactatagttgcatgtgtgcaataacccggcccataaaaattaatgccaattgtattattccattagcccattaagtcatcaatcattaccactaaatctgctataagattagcttctctacctctaaagtctaaccaaaaagaaagtcgaagatatcttcatcgtttgcatgtaatctcctttacatgaccatgaagtccttctacccattatgttttgggattgcattaattaagaacagaatagcactctccccaaaagaattctttggagccgcaattatttaagcaaaacattgtccgtggatgattctttacgaacgggccgtgatagttgtgccaaggaacatctctgtgggagaattcaaagctagtaggattcaagctcaaatggacttattaagctaggtagaaataatagaaagattgaaatgaaatcgcttataaaaactttattatgatgcaattaatagaaaagaaaaaagactttaacttgtcaacaagaatacaatgattcaaaattgatatttttataaggggtttgtgcaaaaaaaaatcataattaagtcgctaattttttcaactttaccattaatctctacaaaatacataataatcctataaaatacaaaataagacgcaatatagccctatacatatattgtaaatgtttctatgatcacatacatttgctttttaaaattgtgaaagtagagttggactcctcgtctcgaagattttaatttgatatattatttatcaaaattttaaaaatttaactataacaaaaaaatgaagctatattgcatattatttttgatttcatacaattattttgcatttttttagagatagatgataaatttgtaaaaattgacgtctttgaaagttatttttgcacaaaattccttttataaagaaaaagaaaaaaatttgttttgagacaactcttaagattaccttacaatacattgatatttaaaaacaaatttatatgaatctctagtagctatcaccctagttacattggctaatggatttctcataatagttttggatcctctaataatctctagttttggatcctctaataatctctagtatatgaaggacggaatttcgatcattgctctcaacttgttcatcaaaatctagcaaaattgacattttccgtcgaatatcacccatataaacttaaccatagtggaaacctaaaaattcacccccaacttttacaagaaagtgatctttctcattccttcatttgaaaggtttgaccttaacgtttttgttgtagtcgaaggagtatctttcacaacattgctgatcttagaacaaatgtaacccattattaccataagacttattttttctttttcagttttgacttgtgcctttatgtttaagacactagtagccacatttattacgctttttcaccgcaaaatttaacacgcactctctttgtcgatcccacaaactccatctacctaaccatggttaaaaatcatcaaaccttggttcccttgattaaaatatccctaaatccaagtctctttattatttcatttaaaatcataaatttagtttaatacaattgtcctttttcaaaatattatttctttatttgcttcagcaacagtcgtcatagtcatcatatcattttcttcttttcctcctctaaacgaatattaccaataaaaaatcaagtggaaaatatgtaatattaaaaaatctccaacagcttaagaagttagaacctttttacttatctttatttcttcttcttcttcatttttctattcacattctctgaaactcataccatattttcaaagctcttaacccaaaaaccctaagtcttttttttcttcaaattattggttatattaatgttttaagctatgatggatatgactcctacaataacaacaacaacaacaccaactcctaaatcacccgaacccgaatccgaaactccgacccggatccaaccggcgaaacccatttcctttagcaacggcatcatcaaacgccaccaccaccaccaccatcctctcctctttacttacaaagaatgtctcaaaaaccacgcggcggctttaggtggtcacgctctcgacggttgcggcgaattcatgccgtctccgtcgtcaatctcctccgatccaacttctctcaaatgtgctgcttgtggctgccaccgtaatttccaccgccgtgatccagataacaacaacgactcttcccaaatccctcctcctccttccaccgccgtagagtatcaacctcaccaccgtcatcatccaccaccaccaccacctcctccaccaccacgtagtcctaactcagcttctcctccaccaatctcttcctcttacatgctcttatctctctccggtactaataacaacaacaacaacttagcttctttctccgatcttaacttctccgccggaaacaaccaccaccaccaccaccaacatactcttcacggatctcgtaaaagattccgaacaaaattcagccagtttcagaaagagaagatgcatgaattcgccgaacgtgttggttggaagatgcaaaaacgtgacgaagacgatgttcgtgatttttgccggcagatcggagttgataaaagtgttctcaaagtttggatgcataacaacaaaaacacctttaaccgccgtgatatcgccggaaacgagatccggcaaatcgataacggcggaggaaaccacactccgattctcgccggcgagattaataaccataacaatggacaccacggtgtcggaggaggaggagagcttcaccagagtgttagtagcggcggtggtggcggaggatttgatagtgatagcggcggagctaacggtggtaacgttaacggatcatcgtcgtcgtgaagttaaagatgagagtgtcaggttaataagaagcttagagtaagcttattcgtattatcatcgttaataactttctattaaatattaattaagatctttagctttgtttgtttttgcattattattagttttgatttaatgttctttaccacgtcggtgtctcgctcgatgaggaataataccataacaatgttcgaattatatcatttgttgtaaacatttctattaatgaaccctgaaatgtgactaagtactccaataaatggtacacttttgatgtggtaatcttgtttcggatgaagaaacaaaaagattaataaacgagtgaaacatgattagttactataaatattcatttggtttcttatcttttaaagtactcttcttaattttatttgcaaccaaactagatgtagtaggtgtactttttttctttcttagatcctcttaattttattttatttttttattctatatcaaatgattagccatcattagtatattagtagcattgttgttaacacccagtgttttcacgtccgacccggaccgtccggtccgaccggttgaaccgtgacccgaacacttttccggtttgggtttagtattaaaatccaacaagttcaaaaccgaaaaaacccacaaaaactcatcattaacccgtgacccgatgaaccagttgaactggccggatgtgggttttaaaaaattctcttgattttggaataaaatatgagattttagactttattcaatcaatttttagatatttttcagttcttaaacccatttgatgtttaagattttgatgaagacttcacaatgccgccttaaaaaatgaatcgaatggtgagtgagatatccgatattagttgtgtgaattcacgatgttttattagtttatttccatcattgctgattttttactatatttgttacggtattagacatttagttggatttaaaaaatttcatcactttattattattgtttgattatatatttatatttttttttgatgtaaatgattatttttgttttaaaatttataagaactctaaaaactctaaaatctctattaatattaaatttattaaataaattttaatcaattgacccgtagtctaatctaattaacccgatgatccaatgatccaaaaggtagtccgattcactgggttggttttaaaaatattgttaacaccatttcctctttaatctatgtcattgtcatggattcattccgataacccatttttggtatatatgcttagttttgattattctcatttgagaagtacaaaccagcatatacctttttatacttagagattgaattagtacaattcatactaaagtttgatataactattattatatcacatcgtagcatccataaaatctatacaacttctaaataagggtttaaggcgtggcactaacacaaatgattgagttgatgaataatttaacaataactttccatttggggaaacgtagggatgagtactgatatgtcggctctcacaataaagaatgagattaggatattatgggtatctcccatacgggtttgttacaattatttaagcaattcattactactatttctttatttaatttatataacgcatttagtcaagtcacaaatatctttccgtattatcttggtggggacaaaacttttgcacaagctgaggttatggccctaactgccatataccatgtgcaccacttgttaattaatagtattatttatttttgtatcaatttagccatcaattcacattatcgcaaataaaacaaaattagccatagtataatttcaactttttttctttctaatttataagaaaaatacatatatttagaaccgaaaataaaaaatatgagactaaacaagaaattaaatagagaattatatgtaacctcaaagttagaatgtattatgtataatataatgagtctatcggtaattccagtattttgtaggtacaaaattgatcggtaatttcttaatttttttggttcaaaataaatccgcaatttttaggaggtaatttatattttctagctttaaaatataaagacaataagtctatcaccttttcagtcgaaaatagattagacatatatactttactatcttcccaaaaaaaaaaaaaaaaagagtacataactatagtcagttgttttattgaaataagaagtaatattttattgagttacattgtgaactgcaagaaaacaaataataaatgaatcataagtatataattataatttgcccccaaaaagagtacataactatagtcagttgttttttcagctgaaatttggtacagtgacaaaaataatttcacccaatcttagtgaagccatagaaaaaaaggttttaccataagtttttaaatttttcaaagaaagtacagttccttgtatatgatggatcatatgtagacttgaaagaaatggcccgccatgttttgacataaatgtctatatttcaaatttaaatgtgatggtaaccactgtgattatataatgttccaatttcatttacaattaggtatggataagtttttattattattattgaaaagcagagcaactaacatatattatcatgtatatagtaaggttgggatttacctttcttgagcacctaacttcgttaattttctcggtctttcttgtcttgagattccttgccaaatttagttgacaatagccaacactgaacaataatgagatccttaaatattttattaataaagtatgacaccaactaaagagagtgacaataaagatttattttgagagattacttaaaaagaagtgaaattctctaacaccttttaacaaaaaaaaagaagaaggtcttaattcaataaaattgtacccaactaaaacattttatcgccattttcttttcactgtttcttctggttaaattcttttacagtgtttcggatgcaatcttaattccatttttatttaatttaatttacaatcttaattcttatcactgtttaaagacttggtaagttgatttgtttgaataatttaattggataaatagatcatattagatattagtagattggtccacactatatgtgtctataaaaatagggttcaagactataactagagtttgaaatgcatagtcctaggcattgtcccgaaaaatattcatggatagaacaggtcgaataacctacatcaacgagaaacaatgtctacttatctacagataccataaataaattaaccagaatatatataatactatagaactggttgtgctaaagaaaaaaccagagaaagaaagaatttaaacactaatttgtagatgaatagattggtaatgaagttactgtaatagttaaattcgagttcaaaatagtatgaaggatagagacacgagtaatataacaatagtccagtttctgattgaagttcagcacaaaacataggttatgtctttggatttaaatatttctaaatttaatattgatatttccccaacagccccagtttccttgttaggtccattaaatagtgttggtacacatcaatagtaagtgcttccctacgtttgaaaattgattttgattttggaagaattaaaaaatattaaggtaattttatagatgtcccattttgaatataattaaggtaattaatgttaagtagcacgaattatttaattagtttgaaagatttatgagaattggtaatatcatatatttatatgtaaatttatctttgataaaaaaaaccaaattaaaatattgagattccagggtttctaacaaattctataagaaagcatgtcgtttgcgaggaaataaccattctttctcatatacatcactatttgtttttattgtggcatcaaaattacgacgatgtaaaacctaacaagtttacgtggtatgtgcgacacatttttattttatcggtaattctacgctaatgcaacaccatttagtaacgataactattcctcgtaaagtttctacacaaatgacgtgctttcttgtattaaaaactaattggtaataaatgaattggtatatattattattgttgagaattatttcttgatatctcacatattctttttgtttgcaatttaatcacaggagcacacaaaacctaaaagataaatgcacaagaattacaagttccctttaatttcaaaccacaagtcagaggtacatcttaatgagaattactctttcacaaataaaatccactagcatattattcgaatacattgtaaccaaaaaaatataaaaaaattattcgattacacaagaaaatatgtcgaatgatcccaaacaataaaaccaagatgtactcactcactctatgtaacatttgataatattgggctctaatgccaaataaaaaaattacgaactttaaatcatttagtaggaattcttgtatcttttttttctttgggacaaatagaaattcttgtatcgtagtgttgaattttctccacttttgatttgaaatattctagcaatatgcattccacatgactttatacattctgaattaaaatatatatatatatatcataaactgatctatagattctcaatattggtttagaaagttttattttcttcggaatttagttatacatgacgttggatggcataaattggaagatatatatatatatgcttatttaaagaaagctgagatttggagaatcaaagctcaaatttcgtgaatcttttgcccactccctttgcataaaaacacatttttgtgtgagagaaatataaaagaaacaaaaataaaagtaacaagtgaacgctatcttgataacatccttagttgaatatcaactagaggaccacagaatcataaaatgatctaaaccactttacataacatttgtcgattttaaaccacagttttagcaaatttgtaattttgggactatgctattaaaactcaaaaataaaaataaaagagaaaaactatacaacatctaagaagaaaaccagttttttggaaccaaaaacgaatcagtttttgggatacaattttttaatcagtttgaattaagtaatcggaaaaagtgataaacttgagtttgattttgatttgttattatttaattttcagtatccaagaaaattggtgcctaccataatatattaaaatgaatacggaagttgacttcttttcttattttaataaattgattaaaatcactactaataaattttaccaataatttaaagtttgcataatgagcatagtttattggtcaggttatatgtagtcaagttttttaatattcatatatggatgtataaacagtaaaagtgaaaaatgtaaaaaggatatacggcagaagctctataaattaataatattgagatcatgaaaatttattaatttataataatattaatttattttataaattaattaattaatttataaaaatatttatgcaaaaatatttagtactatatttacgcaaaaatataatactatattttttctaattttttttaatatttaaatttttttatgttttatcggaatatattggatgttaatagcttattcgactatccgagtgaaaaagaagcatgctcaaaagttcagagttaagaaaaaattgtgacttttgtctgtatttttggtgaagaagttgaagaagaaaacgtggaacctttagaagtagtgatacgtaagaaagcaattactgcgtctaaaattcttcataactttttgatgtagatcgagaagacaataccaagagtttttgatgtaataaggaaaactagagatgaagttcaacgagattcaaactttaagaaaagacaaacaacattagattcatattatactagattatcttagaacgtatgcttaagatttatgattattaatttatgatattattgagataatatttttataggaatatcaaaaaaatattatcttattattttattaattttggttagtttttatattgacccgacttagaaccgataaaattttttaatttattctgtttattaatttatggaatattaatttataaagtttttacttgtggtaggtaaatcccaaacgaatatgtttattagttgttatttaatatcaaaaagaatttaggaataaagattagttcactttcctatgtggtccatttgttctcgagccatttataccttatttttgttatcttctcacgtatttctttaaaaattgtttgttgatctttaatcagccacacacacaaaaattaaacactttttggattacactttaaaatttcgcattcatcgcccattcacaaaattaaatacaaagggaacttacgtgtcttaattacattcttttgcgcgtgaagaacttatttagttttcttttatttcacaaaattgtaatcacctctgcataatccatctcaaacatctaattgtaaatttgtaatcactaatgcataatcttgaatatattcgtcataagaacatttccatttatgttatctacttgtaaacatattcagcctaatcctaggttttagaggagcctaagcttcagttacaagcacaagtggttctactaaccattgtccaaaatataatagagcacgtcgcttatatatgcatgcacttgagcagtttcagatttctctagacaacaaaaagatcaaagggacaaacaatagagtacaagtcattcaacacaactaacttgtatatattcttactagctgatgcacatattacattgttgctttgattcctcagcatttcttcttgcgccgagacattatccttcaaaaccatagatagattgttgtagttcaagactagaagtcatcagtgttttaaagcagtacaagtgtaaaaggcttactagtttagaatacgcagaagcaagagaccgaagtgttttgtacttatcaagaacagctatggcaaagaaagttgcagagagaaatccgaatgacggtttagcaagactcagtacctgcataagctgaatggcaaatacatcgctgattgtcattttaccaaggtctggacacctttggacaaaatcatcgtaagaaggacacgagtccgcaactttcctctggtcatcattcaccagcgacttgtagtattggtatatcgatttagtgagataaccgtattttcttagcgtctcacccagtccgtttgttctcaccacatcaaacccttccaatatctccgtagtgaaacaactaaagcatatagatgaaaacaaatttggttaccaaacctcaaagaagaagtgcataaccaatcaaaatcttctgttaaaagataaatcttacgccgttttaatgctttctgcagtcttagactggtttggatccccttcaagaatgtatatcagctttttgattcccgatctctatttaaaattacaaatcaagaagacagtgagaaacaaccatcaacgaaagatcgaaaacttaggagttgagagtacactacacacacctgaagtctaagtttttggtccttgtagcgattatccataattgacgagcgcatatcatcaacgttcttcctctcaacaataaagtcgagaacatattcatcttgttggtacttatgcctagcaagccagatacaatccccaactggtaatcgtctaacctacagattcaacaaacactctctccagttagtttttgtaagttggaatctgttgacattctatccaagaaagcaaatgcaaacctcaatcttgatctagaacacagagcttatgttatcaactatggatcgtgatctgtgaataagaaggtatgtgtaagtattaagaacactcaaaattgaagaaaaaagtgagtattgttccacaaaccccttagtggcaaactgttctcgatcatccagtatcaagatcacatcatatacttcctcaaacgcttctccgaatctaagaggtggaaggcgtggaatagttgttactccttcggttccatcagatgccaactttgtaaccataaagaacaactaaagctgattagcttttcagttacttctgataatatacatataaaaaaataatctactgaactcaaatggttacatacagaagatgagcaggctttcaaggcatggcttatactagaagaacatggacttgaagaacggaacttcttagcacgagatccctcaagatcaacttgacctgtatctgtagctaagacttcatcagatgaaacatacaacatttaacagacacatcatcaaagatattagatcacacatgcttgctaaagatcgtacattcttgtgctctagaagaaggtcctgctgggatggatgattgtcccctggatcttggatccacttcatcatcagataagatgtcaactgaattagattatttagatcacacgatacagtcatctgctacattccggccttcaactgtcagcatgtacctaaggaaaagaaaaaaatcttatcacatgtctcaactctcaagataaggtctatatctctacacatgatacataagacaaggtgtttttactttgctgggttgctaaatttcaccaccaatcccttctctataagtttcgacatgcagctccatccgctataccactccctcttagaggttccaagtcctgcttttccttttcctttctctggcctatcaacaagaatagaggaacaaaacatacatcagtgattggtaacaaaaaccaacaaaagttagatattggaactctgatttgaatcatacgcaatagaaacatgtgagagcccactagcgtcagcagcgtccataagcttttgtttacgcatcaattttttcccatttgcagtctctttagtaatatacaaacaaacaaacatatataatggtcctgaagaaagaaagaatacattgcgaggaaagtaaacatgtaactaaacctgtgcaatgttagtaacgcataagccgcagtatttctttgcggcttgtacggttctgatcccttggcctttttccctgaacagaatagaatcaccttacatattgatatatgatatatcaagtgaacaatgtgagataataaagatatagcagtcaccattaccagcacgatttccaggtaaagcttcttgctcggaacttgcagcaccagtaacaaaatatccttgcatgagcttaaccatatacttgccaaatcccctatgcaacaaatccagccaaaattaagaaccaaacccttggccggatagaagcaaagccaccccaaaactaaaaccactcaatcaaaaaacaaagactttcacttgaaacaatgaaacattttgatcttctctgatttcacaacgataagaaacaaacagattctccaatttttgaacagtctcaatcttcttgacttcaacgtgagacaaagcaaacacaaaaccattgctaaaacatattttaacaagaaccaccaatgtacgtttatcttagtcactgaatcattacccaattcaatcaatactgaagacttttgaaccaaaaaacacaaaaaggtcaaatcttttccttaaaaattgaacaaaggtcacgtctttaacccatacctaagcaagaacagtagaaaacctagaaaaatccaaaaaagaaagcaagaaacatacttgatcttcgacaagtctttgagggtatcaattgaatccttggcgtcgcagacatttctgtaggctttaacaaatttcatctcctgatattcggacaaacccttgggcttatgatcgcgtttgttggacatgggcctagccccttatatcttaagaggcccaaaacagatatgcacaagtttaaaaaaggcttcaactactaaaaaggcccgttaagtttggaagggcaaaaatataatttacagaggagacataagggattttagggtttagattctctataaatactcaagcattattgggaaggggagaaatccagaggtgattagctgagagacaaaaagaatcgttgccttgcccagaatcgttaccttgcccgaaatcgttgccttgtccagaattgttgccttgcctgaaatcgttacctaacccgacatcgccgcctagcccgaaatcatcgcctcgcccatttctgcactttgtctttctgcttttacgattaagtctcggttcgggggatagtctataacctccactcaacctagcagccatccgtgccgagcaggatccctcgcgccgcatcttgttcacaccagtcacaggaggcgaaacggatcatgttcaggtcgcacgacctcccgcagcgcctaccgccctcgcagcaacagcagcagacgaagcaattgctacaacaaaaacagctaaaggtaccgcacaaagatgtaccacatcagcagatcgaggcacccacttagacgacctcgttcaaaccatccttgatcggctcgacggacaggaagcacgaacgatcgaacggattgacgctcttgtggcagcacaagtcacttcccaaagtcagatcgagcgacttcgacgccgaaaacgcacctcccaacctcatgaagatcaagatggacaacaatctccacgaactccagtcccagaacactcggagaccagacgccgcggaccagcgtctcttatcgtaggattcattgacgagcattctcgcggtagcccacaagatgaccgcaacctgcagagcggccataacttaaagggagtcacaacatgcagaatggccatgacttgcaaggcggccacaacttgcagagcggccacaacctgcagaatggtcatgacttgcagagcggccacaactgcaaagaggccacaacctgcagaacggccacaacctgaagaacggccacaacctgcagaacggccacaacctgcagaggggccacaacttgcagaacgaccacaacttgcaaagcgcccacaacttgcagagcggccacaacctgcaaaacggccacaacttgctcagcgccaactatttgtcgagcggtcacaatctgccgaacatccggaacctgccaaacagcaactatcagccaaacattcataatctgccgaacgatcactatctatcgagaagtcaaaatctgacaaggagccataatcttctaaataaccgaactccagagaacaaacaaatcttctccgacctacctgtcgacgatgaaaaccaaccccgcgatcacgagcttgcacgattgaacgcggtaataagagagatgtcctccaaaatgcatcgtgccacaactacagcacccgaactggaaaaggtgttggatgaaacaaaacgctcacccttcacagcgcgcctctcggcagtccacgttcgtcatgttaacaaagtcaagttaataccgtacaatggtcttaccgacccgaaaatcttccttaagtcaatgtacattgctatcaacggtgcacatttctctactgaagaagcgatgctgggagctgccaaatgttcgtggaaaatttgaccgcaagcgcgcttaattggttctcacggatcaaagctaattcgatcgatagctatcgagagcttacgtctgtattcctgcaacaccactcgtttttcatgatcaaggaagctacaaacgctgacttatggaccatgtttcagagagataacgaaccgcttagaacgtttatcgagagattcaagaaggtcgtctcaaacatagctattaaagacgacgcggctatcggagaccttcgaaatgcgttaatgttcgtttcacggtttcgagaagatcttatcatcgctcgaccatcaacttttgacgatgctttgcaccgagccaaccgtttatatcgagattgaagaagagaaggccgagatggatcgacagctgaaagcatctaacgcaaagaaacgaaactactactaagcgttgccgcaaaaaaaaaaaaaaaaaaaaaaaaaaacacgctaggtctacctagctttgcctttgtaaaataaattatggatgacttgattattttctaaaggtacgtgagcagtccttcacaagacacaaccgtctcaaacaaaaaaaaaaatttcaagaaacacaagtgagcactcgctagagcacactatcgttgatgaactctttcggccgagtccgcctcgccgatcgcctagctcccgcatcgtcgccatggccaggtgacgattttaaacgcgtttcgcacggatgcagtggtgaaataatccacaactttacttttgtaaaggttacaagccgagcccaatctcgcacaccagctcgcaggcaacagaacaaataagccgaggtctggcttgcatattcttgtcgatctcgaagcacccacagggtaagccggacacgagagccgcacctaaaaagtacgtcgagtctgtctcgactacacctataactttacttttgtaaagattaaaagccgagtccaatctctcacaatagctagaaggcggcagaaaaaataagccgagctctaactagcatattcttgttgaccgcaatgcacccatagggtaagccggagaccagagccacacctaaaaagtatagcgagtccgcctcgactagatatccctaagcttggcgtttcgaaacaaacatataggataagccaagagacgtcttgccccgcaaaatatgtatcgaagccgagttgcgtatcacacatgttttatgataaacacaaccaagccacgcctcgcacataaaaacaaataatattaatcagtaagcgacgtaagagcaaacctcgtcaaacctagaccaactagaaactaacacaatccaacttaccacacgacattttgacgtcttcaacgtgaaacgcccatacttcttcatcgggtagagccgagtctctctttcgccatgccgcactgagactctatcgtcgcgtcggcctttcccaaacttttttgccgtgtgaccttgaaactctctttcgcatgcaccgttcaatacaacggcacacacatggcattggatggtgacatacgcatggcacggtaacaaaaccggccctgcaacaactctaattcgtcatgacaccaaattgatgaatctatgaatatgccgcctcgaatcggagaatccacctcgccacggttgtgacacattgatgttatcacaaattaacaaggctctcgccgtcgaacaaattcgacgtctccagcatggaaagtccttctcaaactcgcggcacgaaagcatgcaacaaatccaactcctactacagcataataatctccggctcggcaccacgacaccatcattggctcgacagcctgacgataattttgccactcatcacgatcgacaactcaaatcaggaaaaagccacaacatctcatgacgcgacagctctgtctcaccttgggtctcggaacgagcggatcaacacttagcgtaacttgtggcttggcacgtaaagcacgacccacgcctcgccacggtaacgccactttggcgaaatattgccatccaaaataacaagtctctcgccgtcaaccaactcgaaaagatcattggccctgcacagtggggcacggtagacaacctggatcggaacggcgccaccaatctcaagacaacgacttgacacgacaatgcacgcacgtcaagcctacctcggcacgatgacaaatcatcaaatcaaacggatcgcagctaactcgacctcgtagcacgacctctagatttttgcccggcaggtagccatcttgtgcctcaacacgaccaatctccaatttttagcgcacgcaaccttttccttggcacggcaaagagtagctcgtggacgttgcaacacttccgtcgcacaaccaacaaaaaaataaatataaagagataagggagaaagaagattttacctttggagaagaagcgaaaatgagtataaagtgaggagatagctgatacgtttaccaagaaaaatcatgttagcctaattcactaagttatatgcagccatctcgcctcgaaaaacgtattgaagtcattattctcttgtaaagttcccgcaaacctcgaaagatgtgtcaaagtcactattcacccaagaaagctccgtctcatctcgaaaaacatgcccacggcactattcatccgagaaagcctcagctcatctcaaaaaacattcccacggcactatttacctgagcaagctccggctcaccttgaaaaatgtgcccactgtactatttatccaaaaaagctccggctcgcctccaaaaacatgttcgaggcatcaattttaccagagtatcaatgcacatgcccatgcagccccgactaattcatccaagtcatcctctgttttacgcccgactaacatatcccgccgagctcaatcaaactctcgcacaacaaactaagggcgggcgtattgttggacatgggccttgccccttatatgttaagaggcccaaaacagatatgcacaagtttaaaaggggcttcaactactaaaaatgcccattaagcttggaagggcaaaaatgtaatttacagaggagacataagggattttaggatttagattctctataaatactcagaagcactattgggaaggagagaaatccagaggagattagctgagagacaaagagaatcgttgccttgcccagaatcgttgccttgtccgaaatcgttgccttgcccagaattgttgttttgtccgaaatcgttgcctaacacgacatcgccgcctagcccgaaatcgtcgcctcgcccatttctgcactttgtctttctgcttttacgattaagtctcggctcggaggatagtctataacccccgcgacgaaactaacttgttgtaatctctcgatctttgttatcgttaataaaaagaaccagctccgttcacctcccaaaatctcgtatattattattgttgcatccccagtacaaacaatgtttttcttgcttcttctgcaacacatagtctgctaaaccttggttttttggacacattacccttctctggtcaatcatcactacccacttcaaaaagtttcaatctatcaaattccttgatgcattgcttacattcgttacacaaaaaagcgagaaatttctcgtaaaggtttgatctttagtttgtcggagaagtttgataagtgcttttaggcgttttgttgagaattttcaaaaattggggatttgactaaaatgcgttgagtgacgtcatgacgtgactagtcaagagcctcggtctgaaacagtggcttaatccaattttcaaaattttcgatatgaaaagaatcttggtcttaattacaccgaaccggttttgaaatctcaatccaagttaaaccaaaatgaaatcaaaactgggccggtttttatttaatttcatcaagtcgaaccacacgggggaggcacttatcctaaaccaaaccggtttaggaaaagttaagattgttgactttgacttggttggtaaaccgagttgacttttggtttgaatcaaccatacccaacttatctcaacgtaagatgattctagatcagaatggccactgaaaagcttcctcatgcctggagaactcaccaaatttccagtcagtgccggagtcaacgccgttgactttcactgaccgtggtggttcccgggagtttaaggctaacctaagcctagaatcctattcttaacactctaagacataagaaaacatttctagagctcacattaaggtatataaaccggggtaacatcgttacagtcaaatcggaaatttcacggcggagagaggtggctcacggcaagatgttcttgattttattaaagatcaaatataaataaaatgaccacatcaaataccgaaaaaagtcaaaatgggtgattcatataaaaatatacttttgtggcattgggtgatttatataaaagactttcaattacgacaaaaattaaagtaaaaattgtgtgaataattttttttaaaaaagtgacttgtagtgatagatgggtatgtggcatccaataacagagtggagaaatccatggttcaaagcaaccataagattagctcaaagaacaacactttagatttgtctttttttttgttgacaattacatgttgctcacttgttcctttcccttaaatttctcatctgttagttctcacttcaatatcctattattattattattattattagtattattcattcatgcatcatcgtcatcatctttcgatttcacaaacgttttttcttttggtttttaggtaaaaagtctctttatctgcaaatttacactttcttctgcatgagtttttttcaacctagataataacagtttcattgaaaaaataacatcttcaccgacttaacaacgactcgtcagcaaaaactaatccatttatatgtcatctcttaagaaatttctcgtcaattccattttttacttttcagaatttgatctcacatcatcatgctggttttgctctctctttcttcatctccaggtactttattttaatttccatttctgtgatatttttttatatactatatatcattttagacgcgttaataaaaaatacgcgtaattaaaaggaaactttttaacttttctttaaatataaacacagtgttcgaagaggtacaattgttgaaaccgacacaacaaagactcgatttttatctgtactcgaagaatcagtagaagcgaagatgattgaattagaaaattctggaatcgaagatgaagaagaagttagtgaatcgccgaaattggtttttaaattcgcgtttcagacggaaactttcgagagattaagcagagaaggttatagatcgttgagtgatgattgcggtgtggagagcgagagcagttttttgtcttctgattcttctccggtgatttttacggcggcggcgaggaaatacgagacaccgtcggcgaaaaatctcacctttgtcctcgaaaacccaaaggcggcgacttttagggttgaagattgtttgaaggagaagcaagagaaaacagaggatttaggttactctgtttttcacggcgaggataaagtaaaaacagaggattactctgtttcatcctttaagaagaaaaaaatcagatttttaacagaggaagattttttggagtcggactctgattttgttgattcaagtcagacattcacaagcaacgacgaagatgggtttttatcagattcagatttcgcagaaacatcactgaagaaaggacaaaaccgtaaaagcgacaattctggttctggttctgattcagaggaagaagaagaagaagatacaaatgggtttgagagtttatgggagcatcaagatttgatagaacaacttaagatggagatgaagaaagttaaagcaattggtgggcttacgacaattcttgaagaagaagaagaagatgatgattgtcctaagatcatggaagatttaaaaccatggaggattgaagaagagaagaaatttaaacatgttgatacgattggtgaagttcataagttccatagaagttacagagaaagaatgcgaaagcttgatatcttgagttttcaaaagtcttatgctcttggttagttctctaaattcactctcttattttattttttacaaattaatttagttttggtccaaaaacttagttttaggtgttttttcaaccataccaattttttttaattttgcagtgttttataagttagaaagaaaaaaattagaggtcccacgaaatctactcattatagggtttttagaatttgttgatttctctaattggcgtttgattttgcgtattgaagtgaacattgcaccaaacctaaaagccaaccattatttaattgtctttattggtttcttactagttttgttgttcaaataaatgtttccttggatgatgtgtttacatttaatttatgaagaatatggaatagaattcctaggaataagtgacgaataaaatcatcatatgtcagaagaagttagaagttttttattttatttgactaaccatatttttggttagagactagaacggatttttggttacatgacatttttttttgtttaatttacttttcttagataagtaaaccacatgtggatgatattgtgataaatgctgcatcaactataaagtttaattgtggtaattgaaaatatagtttaaccaagtttttttgttttctctgtgttttttaagccaatgcacacatgcatatctttattggcctatctcaccaaatgtgtttagttatttggagttagctttcaatgttagcttttatgtttcttctttattgcattgctctcttatggaacccctttacctaatttttcccactctccactaacttagtttttgctagtgcgaacctatacctttcttatttccttgaatttattcccaaacatagaatttgtttaattaagtttatgtgcttagtttttttacattttttcttgagttgttacgatttaaactaacattgttttgtttttattattcttgaagggcttcttcaatcaaagagccctcaacaagcaacctcgacccttggatccaatccttcgcagacatcgttttcgtcggttttctcggttaatatccggttatggaaagcgaagaaatctgaaatcgaaccaatggttcaatttgtaaaagagattcaaggggaattagagaacgtatacgtaggtcaaatgtgtttgtcgtgggaaatacttcactggcaatacgaaaaggccattgagttactagaatctgatgtgtatggatctcgtcggtacaacgaagtcgccggagagtttcaacagtttcaggttttgcttcaaaggtttcttgaaaacgagccattcgaagagcctagagtacaacattacatcaagagacgttgtgttcttcgtaatctccttcagatcccggttattcgaggtaaaaaaccttaaaaccgaatcttaccaaatcatttgctaaccggttcttgaaacccgtctttgaaccggtttatagatgtttttttgttactgatgagaagaacatttgatggtgttaacagaagatggaaacaaggacaaaaagaatggcagaagaagagattacgaggaaaataatgacggtgtgattaaaagcgatcaactagtggaaataatggaggaaacaattcgattattttggcgatttgttcggtgtgataagcttactagctcgatacatgatcagaaatcgcgaaccaaatcacaaatagaaccggatcatgaagaagactcggaagacctagagatgttcgcagaggttaaatcacaacttcaaaatgtaagtgttttctttctcaaaatacaaagtttaaaactttatggttgtgcgactgatgtgattggttggttgcagaaggagaaaaggttgagagatgtgttgaaaagtgagagatgtattataagaagattccaaaagcacaaggaagaagattcgacagaagatcaagtacttcacttcttctcacaagtagacatgaaacttgtgacaagagtcttgaatatgtctaaattgactagggaccatttggtttggtgtcacaataagttgactaagattaacttcgtaaatagaaggttacatttagatccttccttttgtcttttcccttgttgagatttttgatattgacaaatttgtacattggagtaataatgaaaatacaaattttggcctcatattattgttaagtaagactcataaaaagtccatcaatttttggctattacacttgatgacttttattgattttcactagggttggatgtggtccacaactgaaccaaattggttaattccaaaatgttaatcaaaacccggttatctccctagttcatttaaatgtctcttgaccggaatatactgaatggaccagagtctactgataataaagtctctatagattcacacactcgttttccgggataacctgaaaccactagttctggtttagtacattatttctaaactcttcttcattcttctgtttccaatatctctttcttacaaaccaagaaatttctgatgtacatggaacctacctatcttctctctatggattcaaagctaatgccaaaacaacaatgaaacgaaatcaaaaccaagagaacttttgagagatgggaaaaattgattggattttgtgtgaacaaaagataagaaatccaaatgactcctgccacctattatactattccttgtatctaatactcagattctattgtctacaatctcatccacaccaatcttaaatgtttacgggtgtaatgcagaaagatgagtggctattccaccactaaaacattgttctccatcaatccttctcctgaagtaggaaactcgggtgagatctgccattctccatccactaagaacttcatctcgtacctaaatttcacaagagattgaaaacacgaataatttcaaacattaaaagttgatgttgaatgcaaaagaataagagtagaataaaatttaaatagtaccgcccgggacgaaggaataacgttgtggagaatttggtgaataaagctgagtactcaggcgatagatcctcacgttggctccatccatcgaacgatcccattacttgtacactcttatgtgaagataatcaacaaatgagattaattttgaggataatatattaagcttagaatgttaaaatgcataatgtgagattattacactacctctgccatgccaatccagaacacatgaacctcctttgactgtgcagcctcgacaccttttatttgttctttcatctttttttgaacagctttagtgggagaaaaaaataaaaaattagtatatcattccagggatttgatgagcgcctaaataatgatgaaaccaagaggggatgagaagaaccgtctaaacgagagagaaggtgcgattgaatgtactttccactgatttttctagaaccttgtgggataccaaggtttgctatttcttccgccagtttcaccagagcctatttcctccagaaagtgatatcatgaaacatttctactaaagaaactatacatatgtgcttgtgcatacaaaaatctgaagctaaatatttcccaatattataaccaacaaaaatatgtatttgattggcagtagacatgggataatgacaactaaaccaaatcagcttaaggcaatgagatagtgagaccgtgacattgaaaaatcaaaagtagaaataaagacctgaacttcgagctccataagtgcaagctcagttttgatgttagttatctcatgttcctgtgttttaaagctgcaaaaagagttcaagtagtcaacaaacaagtcaaataactcgttttgtcccttgatacgatgtctgtttacaaagaaaaaagatgatgtataatagcatcaagaatataagtattgaggattaaatctcaaacaagattcatcaaacacacagatgaagaacagtggaaagtgtatttaagtatgcaaatgattcatcatcatcttccaatttgatacaatgccggtttacagaaaaagaagagaagtgaaggaaaatgtttctgtgacatcacagacatgtaactcccttaaaccttggaggtttttcagtatttttccaagagtgtgataatataaaatctgatagacactaaatttcttaaatagaataggatataaggttgcaggtttctcaaatcatctaagagaatggacagatagaggtactaaagtaagtgtataaatataacacaagcacctgacgcttgaggaaccgattctgttgattagcttcactcaattttttaacaagctttgatctctctgtatcaatgagcagtgacttcaactacagaaccaaatggagagtttgttagttggtacagaacatagtttctttatcatctgagaacacatacgcttagataaacaggagaagaagataaagcttaacctcatcactagtgagaggtcgagaaagagattcatctagtaaatcttctgacagtgatgattcctcagtgccaacaccaactaaaaatctcttcaaaagcaaactgttcttgtaatgttttcgagtagaagctaccaaaggataaggaagtttctggaaatgggagattgtgttcaatctacacaaattccatgctcttaagttccatgaaagagtaaggctttggctgttgaagaagaagaatcacttcaactaatagaaacttaaaatactataatgatgaatcataacaagtttggtttcacatcagcaaaaatgtgaattagaataagaaaaagatatgaaattttgtaccttgaacaaccaaattcaattctgggtacacatcctgcatcagaaagactcacaaaattaaaaacttcaacttgtatcatcaaaattcagtaatgtctcacataaatcaaaatgctacttatcttacatatatacctaaattaaacattagggttcttttatagaacttgaattcaacagaaatgtgaaccaaaaaaaattaaaaaaaggaatgatttttcgacttacccatgattggattagactcttttcgtcttgctcaacacaaaaaaaaattgattaaaaatgtctaatttggttaaaaactctcaaaaatatcgagaaagctgtgaagaagaagaagaagctggaaacactgataaaccccagaaccaaaaataaaaaatctaatttgtttttcttatcaatggctacaaaacacgtgcgtaaatctaagaactaattttcaaatatggtccctatagtttcaaagagtcacatttttcctgaaaacaaacaattttccaaattccaccaaaacaaacgacaccgtttactgtcttcaacctttaacctcacttaaacaaaccccctattttttggcctctctgagattttcacactcttctcttctcaagctccgtatttttttctcaatagttgatatagatccgttattccatcgattgagattgatagatttggtggagaatgacgacgataggaggattgttaatggggattggaagatcattcagaagaaagagatcttcttctcttgacattctctctcccaaaagagctccaagagacttttacaagggcaaaaactgcaaacctactggtttccacacgagaaaaggttccaactttcatcctaattttgagaatcagttcatttctatctaacacttgttatagtttagttgataattgcaatcttgtgttatttgttgtttgaactaattgttaggaatttacatggcttaagattgattctttgagtggaaagctaacaactttaactcaattgtggcaaaactactaacaaggaaaggttcactgaaactgcaactattggtttggttttcacttgtcatgctgcaatccatttctatctaacacttgtttagttagttggtgattgaatcttgttgttcttggttttgaattagatatatgtaacctaaggcagagcttttatcagtttagttttcatgccttacgatatcagattcttttggtgggaaagctaacaactttaactcaattgatgatcatcataatgtttttgataattgagtgtttttattagatatatgaaatctaaggcaaagctttagataccagattgttgtttaggaggaaagctaacaactttaactctattttggcaaagaactgatcatcggttgcatgtgttactagattcataattgccaaaattgagttaaagaagttagctttccactcaaataaatgtggtagcttaactcgaattgtacatgtgtagtatactgtttttgtatttgtttctagacttcattttggcaaaaaaaactgatcatcatattgtatatgtattttgcatttgttttcgagacttcattttatctttacctaagttttatgacatggtgtttttgcaggaggatatgttgtgcagccagataagttgccgaattacgtagtccctgatctcaccggctttaaggtttttcatttcaccctctaaactcttatgttccttttatctttgatacttctagtatgtaccttgcatcttaattgaaacttgagaaccaaacattagtgagaaatcttcttacaagtcttgttggtagaatctccttaggttcatcctgataattatcttggtttgttcttgttgtaaggtttttgagttagggacctgaaatgggaatgcttacttaattacattaacctttgttgtgtgatttagctgctctgctgatgtatatctatttggattttacagctgaaaccatatgtatctcaatgcccgatacaagtcaacacaaacgagtcaactgaagcttccaagtgaaaaatagtcagtcagaagatatatatgtttttaagtcttcttcataaagctttaagttatgattatgttcttctattgtccgtaatccttatgtgctattcttaaaatgggagatttggtttgatattttcacgaaacgatatgcaaagtaattggtaacatgtttatgcagtggaatatatattcacttgataaattggatgttcacatagtaaaatagcttgatacaagaaaacattatgcgttatgcaatacttagcaaaataaacatcaacaacatattaaaattcttacgagaagatgaaaaaacagtctcacactctcttgaatgagctttgttatcagagaaacatcgagttgtcgataagaaggttgttgttggtaatatcactcgtaaacaggttctgatcataaccacaaggaacatgcggcatcaacccatagttgttgttcacagattcttgtaccgcaggagcagagtgatcttgtgtgtttgagacaaaagaatgttggaagttgttgttgttcataaacatgttctgatcataattacaaagctcctgttgcatcaagccagattcttcttgtagtaaggctgagaactcttgattgaaatttgatgcagagagtgggatttgagagagcgtagcatctccattgttactcatgcacatgttctgctcataaccacaaacctcctgcttcattatctgactcttcaactcagattgttcaagtaacgctgagaaataatcctgattgaaatttgatgcagagactgggatctgagacagaatattatctccatggttatacataaacagcgaaaactggctagggttcaaagattgggtctgattattcagagaggatgatgctaaactctgatgatccggttttgtctccttatgtttctgcgactcaacaaaacgaatcctttctcggactttagagacatgaggttctaaggactgaatcagttgagaaatttggtcaggagagtaatgatcagcaattggatactttaaaacattcacgttcttcagacaagtcttttcaagtcgttgtcctttatctttgctttcttctccaagttcgtcttgttcttcttcttgttcaggaagtcataaagagtaacgctcttcttgcgtctcaaggcttcgtttagttgactatacctgagagcaatgtcttccactttctctcgctccggaggccatgtcttgagttctccgtctggtccgtaatagatgacgcatgcttcgatatcacagagagtgcaaagctctgaagctttcctgaagatggtctcaagtctattgctcaaacttgttgaagcgagtgaataagaagaagacgaagaggaattggaacagcctgaggaagaaggtaaagatcgaatggccatcttcttgttgatttcgaagacaatctctctattttttgtttcacgttcaaagtgaagagaaagcacgaagacgaatgaaattgagagagtgaaactacgaattaggtttaggaaaccctaagaagatgatgaagaatatgaaagtcagagacaactttgtgaaatagcgatatacttatagaaaatttggtccttaaagttagattttttatttttttttcactcttctaatcggtaaaacaaagcttgtgaagatttgatttccatatcttttgcatagatttgtgtaatttagccgttaaggactgataaaaaggaaatagttttttttttctactctcactctcttttaattaataagatctataaaaaagaaagatttgcttgtccatatatatttcagataccctttgtatcattatgtaaatagctcttaattaataatataattattggatttgctaaaaatttgtgacaatacaatctaacaaaaatcgaccaaaatacatccattttaaataaaatttagaaccctccattaaaaaatgagaaatataatttataactccgtgtacctttttaatccattactttgccattattgacataaataaaagattttgcaaattcatattttctttacttattttcaaaaaaaaaaaagaaagcattgtatcctcttcataaagaatatgaaatatggctctgaaaaatccaaaaaaactagtgtcattcaagaatgagacttaatgattaatataaaaagccattacaattatctataccaaattaaggagaagttgcatgttcgaagcaagtctttgtttttttctttttcttttcggccttcaagaaaccaaaagagaagcaacgtttatagtaagacaagaaaaattaatacatattagcgatgatcaacgtctacactaattcaagtgttaatagtactatgatcttaattgttagtggaatacgacgtcgccgacatctcactccccgtagtctcctccatcaccattgatcttacattcggaacctcatgagtcaaccctccagtcaagttgttgaagtagttattctcattgttgctcagaaccagagcatcccctgttccattgtttctcagaaacagagcatcccctgttccgttgtttctggctgtattgtacgtgactccgagcatctgagacgcgaagtaagaagcagctgattctgtgaagcttgcgggttcgttgactggagaaggaataaagttttgtcttgttgatatgtggctgagaacgtctgatgaagctaagagagttgcggtgttgttgtgtgactgttgattgttgtcaggaatcgttggataaacccaagattgtgggattgatctttgtgaggatactgcatttgtcttcttaaatattctacatatcgcccaagcatcctacaaaatgaaaaagatcgattctaatttgtttggtaacctaacctttgttgcgggtaaagcaagttagggcaaatccgataacttacgtttgaaggaagctccttgctgttgttgttattgttaaggtgttgcttcttgttattgtaattgggatatgatgagtgatgagagtcagagagagaagggagacgaaattcatgcatcatccaatcggttttgactcctttagcagctcgaccacggtagaacacaagtgatttcttcaaaccgatgcatcgagtggagtccaatgagtatataggccggtctgttccggttgctttccagaagccacctccagttactcggttaggtcttgtgctgttgcggtatttcctgtctctaggacaataaaagtaccactctttttcccccatcgctgcaagctctttttaaacattgatttaagaaaatgcataatcaaatattttgtttccatatatttggagaattaaaagttagagttttgtggcttacttgggaggtcccatggatcgtatttgtaaatgtcgactttcttgatgagatcaaagggaagagatttgtgtaaaaccttccgtttcaagtagaaacttacgagttcttcatcagtgggatggaacctaaaccctggcaatacgacgtcgtcatatctttcaacgttgttactctcttcatcatccataactagaaccattaacacacacagaattagtacttttgggataccaaaatttgatgaagagaaacagagagatttatagagatagagagagtaagtttggggaagaaggaagaagtttcttagagaagaagaaatgggttcatagggaaacgataattggaccagaaagtgatgcgtaggtataagaccaatgtctcttgaataagaggagatttatacaagaaagatattatgaatcttgaattttgccgttaaaattattatttttcttatgagaagattcaaacttcaaggttattgcgtacttcgtgaaatcgaggctacggacgagtcgaacaatataggaaaagttatacttacattacgtatgtggtttatctttaggaaaatatgatatggaaacgtttttcttcctttgtttcgatatcttatagatgcattctaccaaaaaaaatctaactatatggttaatgacttaatgatgatacgactttgaccgactaatgtcaaacgtttttctagagtagaatctatatgggatc

SEQ ID NO: 796 - DNA, 6395 bp, Arabidopsis thaliana
caatctctatatctataagtctataagtaaaagtcttataaattaagattgatatttgaaagttgtggtgcttaagcaaagggtcgttgtagttttagttatagccgtaaataaagtaatgttcttttacgtaaattatgaaatctcaaattcgcgattccctaaaattaatttattccttccttcttccacatttatttatagtttcatacttttatatatattattgtaacatataagaaaagtaaaatccatggtaagtcaatataggcattggtaaaatcgaaggcattgcttaaggttgctatatatgtctccaagtttgagacatgtaaaaacataatgtatacgtagaatagaaatgaagatctcgtggtaaaaaaaaaaaaaaaaaacaagatgaaccaaaaaacaattcaagatgagagaagtccaaaaaatggcctaggttttttaacccacgcaacacaagttgggaagtttggtcaatagcctttaacctaagctttctatttctctttatatgtaaaacattaaagttgtcaacaaccatcctcttggaatatctattaatgctgtgaaaatccaagtttttgctttaatgctttgaacggtttgtgctttaaaaccgatacatcaaaccatctatctccgagactaaaccctagggagcatgtatcggacatgctcgtcgtcctcaaaggaagaggatgatggaggtacacttgcctctcggctggtacaacactcgctcgcaaggttcgattaatagctcctccaaagtggtctgctcaacctagaaaagagaattgaaggagacattttaatttagtgagataaaaaaagtaaattgtgaacctgaaataaagaagtggagatgtttcataaaccttgataacacttttgaaagagaccttgcacaagacaatcacattgtggtccacctaaacaaaaaaacaaagtatacatggtaagacaagagtccaacaatgaagaggaatttggaaaatcaagaagcaaacctacagttttctttttgtttcaaacttttaaaagcataattccttcatcttccactcaggcctcacatcgtttgattcactcttaggacctaaactgaatgacgtctttagcccaatgcatatttgctgttcttctcgattaacacttttggatcgcggcgtgacacccatttcccgatagaagtgctgttccctatgaatccaaactaaaatccgaatatctaggcctagatagcgatatgtttttctggtctgctcaacgcattttcatatttcaaactgctggtcaatgtttaatttatgtataaaataatcacatgtgaagttgatgtataaaactgtcacaatttgaaagttggagtattaaatgacatttttctcatttcgattatggtgaaacgacgttgtattggaaactaaaagagactagttaacggatgttatcggatctgttagcggtagataacgtcgtgtgtattttggcatgatcaacaaataattttgtatgaaatggtgcccgatcaacgtatttttatatattaaatggccatatacgaagttcacatatttaaaataattactttttaaaatttcgcgtataaaatgcaatatttcttaataaaaaaataaatatctgcttttttgggttttttcacaacaaaataacacatataaaataaataaatcatttattttctaaattactagagagggcatttcggtatttcaagtatcttcttcttcctaagctacacaaaaaattatctaagattcttaattttatccaggtttttgccaaatcgactggtctcagagttttctcgattttttttggaaagatgcaggtaatagcatctttctgttcgaaacctaatgagaatgaatttgttggtcgacgacaacttctttcttcagtctgttccaaaatttctcaaggcgacgtcgtttcacacccacccgtttcttctgtcaagtaagcattttagcttcttccattgccccaaattttgctgaaaatttgttcctttgatttgggttgctcaaagattatgtcttttcctgatgggctttaggttactaagaatggtgttatgtgtgaatcaacgttagtgaaaaatcaccgtaaagcttttaacttttggaacaatcttttggagaaacttctcattttgaatcagacattaagatttgttgatttcttggagaattttgatgtttatgttactttttgactgtttgattattcgatagggttactcaagattggaagtcgaatttacatgagttagctgtgaaaagtgtcccttcgacgacaaggagaatcttgttgacaagtttattcatgaatttgtgctttaatccttcaaggtacttatcaggtctgcaccttgttcagctatttgcttttcttctaacgctttgtttacacaaatctgatgaggaatatatcttgtttaagaagcttaattgtgacaatcagagcctttagttcctagctggtgatgattcaaagttagtttaaaggattttgcaatactagtggtagagttctgaagctccttgaactagtctaacctcttcattaacacttatagtaagcttataataagatggttttcattgatccattagtgatagaatttgataattgagtatgctccgtgatgtattactacagccttagcacttggtgatccatccgttgcaaccgttgaagatgttagtccaactgttttcccagctggacctcttttccctactgaggtttgtctctttagcgaaagtacttgtaagtttcaggttttgatggttatcctaaagatttatatatcttttctatgtttcaggggagaattgtgcaactgtttgagaagaatacttattccgttgtcaacatctttgatgtgacattacggcctcagctcaaaatgacgggtgtggttgaggtactgattcgcagtacttaaagaacacctctttttaatgtcattatcaattgttttgacttacggttacactcataatctaattgtagataccagaaggaaatggctctggagtagtctgggacggacaaggatacatcgtgaccaattatcacggtaagatgatttgaatgaaaagttattgagcttacaaagtgcttgagatgggcaaggacaatatcataagtttttagttgtatcttctgctgaacagttattggcaatgccctttcaagaaatcctagccccggggatgtagttggtcgtgtgaatattctggcatctgatgggtgaggttttttatctgcgggatggattatttcagccgtttatatagtctctctagttattttcatgtctgctcgtttgtgtaaatcttgaagggtacagaagaactttgaaggaaaacttgttggtgctgatcgtgctaaggatcttgctgtcttgaaggtataaataaactacaggttttgtgtcatttgtcttatagaattttaaaagaatcaactgcttatcacaaaaatcaggtggatgctcccgaaactctcctgaaaccgattaaagttgggcagtcaaattctctaaaggttggacagcagtgtttagcaattggaaacccgtttggttttgaccacactcttacggttggtgtcatcagcggtcttaaccgtgacatatttagtcaaactggagttaccattggtggtggaattcaaactgatgctgccattaacccgggaaataggtatgtctacagaatcatataaaagaggattacatttttcttgtaaaatcattttctgtgtgtttaatggatctttctttattaaatttcgcagcggaggtcctctgctcgattcaaaagggaacttgattgggatcaacacggccattttcacacagacaggtgattttcattgactcacagaatcatgtaagaatccattttagtattcactcttggcttcaacaggaacatctgcgggtgttggatttgctattccgtcatcaacagtattaaagattgttcctcaactaatacaattcagcaaagtaagtatgaaaagatatccattgttttgttttcttaatccatttttggaattttgttaatgttatatgcaaaactctaggtccttcgagctggtattaacatagaattagcccctgatccagtagctaatcaactcaatgttcgtaatggagcccttgtccttcaggtatgtaaaacacttcatagttcttactctaaaacatcgaaaccggttggtttatttgatgattatgattatgatttacaagttccatacaaaaacaggtaccgggtaagagtctagcggaaaaagcaggattacatccgacatcccggggttttgctggtaatatagtgcttggagatatcattgttgcagttgatgacaaacctgtaagcacgatgaacctcttacgtaaaaacaagaaaataattctcaagttttggtttcttgtccttctgagattttgagtgttttttaatcaggtgaagaacaaagccgagttgatgaagatattggatgagtacagtgtaggtgataaggtgacacttaagattaagagaggaaatgaagatttggagttaaagatctcattggaagagaaaagttcatgaaaatattattgacaacatttcatctcttccttttgaatctctctgttttttccccctttgagaatagcaaaattacaatcgttgtctaaattctctgaatatatgtatgtctatgggaattttttttattaatatttaaaatgttgccaaattattctatttcaatatttcttttcgtattaaacatatataatttatgtttttatattcaaattcaactacaattgttggtaaagaagtctttttataagaactatttgttatgtagattttgtacttataagttataacccttctaaaaatcctaaaaaaatgtttcacagaagtcacatttctgtattgtctttaaccgtaaatattcttcatgtaacttttcactaggctgggcacgaagcggatatccagaaaaattgtgatatttgttattcgattcgttttaaacgaatacttgattttgtgatttgctttgcttcaaaaattttcggatatccggaatttcgaatatcaagaattttttgtgatatttgcgaatatccgctttgatacacttaaatattaaagaaatattgatttcactatgtgactacttttctctatgtgactatttacactcatgtatttccaatcctatttatattagtgttttttattttataaatgttttcatttatacatatgaattgttcaatggatccatattttaataaccacaaatttgcaaataaaattagaaaaagttactaaaaatatatattatcttaagattgattttaatttatttatatatttagcataagatttgtagatttttttttttaacaataaagtttttactcttatcataagtaattgtctaattgttgcgagcaaattataaacccttgtagaacaaaaatagtgtagggtttatcatttctcgctttaaacgcccaccatcctctctatatctctctccaggtacgcttcgagctcgtttttactatttttagtctcttttgaatccaaaaccattgtaaaggagccgactttttttccaactgtactctacaaaattgtcaaatttcaaaactttttgattcgagttcgtgaaccatggcgagaggcgtagctggagttttgcgtagagcctatagttcaagagttacggttctattctcgacacgaaatttacattcttttagagaatctgagtctagatctctttgtaattctgattttgatgtgcccacgaaccggttttgttcgggtaatcgggttcggattcagtttccatggaatgattacagatttgggtgctttgagattggtaaagttaggagcttttcgtctactgtggataataacggcgaaaatgatgatattgaagaaagtgttggttctgagagtgatgattatgatgaggaaggtttgattaatgaacttagtgatgtagatgaaggcttgttgaatgattcagtggttgctgagacggatgagattggtagcgaggctgctcgtgctttgaacgatcggtatcatgatcctgtggagttgtacagggagcttaggggaagtgaagtgcgttctaagcttcagcatagtgaatgggatagtctacatgagattttcgggttttttgcgcagtcgggatgggcggctaatcaggctcttgcaatctatatcgggaaatcgtttttcccaactgctgttagcaagtttagggacttcttcattgagaaatgtggaattgaggttgttcag

SEQ ID NO: 797 - DNA, 77380 bp, Arabidopsis thaliana
gatcttgttcgtgttgggccaactgatgtagctgttaagtttttgttccctgtgtttgttgaattctgtattgaagagtttcctgatgagatcaaacgttttaagagtattgttgatactgcagacctcacgaaacccgcgacttggtttcctttcgctcgtgctatgaagcgtaaaatcgtttaccattgtggaccgactaacagtggcaaaacgtacaatgctttgcagcggtttatggaagctaagaatggattgtattgcagccctcttaggttattagccatggaagtttttgataaagtaaatgctttagggatttactgtagtctcttgactggacaagagaagaaatatgttccgttcgccaaccatgtatcttgtacggttgaaatggtgtctacagatgagttatatgaagtggctgtgctcgatgaaatacaaatgatggcagatcctagtagaggtcacgcttggacaaaagctttgcttggattaaaagctgatgagattcatttgtgtggagatccgagtgttttggatattgtgcgtaagatgtgtgctgatacaggggacgagttagtggaagagcattatgaaaggttcaaaccgttagtcgtagaagcgaagaccttattaggagagcttaaaaatgttaagtctggggattgtgttgttgcgttctctagaagagagatatttgaagttaaaatggctatcgagaaacatacaaatcatcgttgttgtgttatttacggtgcattgcctcctgagacaaggagacagcaagctaagctgtttaatgatcaagaaaacgagtatgatgttttggttgcaagtgatgccgttggaatgggattgaatcttaacataagacgggttgtgttttacagtttgaacaagtacaacggcgataagatcgttccagttgcagcgtcacaggtaaaacagattgccgggagagctggaaggagaggaagccgttacccagatggacttacaacgacattgcacttagaagatctaaactatctaatcgagtgtttgcaacaaccgtttgatgaagtaacaaaagtagggcttttccctttcttcgaacagattgagcttttcgctgcacaagttcccgacatggccttttcaaatctcttagagcattttggaaaacactgcagactcgacggttcttacttcttgtgccgtcatgatcatgtgaagaaagtagcaaacatgttggagaaagtagagggactgtctctagaagaccggtttaacttctgttttgcaccggttaatatcaggaatccgagagcgatgcacaacctatatcgatttgcttcaagttatagccaaaatatgccggttaatgtagcaatggggataccaaagagttctgctaagagcgatgcccagctattggatttggaaagtagacaccagattttgtctatgtatctttggttatctaaccaatttgaagagaacttcccatttgtggagaaggttgaagcaatggcgacaaacattgcagagttgttaggtgaatcgttgagtaaagcttcttggaagatggagtcaaaagaagagaaagtgaaaggtcaaatgaaggaagatagaggatatgaaagaccagcttcgttaataaagttagttaagaagtaagtatctgcaagattttgtgtgtgttttgagaatgtttttggtaattgtggattttgctgagagatttatgtgtcttgtttcaggcggaaagacgagaaattggtgtgaaggataatagtcataataatgtagcttcatagtgatcatttgcagagagacaagtagtggtttaattcgttattattgttaagcaaaagtttttaatggattctttaattttgattcgactgaagattttttgttgtcggaagatataaagagtcatcaaagagctctctgtgacccttatatgtaaattgcgtattaaattaatagattgtatacaagaaaattaagaagtattggcgtagtatacataaaaatataggaaaaaaatgtcagaaaaatcccaaactttcaaatttgggatgattaaatcataaactacgagaaagataaataaattataaagtttttttgttagtctattaaacattaacaaaaaagtgtttagtaggctaattgaaaaagtgtttagtaggctaacaaaaaaactgttacggtgttgaactctcgttagccgtcgatatcgttaaaaaataatttgttttacttttttgttgacttttttatcgacggaaaaaactgttctgttatctaaaagggccacagaaacaaaaaacttaatttagagatttaaaatattaataaaattagtttggaagtttatagtactactgaaaatatgtcaaagtttaccgtccggtaccacttagaaggttaaaaacgttattttcccattttcaaaataattcagattcattgagcctaacaaattatagaggtcaatgaaaaaagcccaatgggccaacccaaccaaaagaaatcatttgaggccttaagaccctctaggtttttcatagtcgtgtaatataaaaagcacttcgtcttcatcgtcgcgatcaactctgtcttagttttgagcagcagcagctatggttaacgtcagattctaccgaaactgtaagctctcttccctcaatcttctattttcgaaactagtttcttccctcatgcatgctgaatttagattaatactctgttttttttctcgaattttacttactaaagtctgattttgatcatctgtgtattattattatgttttcatgttataggatatggtttacatttagggtattgtaatttatctgttgtggaatttaactctactctgtttttatgtgtgaaaattagggtttttgtctggtactctgttttgttattaccttgttctgtttcgttatcgtatgatgtttttaaagatttgatttttatttgttttgaagatgggaaaacattcaagaagccacgtcgtccttatgagaaagagcgtcttgatgctgagctaaagcttgttggagaatacggtcttcgttgtaagagagagctttggagagttcaatatacacttagcagaatccgtaatgctgcaagagaactcttaactcttgatgagaagaatcctcgtcgtatctttgaaggtgaagctcttcttaggagaatgaatcgatatggtcttcttgatgaaacccagaacaagcttgattatgttcttgctttgactgttgagaatttccttgaacgtcgtctccaaactattgtctttaagtctggtatggctaagtccattcaccacgctcgtgtccttatccgacaaaggcatatcaggtaatgctttttgagttggtataatcttgagaacaacgtttacttccagtagcgtttttgaggctagcttatcggttttgtcttgcttaactcagggtagagtcttgatgcacttcacatctatagatgaactcaattgtgtaaagggtgttacaaaagttgattcttgacctaatggtttgtttttgattcggtatagggttgggaggcaacttgtgaacattccatcgtttatggtgagagtagagtcacagaagcacgtagacttttctctaaccagtccattcggtggtggtcgacctggaagagtgaagagaaggaacgagagagccggagctaagaaagcttctggtggtgatggagatgaggatgatgaagagtgaaaagtaccaaacccttaaaaaaatccctaagatgaaacactacctagctaaacctatcaaaatgcttttagttgataatagtttggttttgttacctctttttgtgagatatttggtttgttagtgttcttaattagtagtagaagtgaagtgtttttttttttttttataatgttttggaccttgtgttcttgaaccatgtcactttcgaatcttgcttcttataagatactagtagttgatattattatgtccggtcactttgcttacaagcaaaacgcttaaacaataaagtagtttaatataagatgtttttactacacaagactaaaaaaatgtattaaaatcatgttccgatttgaaaaaagaatcaagaataaataccaaaaataaaatagttttaaaacacaaaaagtatgtgtatttgtttctttagtattttatattattactttaaaatgatccaagaaaaatgcaattaaaataaaagtaactagatgtcaaaaaaaaaaactaaagtaactaaaaaataaggaccggtatacgaaaagaataatactatactagggattcacgtttttattttagtccatcaaagtataccacctaataaaaattaaatcctaatcaatattctttaaattcaaatcgatatataattttatttaatataaaatctaaactttaattctcatttgtaaacttaaaccgacattcaagctcgtttaattgtaaaacctaaactttaactatactttctaaacttaactgatatttaacctcgtttacttataaatctaaatctatttataaattcaaactgatatttaacctcgtttaattgtaaaatttaaatccgtttataaatccaaactgatatttaacctcgtctaatcataaaatctaaaccttacccatttcttataaacccaaattattatataatttcgatttattaacaacttatattttataatcaaattttttttttttaattatataacagattgtgattggcttgaataaaagagggtaaattaaaaggttcaccctaacccaagtatttttctaagacgaagaaacatcttttatataaagtctaagggggaggtattggatgagagaatttaatagaatagaattgaagacataaattatagattttcaagtattgtaaaagattttcaaatctttcttttcaattctaacaatttattttgcagtattttcctagaattaaaaagatatcaatgaattactatagaattattgttctacgttgctctctatcacccaccatgtccaaaccctaaaaatcccagaaacgaccaacatctcttctacccagaaatgacctacgttgacatttatggaattctatcaaacttatggaagagatccctattttaacaccaacgacaatgtcatcaccaccatttatttcctctttgtctctctctctctctcgatttacacactctccccctcaatataatctaatggatgatgatctgacgagcaattagccggatcatgagatcacaaattgtagatgtgttagattaataacactctccctcagatttgagaaaagcatatgaaggagaaaagtagacgatgaattttggatgtgttgaaatattctatcaaaatctcaactcaaaaccagagaatttgttcttcacattttaaactaaattttctattaaattcctgtcaagtaacgatggcatacaatttcaacataaacttgaataacaattgcaattaatagaattaagaaatgagtaagtttaataacacaagagtttaaaagaatttgtaaaatctctacttgaataacaccagaatttatgattctattaaattctatcaaactcatgcgtccaataccccctcttaaacgatttcaaataagatatccttttcttatttatgattatcagattatgtaaacaacatacgtaattttccccaccacatttgtagagtgatgtaattcccgatctaaggtaagactaaaacaatataatgaatagatttagttagatagtaaagcttttttgctgttgatgagcatgaggctcattgttttggagaagcctatgcaaagcatgattgtgtaataattatgagagaaaaatggttaaaggggaccatgaaatatatattggtctatacctggaccataatgtgttacgtattccttattattaagagttgatacctactattgaaaaatatacgagtgaaaaatccagatcttcgtgtagatatatcatttaaattcctttttttaactagataaatataccaaagtaaaaaatttatttactattgaagtcttttcttttaataaattagagtcactcagtaaaaatgatttttttcttaactagataaatatatcaaaataaaaaaactttattaccattgaagtattttcttttaataaattggagtcactccgtaaaaatgatccttaacttaattgtaaagtatttaatttaacttaattgttggttttgccattttttgaatagtttgtagattttgtatattttaagacaacaaaaatgtgatttaagatgcgttttactcgtttggatttaatcattttaatttatataaaagacatatttttgcaaaaacaattcgtaatatgtacacttaagtgttaaaaaatggcagaattcgtaaactattcaaaatattattgttagattttttttttaaacggcattttagacaagaatccctatttacctagagtcttcaatttgaatttagaaaatatggaattaaatttaatgtactttcttaatgatacttactgtaaatagatagaattacatagatgtatcagtatcttcttaattgccattgtagtaacacggcaaaagtctaccgttttacgtgtgtgcacacacactacacaatctgtcgatgctttgtttgtgatgtgattatgtgaatatatgatggcgaaacaattcttatcaagggacatgttatccgtggaatttgttcgacatttccagcgtaattcgaatactcatgctaaatccagagaaacatttcgcagttataaatataattgttggacatcttatgtgtgttgtatatttcgacctgatcaaatatttataaatataattgaataattcaaatctttgaacatagaatcgaagatgccgttttgacgactttttcaatgtttttttttaattgttattttattcactgcgaagatatgattggtgccattaatgcatattatcgtactatagtgtttttgtaattcattggaaaaaaaaaaaattgctcaacttttccaaagtgagtttttataaattacttatttaacgagtccttcatttccacatgattactcgtgttttttacaacatgtttgtaaagatgtgaattaattgcgaaaaagtagacacaaaaacattgtggagcctatgagaccaaacatttagtacccgaacccacatggactaacatgtaaaatctccctttgcaatttattagaatggtcactttctttaataatcttgtatatataaaacacacacacacacaccaacacacttttatatatattcttgtattcacacatataagaaaaattgataaatgttttctttaattatgtgctttattaaaaaattgtatgaattaatgttctcgttgaatttttgtggtggatagatcattgacatatatatggtgtacttactatactgttgtcattctcttgaattataagtgtgaatttcatgtcggatgatatcggttagagtaatgaaatgtttggctatataacaagcacaacgatggagaaaataattttcttatatatttagtatatattgagcaaaaagtacttttaataagtaacgtaacgtaacattgatttcgttaactatgaatataatccgatccatgtcatgcaaacctgtcggaagagaaccattctcacttatattttcttgttggtgagaatatattaaactgttattgaattactaatgaaatagaatgttgtgataaattaatacaccacacaaacgaaatattttgagggataatgagggatttcgaaatttatataacctttcataataataataatatgttcaaacagataattgtattcgactgttacatacttgtcggatctttattgataatgttattggacaacaagatatctaaaattttgatcttatggacccgagggcagcatgtaacacgagacatggtggtgacacgtgacatagtcgatgttttgtgaacatttatataaattaatactcaaccaataatggaccaatcgaacaattaaattaagttatatgagacatgcgattttattcacttcaaaataaaaaaattctttaaataaattattttaggcaaagtgtaagtgtgcgaagaagtttgaaataaatggtctgaacgaagttttaaagccgatagatacgtttcttttaagcatttggtttccttttcacgttttataaaagaattaattatggatttaccattttttgaatgatatttatggattttgtcattttttaaataatttgtggattttgctctttttcagtctaaaaaatgaaatttagcatagcttttattcgttatattaaggtttagtcgagttttttttttgttttttaagtttagcatttaatataaaatacttatttttgtaaaaataatatcgtaaatacgtacatttataagtactaaaatgacaatttcgtaaaattttagtaaaaatgactttttcaaaagattttgatgaaaacggcaaaatcaacaataatccttttatagaaaatatttgttttatatctactatttttaagttacattgacattctataattttttaaaagttatcacacgaaatattttacatatgaggtgaaactatttatggcttagcagttagaaaacaatgttccataggagtcaataattaggcttcttcctttctaaaacaaatgtagttagtatggaagatagaatttacataattctctctatgcttttttatacaagtttggaactatatattttatacaagtttaaaatatatagtttggtaatatacaagatttacagataaatatacaaactgtacctagatattgtggaatacaaatttagagagacaatttaggcgataatactagttctaatattagaagaaaaaaaattgaatgaaaagtcatgtcatcacatggtagttgcctttttgtgaaattgcagatgaagggccacaatgttagatgaacatgaaacacttatcttgaccttcatcaaccccatctttgggaacttttcgtttcctccatttaactattcaaatctcctccaattattcaaaaaatttagtacccatttatttatccactctataggaattatactgtaaaattttcaataactaagcatatgtatatttgtgatccattctagtcataatcattttctttttttttggatagttgaggcataaaaagttggggttttggtaaaacaaatcctaagagaaatctatttttgtaattttaccctctacttctaaaatatgcagaataatcataaaaaaacaaaaataatacgcaatatattccttatacatatattgtaaacgtattcacgatcacatacattttaaaaaatctaaattaaagaagagttgaactctttgtctcgagggcttcgatttgatataatacttctcaatttttttaaaacttgacgaaatctgacaatagcaaaaaatgttatattgcgtagtatttttcactttgtaaaattattctatattttctgaaagtagaaatggacgatttcaagacttattttccacaaaatcctaaaaagttacgaatcttgaaacttgtgtatcatttgaactatacacaataactaactaaccatgattgaaaacgttgtgaaataattcaatcccgccattaccttcgtataatgattggtaatagtctcgactgatgatatgtatatatacggcttggaaatctgtaataaaaaatgatttcgaagttttgtggtttaagggcattcaatctatcgctttcttctcccgtgacatcattgtcgaggtttattgctgctctccgtcgctctctctctcttgtggtccattggcctatttaaatctctcttatcacattctcaatttctttatatttgaagtgtattcaaaaccccaaaacacttttctcattctcttctctattttcttcttgctctctagtttttctttcttcttggtcgtttcctttcagcataaaaaccttataaaatcataaaagcttacacctacttgccacatagacatagccgatctcattatatctctatttctatttctcaatagaacttgtttgagctagtgtgagagaagtaaagaaagagagaagaatccacaacttagttagggtcttttcttgccacattgttgaacatgtcgaacagaagatcaaggcaatcttcaagtgctccaaggatctccgataatcaaatgattgacctcgtatctaagctccgtcaaattttgccggagattggtcaacgacgtcgttctgataaggtatcacgcataatatatgcatatattcatttataacgaccatttaacattatccatcgtgtaaacctatccaaaaaaggaaagaacaaaagttttgtaaaaagaagagtggacactaaaatcaaacaagaaagaaaaaagaagtcggaacttttgactccggacattaaggaacatatataccaatattcacaacctttttcttccatatttacataagagattacatcaaaatcatcagcttgcatgcatctgcaaacgcataaaagcgcatgcattggttcaaaaaacatatattataatgattatgattttatttcgtttttgttgttgaaggcatcagcctcgaaagtattgcaagagacatgcaattacatacgaaatttgaacagagaagttgacaatctgagcgagcgtttgtctcagcttctcgaatctgtcgatgaagatagccctgaagccgccgttattagaagcctactcatgtaatcttttttgttcttttgtttgtttttgacaagcctatccatgtaatcttaaatgatcgctctataataattatatttttaacataatcgtcttattatgtaaaattcaaagagatgggcttgatctttaatgacatacgaatttcatagggttaattccatagtcaaaagtctccgacatatatgtgtgtagcagaactgcacgagcattgccttagcaggtgcattattaaaataaaccagtgggatgaaatttggtggagaagaatctttctttttttctccctaacaaagaaaaaaaaaacagagattgtgatgtctgaactcgattgtgtcagtcaaggacagtaaaattgcgagaggacattgttagttgcgagcatttaattttatacggaataaaaaaagttatttggcacattgtttttgaggtaacaaatcatctaaacctcaaaatagagataaaaagcaaaaatagaaatagaagacaaaatcaaataaactcttagccattttggaggggaaaagaaaccccatcttaactgtcacaaaaacgtttatacacatctaaaggaaagttttgccttttaggacgtccacacaaagaaattaaataaaaatcaacgttatagttttatttgatatctcataattctacatgcatgtagtttaaagtttaaacacacgtatacgcatattgatatacatgcacccatgtacatacatttagacaagtttggtcctttcaaggcgtaggagactggtcaaatctatcactcctaattttaagccatatagctataccggtttggtcctttcagggtttaggagactggtcaaatccgactcctaattttaagccatatagctataaaaataatcacaagaagaattacatgaaaaaggagagcattcagagactagctttgttacactcttccacctaaaacgatcttaatttttttttcttgttacatagatacaattttcaggtcttgtaccctttttgaattattattgtaaaattttgagatatactaaatagaataattaaatagcggaaacgatttaaacaatagagcaataacgaaacgacacaatatttaacaaggtatcggttggttctctttcaaaccaaccactagtcctcggctgcaacaaaagtttattagatcacttcaagaagtaaaagatatacttagaatttctacagtaaattcaaatacatctgtatctaagaacatgaactaaggttaacaagtaaactcattttacttccctttaatcatgtatgaattcttcttggagaagtctttccaaggtgatctctccccaaactccacagcgacacaagtttcacacaaacttatcaaacactctgttttctatttctctgttttaacagcaatcttttgtatcttgaaaattggagatgatgcttgcaacacgttgtccttatccaccacaaaagcagagtatatatatgaatatgactcttacagagagcatcaaggaaacaatttggataaaaagattgctataataattggttctttgcaatcaaaatatgaagtgaactgtgacagtccaagagctatatatgtttgtctaaaaatatgaaacgggaacatatagaagttgagctacacttcataagggatatgaccaagattggtactctctggtcaatcctactgacatattgtgtaaggacaaagttgtgtaatgacatcagaagcaggtaaatgaatattagatgtaaccgtttgtcgaggtggagatttgttgattatttcaaccaaagactcaagaagcttagagagtgaagctttggttatggaggttttagctaagttagtgtaaacgtcattaagttatgttttctttatagtaaaacaggctaaaacaatataaaatacaaattacagtactctgttatgtttttttttttttaatcaatttccaagatacttcctacacggggaaacaacttttagaatctttctcccataaataaagttccttgcgaaacacgtcgttggactaccgaggtccaatggccgaataggttacttctgccacagtccaagattcttcgtttcgcttctttcgtgacgaggaggaaccagtctcaagttgacttttacggactaaataaccaggcggtccaggcggagcgatctctattgtgtcgcttgcgaacatgacagagattgatagcatcgtgggcctatcctcagcacattcttgaacacacaagagaccaatctgtatgtatcttttaacttggtgttgttgaaatgttgatgaatcaaggataatttgatctatgatttcgagccctttaccttccttccaattcctccatatctattcatcataaacaaagctttaagcgtttatatcaatcacaataaaaaatataaaaaaaagacgaaaatgctttggatgattattacacttacatatgtaataagactttcgtcgttctccgagtatctataaaagtctctgtttttaaccccaaatataatctcaagaagcaagactccgaagctgaaaacatctgactttgttgaataaatcccttcctccgcgtattccggagacatatagccgctttgtcaagcaacaagaaacacaattgtgaggttttgtaaagtgtttgctttattttcaaatgtaacgatgatagtttgtttgcttactaagttccgacgatctttgttgtgttagctgctgtcgcacgcttgtcgaagagtttactcatcccaaaatctgatatcttcggaaccatatcttggtcaagtaagacgttgctcggttttaggtctctatggacaataggacgccgcgaatcttggtgaagatataaaagtccccgagagattccattaattatttggaccctcttctcccagtttagcttagagctttggtttttgtctaagaaaatgtcacaaccaaaatcacattagtttcttttcaataactcttaatacaactacttaaactgtgaggcactaaccgaatatatacttatcgaggctgagttttccaagtactcatatattaaaatcatctcaccgatcatatggactctccgatcattcgtgataaaccatggataatttttggagattttaatgaaattttggatatggatgagcactctcgaatggaagatcacccagcagttacctccggtatgcgagattttcagtctttggtgaactactgctcattctcagacttggcatctcacgggccctttttacttggtgcaataagagagataatgacccaatttggaaaaaactggatagagttatggtgaatgaggcttggaagatggtctacccacaatcttataatgtttttgaagcgggagggtgttctgaccatttacggtgtcgtatcaattttaaatatgaactctggtgcacaagtgagaggaaataagccttttaagtttgtgaatgctgtggccgatatggaggagtttaaacctttggtggaaaatttttggacagaaacagagcctatacacatgtccacgtcgtccctgttccggttcactaagaagctcaaggctcttaaaccaaaacttcgaggcttggcgaaggaaaaaatgggcaatttggtgaaaaggacgagagaaacctatctcagtctttgtcaggcgcaacagagtaattcacaaaatccatctcaaagagctatggaaatagaatcggaagcttatgatcgttgggacaggatagctagcattgaagagaagtatcttaagcaggtatcaaagtttcattggttaaaggttggggataaaaacaataaaactttccatcgcgcagcaaccgctagagcagctcaaaactctattcgcgaaattcagaaggaagatggtagtactgccacaactaaagatgatatcaagaacgaggctgaaaggttttttcgagaatttcttcagctaatcccgaatgattatgagggaatagcagtggagaaattaacatctctattgccttatcgttgttccacagcggaaaaggatatgctcactgcaacagtttcagcagaagagataaggggagccttattctcaatgccaaatgataaatctccgggtccggacggttacacttctgaattctacaagcaggcatgggatataattggtgcagaatttgttttggcagtcaaatcattttttgaaaagggttttctaccaaagggtgttaatactaccattctagctctcatcccaaagaaactggaggcgaaagaaatgaaagactatcgaccgatatcgtgctgcaacgtcatttataaagtcatctcaaaaatcattgcaaatagattgaaacatgttctcccgaatttcatcgcgggaaaccaatctgcatttgtaaaagaccggctcctaattgagaatctgctattagccacagagttagtaaaggactatcacaaggacacaatttcgggtcgatgtgctattaaaatcgacatttcgaaggcttttgattctgttcagtggtcatttcttaaaaacgttttgttggctttggactttccaccggagtttgttcattgggttatgctttgtgttactacggcttctttttcggtgcaagtcaatggagaattggcaggctattttcaaagttcaagaggtctacgtcagggttgctctctttccccttatctatttgttataagcatggatgttctatcaaaaatgcttgatcaagcaacagaagcaaagcaaattggctaccacccgcggtgtaaaagtattggtctgtcccacttgagctttgctgatgatctcatgatcctttcggacggaaaagttcgatctatagagggtattgtgaaagtttttgacgtttttgctaaaagttcaggtttaaaaattagtatggagaagacaaccatatatctagcgggaacttcagaagtgtctcaccaatggatcaaagaccggttcagttttgatgtagggactctaccggtgaggtatttgggactccctctagtaaccaaatgcctaacggctgcagattacttacctcttatagaacagcttaaaaagaagattgggtcatggacagctagatttctttcctacgccggtcgcttaaacttgataagctcggtcctatggagcatttgtaacttttggcttgctgcgttccggctcccgcgaaaatgtatcagagaaatcgataagttatgttctgctttcctctggtctggtccggatttaaattctcacaaagctaaggtagcttgggacgatgtttgtaagccgaagaaagaaggtggactcggtttaaggtctataaaggaggcgaatgatgtgagttgtttaaagctgatatggaggatactctctcgaggagattctttgtgggtaaaatgggttgagacttatcttttaaagaaggaaagtttttggtctatcaaagaatcgacaagcaaaggttcatggatgtggagaaaacttatcaagtttagggatatggtgaagtagttttgcaaaaaagaagtaaacaatggccgcaacacttttttgtggtatgatgactggtctaccttatgcaggctggttgaaattgctggagatagagggacaatagatatggggatcagtagaaagatgactcttgaggaggcatggaatggtagacgtcaaagacgacacatggataatgttctctatcagatggaggaggctcttgaactcacacgacaacgtagaaatggaaatgatgacgttactctttggaaaggcaaaaatgatgactaccgccattgtttctcgacgaaggaaacgtggaacaatacaagaacaatgggcatcgaggtcccttggcataagggggtctggttcactctctcaacaccgaagttttctttttgtgtttggcttgcagtttatgataggctctccacaggagataaaatgcttctttggaacagaggattgcaggggacatgtcttctctgcagaaatgcaactgaatcaagagatcatttatttttctcttgcagtttcagctcagaagtttgggaaatgtcagcaaaaagcatctacaagtcaagctactctacggattggcgacacctactcacaaagattcaaggaaactggaaagatcgagtagaaagttttattgcacggtatatctttcaagcttcagtctatgcaatatggcgtgagcgcaatgggaggaagcatgagcgcaacccgaatcaagcagctcaacttgttcgatggatagataagcaaacacgtgatcaactttcagcaatcaaacttatgggtgatagaagatatgaccaaggctttcagttttggttaaactctagtagttaacttgtaaagtatagctttacgcttagtctcttaaacaccatgatacactcgttgtacaaccgacattttttcttttgagtataatttaacattttattcaaaaaaaaaaaaaaaaaaaaaaatcatctcaccgccctcaaaacagtatcccaggagttggacgaggtttacgtgttggacactggcgttcagactcaactcattcttaaattcatcgataccttgagttgacatcttcaacagtcttttcacaacgatttcttgtccgccaagtaaccttccctgttatatgtatattatataaattacacggaatttactgaactagtacattttatgtgtatatatatgctaatgtaccttataaacaattccaaaaccaccttgaccgattttatttgaatctgaaaaaccttgggtggccactataacagtttcaagtgtcatttcctcacaatgtaattctcctgatatagtcattagaagaaaagaatagttactcaagtgttcatatgtaaatttgacaatactttaaaacctatcgcttatgtgttcatatgattatatgaattctttcaaatgtaatcgttgaataacctctctctcttttttgaatgtaatagaaataagtcataggtttaaacaaatacaaaaaaaaaaaccacatactttctattgttttggtttggtgttacaacaacaccccaacctccctcgattttttattttgaccaaaaatctgctttacatatcaattagcaccccactgtacaattcaaacaatatctactagagcctcaacatggtcacaaaatgaaaaattagtaaacccaaaaaataaaaagggaaactgagttttgtatattgactcactcacaacacacatgacatctgatcaatccattctcattacaatatggacatctttgaaatccatactctgtaactccttcgtcttcttcttcgccttcgtggtaaagtttgcagctgcctgaacatgtctcacacggcacaaaccgaacatctccacaagcctcacattcgttaccaaaacccggtgagccatcttcaaccatttcacagtcttttatcagcttttcaagttccccattttcattcaacttcttaatctcctctactccgccaagatacttgttccccaagaaaactctaggcagggttattccaacgccgttgttgaatttaccctccaagagcttcttcagctcatctttgaaacccgaatgcatcgatacatcgcgctcatcgatccgaattcctaagcttttcagtattatccggatattgcagcagtcttcatatgttttccttatacctctaaggcttgtgaagtaaagtaccactctttctttacctaaagtctttcttttgaaccttgaaactatatcaggtggatccaaatcatcaactctgcaactggacttaacattctcatgaaaccttgatttaggaagatcaaaggaaacagcaacatcatgatcatgatcatgactaggttggatacgaacaaaatcaaaggagaagctcctcaagtgattcggtgatcgtaaaggactaacatcttcaagaccttccatcaattcccatgtattgatcgtctctggctctccaggaggcgtcactattggagttttagccacaatcttagggattttctcgtttatcgtacttgaccacaccttagcttcgataaccttagcttgcaaatccaaattcatcttctcttcatcgccgtgaagaaacccattaccggagattagcgtctcctcacccatttggtcggaaacgcgttgcttgtaaaaagagtcttccaagtgtttgtgaaaatgcctgagagaagaatcacaaagactaagagatccgattgtggaggaagtgagagccaccgtgtgataactatcgccggtgtgttgtgctggatgatgaacgtgcattgaatagcttcgtggcacaatcaccggcgataatcctcctttgcaattacggcaacggtttcgattcttcgagctcgcacaacccattttaatcaaatcaaatcgaaaacagagcaaacaaacaaattaaaaaagttttgatttttgggacgcaaggattagattttagacaaaagggtttgctaaattcgatgagatgtcataaaaattggcgatatttgtaagaataatagctggaaaattacgaagatcttgaaaagaacgatagaaaaaaccgacagatcgtaaaagaataaaaggaagagactttttaggttttgtttttggttttggtttggaccaatctgcaaaacagagaagattcgttgatcaatgacagatagagaaatcgatggaaatacatgaacgaagaaagaaactagagagaagaactaaagaggaatctccatgatcatgatgatcatcatcttcatcgttgtcaggtcctactttctttctaaaaagttgtatagagaaagagagagagatgggaaattttgtgcattgaaagagaatttaattttaaaatttgtaagatttttttttcctttctttaaaatataattttgacttctccttgacgatgtccttttctagagtgtccacactccgtagagatttggtgatgcccaaactcataagctacttgactctaactaaagtacacaacacaatgacaaattttcagcttaccaagctcatagacaagcaagtcatcagtcgtagaatctcaacgattcgattccaggcatgggagatgttcgatttggtaaaacgatggagaggtttgaaactagttaatctattttttttttaaaaacaacttaaaaaaaataaaaaaataatcagcttcaaaaatagtcatagcaatcttttaaacaaggtgcattcattgcacaaaatgttctttttgaacaaattttacattttattcggaaaatgactaattgattatcatagccaatcctcacgaccatttcatgatagaattttgtatacaactcacaataaagaactactcctttaaacagagcaatgcaagtgagaataaaacccaataacttgcatacttaacctgattacctgaagaacttacaaatttagaataatagttttttttttttttcaaacgctgaccattataacaaaacttagcataagcaaatgacaattatttagattaatagttaaaatataaagattttgatattatcttaaataaatgaggaactatatgtttgcatcagtagaaatttatttagtttatacctaaatgaatagaaagattctttaaatttgttttagtacaattagttaagaaaatggagaatttgtttttttttttacaaaggggaactaaattggcagaaacaaaaatagattataataatttgatgaaattaatacacacatttgattttctaggaaaaacacagatattaaggtaaactttaaaatgacatttttaaccttttatttaattatgataattaatcttgatttattttattctaataaatttgaaaaaaaaagcaaagaataaataagggtataatagaaaatataaagctaattatgcatagaaattaggaaaaaatcaaactttttgaaataattttttttctagaaaatcaaataaaaaagaactgaaaaaatattatatactctaaagaataaatgctagtaagggacacacatggatcaagattcaagacattgagattggcctaataattattacttcatgtgggctaaatggctgattggaccctccgctctaagttttgatgaccctttccatatctgtctccatgttcttttaataatctgtaatttctaaaagctagcaactcaatagtttcactgcaaatttgcaatataatacttcatatgtaagagcttgatttttaataatgtgagatttctcgcttttatttttaattctgaaacttttttttaattatttgtttcggctcgtctacaaaaagaaaaaaggaaaaaaaaaaatgaaaacatattaaacccaaaaacactttcatgggtcgtctcattacttctctttgagctttatgtacaatctatatacttgtatacttccacttttttaaccgattaggcatttttgctactctctattttgcttcttctacttgtaactttcttacctccttctttaaatttatattgcttctttggttttcttcttttgttcccatgatcgtcaatctcctttggagaatttctagcactttttaagataccattgatatttcctttatttgtcacgcggctacctctcggtaacgctgtgatttgagcatattctctttcacttcttcttttgatttgtgtttgtgttgaagatttttcttctttgctttcttgtgtcgtttgagattttgatgaagattttaaatttatttctacgtttgtctttacgattcgagtaattacttgaagccatttcaagattccatctttcatttctttctgttgttctacagttagtttcgcgactccattagtctctgttttgttacttctcccacccgcaatcttttcaccaacggattgcagtaaatttatggtattcatggcttccattttttcccgttgtagactcttattcacctaagttggcagaaggaaacaaaatgtttgttaagccattacttcattttagtaagagatttttgaaataaaaagtaaccaatagtatgaaaaaaatagaatagttatttactgaaagaaaatctgatcggcttctcaactatactaactcaattttcgtaccaattaatgaagatattatttgaatttgtttttcaaaaataaatttgtttcaatttgatttttttttttaatttgatggtttgatattatacacataaacctccgaataattttttttagagtttttccagtttgatggacataataaaaaaaaaataagtcacttactgatccttctttagatctgtgtttaacggagatgagggctgacattgcctcgaaaaggctaccggccttggccttcatgtcagatttgtagccttttgctttagagactgggcacaagtacttggaatacgccttaagtttttcgaaaaataccttaaatttctctgttttggggcattccttctcaagctcaaccaggaacgttgtcacaacttttatggtataagactcgacatcttttacggtcaatggatcttcaatctgcggtaaagcaggtttaattttcacgtgagctgaagctaccttgaaaaaggttatggttgcaacaaggatggtaaaacagagaaaatgttgaaatctaggcattgtatgagaaacatagattgacaattttgttttacttttgaagactctaaagtctcatatatagaaatatgaaggactctatctttagaatcatgaaaacaaagaatttatttaagaggaaaactggtggatagagattaaaaaaaaaaaaaaagaatagcaaaggacctagtggttctcctctttacattcttttggagtaaatgcaaaagaaaattgttgcccttaggtctacaatgtgtatacattcactgtgacagtataaaattgatacttatattatggtctatagaaaattgttgcatttatgattacaatctagaagtaatatatatatatatatatatatatatatatatatatatatattacttaattagtgtgtgcatatatatatttgataagaattagagattgaacagaaaggaatggaagctcaatcgaagagaaacgaagatgagctcgagagcgaagagaaaatcgaaatgaatgttttgttgttatcattcatttaaactacacgatttttaattcatttgccctacacgattattgtcgtacaattccagtttacactatgtacactaagccaatctcggtgtctacccttaaaagttaagaaactaggtaacgaaatattattgttaacctaggaaacgtacgtttgtttgaaactgatatcccgtattttgtttttttttctcatttaagaaaattcttaataaggaaaaaaaagtaaccgagttccatgaatctctctctgtcttttctttctgttttctcattttatagtaaccatttatgtgtcctataattagcttataagagttaaaagaacaaagtatatatagggttcctagatctcaaatcaaaacgcacttccttcgtattgtattttctcttttagggattgtttttttaacaatttttgccttgccataagcaatacaaccatggcaaggatctctctgttgttctcattagcctttgttttagccctcggctcagtgttcctttccgtttccggtcacgctcctcccgtgacaccgagaaaatcagcatgtccaaaaacagtatccgaactccagaccttaccttttaccgaaatcactgagatcctaaaccgaaaagagcggtctgccccgaaaacccctgagttcaaggcaatgttcacaatgtgcaaaggctacgtgacatacctcgagagcctctacaagtttgagaatcccattgtagatgttttaggaattgccaagaccagatacaccctgatgaacaaggcaattcttgctgcgcaagctagtgttggcggtaaagtcaataagaaaacttctttgaagctaaagaaaagctatgctgatttgacaaaagggtttctccgaattaaagaaactattgtaaagatatcagccaaacatgattaccaggctgatgcaaagatcacggctcacgaagcgaaaaagctcaatcacgctatgataagtttcaagaattcgatcaatgctttcatgaatgttgttaacaatcttgagaataagaagatgaagaaaataggtcttcacgcaagagcacttggagaaaaccgtgagaaagtaagaaatgctttcaaaagttttttcaagaagtttggtggttatctaggaggtaaaactcaccgaagagaactaactgaagctaaatacaacgcggattctcacgttggtgctgacgtaaaaggatttgaatccattatcgataagttttctgacttctttaatggttatcttggaggtcaccgaagagaactcttttaccaagtaccagcaggcgaattcgccgatgaaaaaattgctattcatgcttctttggacgccaaagctcacggaagaaaaggaattcgaagggaactatatgctcaagctcctttatttaaaaatttcttcaatgttggatttggaggtaaagctcaatacgatgccgcgggaaagatgaaagtcgccggagatgatggattcaggtcactgaacagggcacatgttaaacattttgcttcgacagaagcataattttatccattttttcacaacagaggaaggaagccatgagttcatctttattaatataatgtgtttgtttttcgacaaaatacgaaggaagggaaatgccgtgcgttatttgtctatatgtaactatgtaaaagttgcaacatgtttaataaataacgttcgtatcgcatacatattaattaatgggctcactttcgaattaatagctgataaatattttacctatagggtgatcaaatccgggcaatgagtgaatctatctaacagttctatctacatcacgttaactattgatcattttatttttatttatttgaaacgatgacaaatcaaagagatttcatttgttctcatctatcatcattattcattactttttaatctttattagtcttaaccaaaactatcataaaaattccttaatgcatacaaaaaagagaatattacgtgattagacacttttttgaaagtttatccgtaattaggcacttaaaaatcattaggcactttgaataattaaaattacttgttcaccctcatatcgtcggttttctataaccaaacaaatcaaatccattttcactaaaccaattcagatttacggagccacgattttgtagttgcctttgtgatttaatttttttttccagaatcgtaaaaatccaaatccaataaaaaatcctaaattacaatttctcgaaaaggggactccggcgacgagatatccatctcctccgtcactgtccaccaccactgcttttcacactacactctcgtttgctctttcaaccgtaaaacaccaaatccaattctcttgtcatttcctccaaatctctgcaatttcttaaatcgatttggatttactttgcttgaaaaacccttaactcgtactgtccaaattcaatttcaatttcaattgaggttacttcgagaaaagttcaagaatttcggaacaactaaggtaaagttttgtcatgttgacttcagagatcttgttcgtaattctgtgataatgtttgataacttctctgcccagtttgtttgaaattcagtacttgaggttctctattggacagaagatgaacatatggactacaacacttggacaatccgtaatggacaaccacacattttggttgcagcgtatgtgtcgttacaaaattgaaaatcaatgtccacgaccatacatgactgcacagcttggtgtttgataattcaaggaaaaagccacataaaggttctatttcttaatcttacattttggaagaaatcaaatcattgatttaagaaataatatgtaagcttggatgctagagctttaggtgatcctgtggccagattaggatattgatttaacttttcttactgctactcaacattgattgtctggtattaagttgtaaaagagtaatttgacttatccatttgtgttgatataattggttattataatgtgattagtcaatagaaaaccttagagtacataatatcaaacttttaactttgttaatttttttaggcgagtgggtgaatacatcagttagacttgcttttgcacatcatgtgatcatcgtttaattgttatatgatcggacggtcattatttctcattaacttctatttaaactgcaaatcttaccacgttcatttgatccgaattaacccattattctacacgtgtttggtacacacaattacaaaccaaaaccaatgaccggttattcttttttcgtgattcagtttatttggggtataatggtctattttcactccaaaaacaaagaaaaatatctcaaccttggaaaatacctgttttgtctaaactttttcccaaagtgccttattacggaacattccctacaaaaaaaccatcgtcatgtactggacaaaatattcttcaagtttgttttcatgttgtgttgggccgtttaattcgcatgtatcccatatcggaccttataaacttataagttataaacattaaaatataatccatttgtcaatccttttttccactttttttaattaagataaatcttaagtattaccaaatcattattaaatttttatatttattattctagctttaccatttacacatactttacccccattgtattttcattgccgaaatgtttcaaaaaaggatgatttaaggggcaataataatatttaaaaaaactgtgtttagtgatgaaacaaaacccgccgttggaaattaaaccagcccatagagagaaaaacctctcttaacgaagaaaaacaacaacatggcccctggtttctcttctctttcgaatctatcttcttcttttatccaatcctttcctatttttattctcaccttctcctcgtttttcccgaaactgttcttttgccctcttctctcaattttaatccaccaaacaaatcgaacagtgttcgataacttttagattgcaagtcctgtttttgatttggtcgggagaaagaaaactagggttttgatgggaactgatacagttatgtctggacgagtaaggaaagatctatcaaaaacgaatccaaatgggaatattcctgagaatcgttctaattcacgtaagaagatccaacgacggagtaagaaaaccctaatctgtccggttcaaaaactattcgatacttgtaagaaagttttcgctgatggcaaatctggtaccgtcccttctcaagaaaacattgagatgcttcgagccgttttgggtaattctttgatccttttgaaattttgggtgggttagtgggttgttgaaacttcgttgatgattcattgtttaatctcttaatcagatgaaatcaagcctgaggatgttggcgtaaatcctaagatgtcgtattttcgatctacagtgaccggacgatctccgttagtgacgtatcttcacatctatgcatgtcatagattctcggtatatatcttaacgaatcttgaattggtctattctttatggtttcttcaatctcttatttggttttgttttgtttttgtgtgtaacaagatttgcattttctgtttacctccatctggtgttatccctcttcacaatcacccggagatgactgtgtttagtaagctcttgtttggtacaatgcatatcaaatcctatgattgggtccctgattctccccgtaagtatagtacatcaaccagaatttgtatttgtacatcacccggagatgactgtgattagtgttttgactatgttattgtttaacatgtgttgttgttgttgtttttggatcaatgtagagccgagttcagatactcgtttggcgaaagtgaaagtagattcggactttaccgcaccttgtgatacttctatactgtacccggctgatggagggaatatgcattgcttcaccgcgaaaacggcttgcgcggttcttgatgttattggtcctccatactctgatcccgcaggacgtcattgtacttactatttcgattatccgttctctagtttctcgggtatagttttcgaaactttttctatgatttgtgttagaatctagctactagtagtactgtagtagggttgaacataaacaccgagctgattttcataataacctgaatagggaaaaagagtttgataacaaataaaccacaccaaccagctgaatgaccttgtatatatggaagaaatactttcaaaatatgaatcaatgttgatattatttatattttgttattagtttggatttgtttcccaaaacctaaaatatcggtatcgaactgtagaaaaccaaatgctcacgcttgcctatttagtagtttgagatctttgtgttgtttttttggaatgttcagtcgatggagtcgtggttgccgaggaggagaaggaaggctatgcatggttgaaggagagggaagagaagccagaggatttaacggttactgcattgatgtatagtggaccaaccatcaaagaatgaatgtggaagcatagcagaaaaaaaaaaccctttctttttctttgttctgttagagtattttcttgatttctggttgcatataaaaagaggtttttggaagtacatagaagaacaaatctagtatttattattttatttagataacagagaacaacaagtacacctttgtcggaatgctgtagtctgtgttttggtcaaagatccttacaagttttgtcttattatagcgttttttattatatataaaaccataagctgaaatagttgtcaaaaggggatgtagctcagatggtagagcgctcgcttagcatgcgagaggtacggggatcgataccccgcatctccatttatttttccacttaagtattttaaatttcaaaaagaccactaagattttacactcttcataaaagaatcccatcagtttgaatattagcacaaaaccccctcaccaacacagaaaaggcttccatgccaaaattcatttttttttttttaacacagttaatcagcaatttttgggttaatgacatcattattatgagaaaactgaaatttcttctcaacgttttaaatcgtgagaacctcaaaacttgtggctggacaattttaaaaacagtaaattccagcaaagaaacaaaaagaattataatccccaaaactttcatttcataaactacatgtcttgtcttctcttgaggactactaagagactttgagtatttgttgaaaagcttcatgtggaatatcaacagaaccaactcgtttcattcttttcttcccttctttctgtttctctagaagcttcttcttccgagttatatctcctccataacattttgcaagaacattctttctcatcgccgagattgtgtctcttgcaatgatctttgaaccaatagcagcttgtatcattacttcaaacatttgcctctctatatagttcttaagcttctcaaccagttctttacccacacggtatgctttctgcttgtgaactatagtggctaacgcatcaactgcttgcccgttcaagagtatatcgagcttcaccagatcagatgcttggtactccgcatcctcgtagtcaaaagaagcataacctgatgttatgcttttcaactcatcgtagaaatccactactatttccctcaatggtaactggtactttaagaaaactcgttgtgcatctataaatgtgtattctagttgctgacctcttcgatcagagcagaggttgataacagctccaacgtactcacttggaaggatgatcgtggcgattaccgttggctcccaagaagctgtgactcggtatttggggtttgatggtaaggcagctggattttgcacttgtagcttgcttccatctgagtattcgaatgtgtaaggaacagtagggattgtggagattacttgtgtaccgtattcttgttcaagccgctgatgaaatacatccatgtgaagcaaaccgaggaaaccacatctgaatcccattccaagagctgtacttgtttcctttgccactgatacacttgcatcgttgcatgtcagtttctccatggcatgaccaagtgcttcgaaatcagatccatcagcaggataaacgcctgaaaacaccatatgcctcaccggcttgaaacctaggttccacaagttaaactcaagtcagcgagctttaagaagcttactggagttgcacaagacacaaaaaataaatacctggaagaggctcaacagtggttttcgttctatagatagtgtctccaatacgtgcttctttcgtggttcgcataccggttactatataaccaacttgtccagtaagaagcattcctgtagaagtaagctcaggatgcataatcccgacatctaacacttcataagactgacccgacgcagcaaacgaaaccttatctcctttactcaacattccatcaacaacagaaacatagcaaatgacacctttgtactcattaaaaaaagaatcaaacaaaagcatccgtagaggcgattcactaatcccaggaggaggaggtatccgttctataaccgcaggaagaacatgctcaagacccaaaccggttttagcagacacaagaagcacatcttctgtatcaagatcaaacatcgatttcaactgagctttaacacgctcaggatcagcagttggttgatcaatcttgttaatcacaggtacaatagtaaggttagcttcaaaagctaagtagaaattagccactgtttgtgcttgaacaccttgagccgcatcaacaactaaaagagctccttgacaagctgataaagatctagaaacctcataactaaagtcaacatgacccggtgtatcaatcaagttcagaagataaccactcgcttcttgatcttctactttgttctcatagaacatggtcgccgtctgagctttcacagtgattcctctctccctctctacctaaaaatcaaaactttattgagatatcactaaccctcattttcctctctactcaattcaaacatataacctcaaaactataatcattctcaaacattgacaatgaaagacatcaactttgaggtaaagacagtacctgcaatttgtcgagatactgaggctgaccatgacctttcttgattgtgccagtaagttccataagacgatcagccaaagtagatttcccatgatcaatatgagcaatgatggagaaatttcgaatcttttctgaaggaaacttggtcaaatcaatggtgggttctttggagctttgtctagaatcagagctgaaaccgtaagcttggtacaatccgatacatgtcggattttgtcgattggagttgagtgaattgaacaagattgataatgcttgtctcgatgattttagggttttagatgctctgtacattgaacccatttggtttttttttgcgtaatagtgagattggagctcaacaacacgaagaagttaaaattcatctctgcggtaatacgacaccgtatcagttggatttcaataaccaatgttattgttgagtggtttaaccaaaccggatttatttgctgataaattcattatcttcataactattttagcaacaaaaattttagtggttaaattgttgctcaatttagttatcgattgagtttgtggtcatgtgctcacaatatcaatgttaatgttgagtaatttaatcgaaccggattttcttttttttttgatgataagttagtttattaatttttttagttatacaaattgaatttttttcaccaaaacacaaattttaatttactattttagttctcaaaataaatcaaaaggagaaaacacaagcattatagtatagttctaatcaaaacaagaaaagaataaataaactaacaaattgttttagacaaatcaatgtcttttggattccaagcaagctagttttggcttcattacaccattagattcacctttaacattgatgcattcagcagaaggatgatcatcgtggcgagacaatgatttatgatatttcttttcttcctcttcgttttcgtcgtgaatgttaatatcgttcatgaatatatctctacatgggactgatttgctgcataggagttgcacaaagggtttcttgattgatgttccatgtatgtggttgaacattacattcttgatctccacagctttcgtctgtacatatatatgaattaaacatcaatttattatacataactcacgaaataatgtggattaattttatgaaatagtttcgaaaaatgacaaccaacctaatacttttggtaaagtactattttaaaacacttgagtagatagatattaaggactaggtactcataaatcattagaaggagaagaaaaatttacgtacatggtttttgcattgtgaatgagggcaataaaattggtcgatgatgataggtcgggttgctccatgtagttttatacgttcaaataaaacatttcgcacatgccctcttcctccctaaataatacaaacatatggaaaatgatattgtcattactttaacaacaatatataaattagggagtacaaaaacaaacaaatcagttttacctgccatgtcttgattctaaccccattagttgtttctctaaaagtacaatctcgaacaacaacattttcgaccgtttccttggttccatatcgacctaagcttccgatacttgtttaggaaaaataacgtgatcacatcacttatactaatttgaccatagttaaagttgaaataggtaaccagaccaatggaagagaagtaccttattccatgccctggaccacatgagatccgtgatatattaatgtatttcgaaccatcaccaatagatatacaatcatcacctaaaattatcaacagttaactctaacccaactaggagagacaaacatcttattcgatcttgttgtaaaaaaaaacagtataaagatcaatgatgaatcacctgtacgaatgttactatcgtatacgataacattctgagaacgttgaatgtgaatgccatcagtgttagggctatcaccatcagcggttatggtgagttgcttaacaataacccatttcgaatcttccaacgacatttgaaaatttggactgtccttcaccataatgttgcttatatgcacattactcgaatgtgatataaccacaccctaaaaaaaatttgtgcaacgacttatataaccttaaatatgagagatgattgacttaattgttcagtgattttttacatacccttggtctcttgagacatgcctataaagaaaaaaaaagttaaatgggtttagatgaatagaaaataaaataaatggtgctactgatcaacattggaaaaaatataaaaaagggtaagggcatactttttgatattgggtgcaatctagagaccaccactttgttccttgaccatcaagccatgaccatcgatataaagtccatttatatgtgcgaattcgatccactgatgacaatcatctttgttgcatttccattcatatggagattcgggagcaattaagtttccactgatctacaaacaaaaatatgaaatgtattagtattgcatatattttcaaaaatcttgtatagtaaaaaaaatagattttcaaaataataaaaaccaaaatcccctttaaaaacttgtaaatattatcaagaccttaatcttgttagtaaataaaataaatattgaatatttatatatatatatatatatatatgattatgcataccgataaaatgattttcttggatttacaagggccatgaaactcaataggttgcagaagaaatgtgtttccttcaggaatttccataattgattcagatccaatgtaattgcatgtgtcttcccatgcatctttgaaagcctgaaaccgtgattaagaaagaaatatgaattaataatttctataaatactttgaattatcaatacatgtaactagaatatataaccaaaatgaaaacaaacctttgaatcgtcagaaaatccatctccaattgctccataattaagaacattgaaaatgttgttatcattatagagagaaaaatgagactgaactgactgaaaagtgtggaagacagttaaagaaagaagaaaatttaagaacattacgaaatttgccattttcttctactcaatgaacaaagttgcacactgaacctatttaaacagaaatctcaattatatcttgctaacaatatctaatatatgattctttgttaaattgaaagattttattttatttgacggttgaaaatttagattctttgagattatgtataaagctaaaacctaacaagatatatattagtttaacaaaaaacaaaaattagttgccgaggaatttttcttttttcaaattcttatagattttatacctacactgtatgactgtatgtaacggattggatattttttaaaaacaaaatcaagtacatgtacttattataaagagaaaacaaaacaaccaaatttttcgttaaatcttcaattcaacaaacagagagtatataggagaataaactggagcatcttcaaagaagttgaaaagatatatatagtagggtttacaacttaaaaactaataataaaaaactcctcgttctgtctttagtttcttgcttctcaagttacatgccatgtcaaagcccctagaataaatattttgctaggcaattccgcagctgatggagagacatatgtaaatctctcttcaccaatatcaacatttttgatacacacaattccagcaacaatgctgcaaaaaaaacaaatatatattgccgtaaatttaacgatctcttcatccgtaacttaatcgttttcaacaaatatatatggcaataatccttttcttagcgtatcaggaggacgagagaagagtatcatcagcaaaacagagagtttactgatcactttctatattgtttactgttgcccatttatttgctagcatactccattttatacctttttatttcccaattgactgattgggttctttaaaacttaatcaaattgtgtgtttggtttcgatggtcatcacaaagaacatgacttaaactcaaatactacaaaattattactatacaagtataagaattctatataaaaacggtctatttttgcacgagaagtatgacatcataccaaatgtaagagagagtattaaaggagtcaaaaccaattaaagaggttattaccgatagccttaccatgtttccattgtaagttaccgagacaaaaagaaacctcaccgtaacacagccggcgtgaccgcctagaacagcaaggtgaattgctgagtgaccttccgtagtcaatatggcattcacattctcattaaactccgctgacacaaaacgaaagaaaaaataattaagaaaagtgaagatgtaattgttgttaatcaaagaactaaaataaagctttgagatctatttacccatcatttgggttaagccttcggtatttccgttctgaattaaagtagcaatttgcatgaggttttcgggaagatggagtagtgtcaccattttttctttctctcttgttttatctatattcttagatctctcatggttggtttgatctctactagcgaaggggtttatttatttataatggtgtgaaatcggtgggtggatgctaacttgcacggttttatctatcttcactcatgcaacttcgctttatcaaagtctaattagtattttgatcgatgaactctattaggttagaacttaaaactagaagaatatttttcaggttatatttttggcaactttcatttagactaatttgcgaagaaatgaaaaatactcttggtaactttaacgtgctattggtcagttacacgttttgttttatatttgatgacgaagtttcttttgtttaccaatttactactagttacaaagcatgaacggtccagctaataggaatctttgaaaaaataattgacttaaactgactcagctaataggatgacttaagaaagtaagtttgcatattactatacgaccaattaaagatatttttgggaacttaatttgcgaagaaattaaaaatactcttggtaactttaacgtgatattggtccgtgacaagttttgtttcgtgttgatgactaggcttcctttatctaacaacagaaatgttaccgagagtgaacaattcagctcatagtattgttctcaactcctccatctctggttaaatactgcctcaaatcttcgacgcaggatcggtccgccataaatgttctatgcaaataaaatatttatgccctctatttttttgcataatcaaaaataagaataatatataaaagttatagtaaaactttatagaacagtttttttaaaaaaatttataagcattttgtaagcaaatattgaggaaaaaacaaaattatattctttaaatatagttctatttagatttttgcctgcaaaactattcatcaaattcacgtaattgagtttttcaaacagagttgtcttaatgggtagcaaaaccaactcatttatttgattaatcaaaacaaagtttttagtttgtaatcaaagttcaaacaccttacattagaaagtttttgatttttgattttgtaatcaaagtcttagagtttaaggttttatttttcttaaatctaaaatttttactaaactaaattcattaacaagatattttattgatttaaagagattaaagaaagatagtaaataaaaagcttagcaaatataaatatataaaaaatggctataattgttttaaaaaaaaacataaaagacttaaaaacatttttataaaaatatatttctctactataatgccctaagctatgacttcacttgattgtgtaaaacgccgagcctgcctcaacgtcttaaaacatattgcttaagaaagtaagttagttagcatattactagacgaccaattaaagatattttgggatatttgcgtagtgtaatttccttaatttccttaagatatgctcattttcatcagtaagttatatctgtctgtgttgatctgtaatcaactacaagctaattaagaatggtggtgtatctagaagccaaaatatttataatcaaagctaaaaaaaaatattgtttagaatttctaaattcaaacttgttgtaagttgattctcatttttttaaaagactacaagtatataaaacaacatcttgttagttcacccactaccattttattaagtggtgtgtgaaaataatgaatgcattacacaaagaacttacgtaggcgttgcatcgatagaacgaaaaaaaaaatcggctcgtactattcaacctcgtagtcgtacgtagtatatattgacgagagaaaaattgttgggagataaatcctatatatatatactgtgtatatatactgtgtatacatacatatcttaaagatttgtacaaatacatatcttattgttggagatacttatagattttatacatacagtggattttttaaaaacaaaatcaagtacatgtacttattataaagagaaaacaaaacaaccaaatttttcgttaaatcttcaattcaacaaacagagtatataggagaataaactggagcatcttcaaagaagttgaaaagatatatgtagtagagtttacaacttaaaaataataataaaaaactccttgttctatctttagtttcttgcttctcaagttacatgccatgtcaaagtccctaggatcaatattttgctaggcaattccgcagctgatggagagacatatgtaattctctcttcactaatatcaacatttttgatacacacaaatccagcaacaatgctacaaaaaaatataaatatataattgccgcaaaattaacgatctcttcatccgtagcttaagtataatcatacaaaagttgtagatattaccttgagatgatctgatcaggttttatggcgtatgagatagcaagaactttgttcacaagatgttcgtcaattgtcacaagtgtgatcttcaaagggtcatttcctctttgatgagcagaagttgaaccactcactctaaaatcaccgattcgatatacttgcacatcactgaacttaacggtttttgtgtagacagtgagatcgttggtgactccatagaaataattctgtgcagaaatttaaagacttctgctttagtcaaaagcatataaataaacctaattattgaaatcgtcaaatcgaaaaagcctacctgaatattactgttcctcaatgttttgcgaaagtcagagctcctagagaagactccttctgacttctcaagattcaagacttgtagattcttcttgaattttagatttttcttcagatcatagacgagtttttcctcctgcaaatgacagagatcaatgaaggtcattgtaggtttcttgatttagggttaagcgagaaaaaaatatattcgatacattacttgaccaacgacaataactaaagacgcattaaacgtccttattgcatggagaagcagctgcaaatttaaaaatgataccatattagaaatcttgtagttcatagcataaatgttagttcacaaaaaaacaagagaaaaagatgctaaaatgaccgcatagccttcacgaacgataaatcccatagtgtcaatcaccatcccagaagctctagattcagcgtttgcggaaaactcttcttttaattctctggcaagttcttccacaagggttctgtacagtctaaggtttacactgaaggtacaagaaacgaaaattaggttatattaaaccctaaagaatcagaatttgaagtcaatcaccttggatttgtgagaccaaagtagtgaataagagccttatcaagaggaaacccttcaacaggatccacaagcattttgataggagcagcagcgatagttcctggtatggtaatcgagctttgaccgacattaagatcaacaaatgtcggtttccaaccatcttttacagcccaattcagaagcattttagccaatgtgctcttcccagagtctatatcccctacaatgataacccttggtccctccttcaaacaaaaccgcaattcaagttactacaagaactggaaattaatgttctttagtaagaaaaaaatttacctgtgaagatgcagaatctcttgttgaggaagtaacacgatgtctttgtacttgtagagagttgtgcagtccaagatagttcaccataggcgtctataacaaagatatatttagtaaacattatattatctgaactaagagtgagtggaaccaaaaacttacctcacatgatatatattcatttcctgtgataccatctatttcaatagttgcaccataccatgtaaaaacctgaatagtagagcaatataaatcatcaagagtataactttctatgttatctcaattcataacatcattcattacctaaagcttagatctttaaactaacccacaagtccacaagatgaattttgaagttgcgtaagtaaaaagcataccgcaaatgtcatgagaggtggaaatgtgatccaaacttcatgtggaagttcatagccgaaaatctcagccttgccatcgagcaaacggagtctgagaggtgaagtaggttgcaattcgattctgagttcgctctgtttctccaacttcactcgtcttatttgaggaccaaacatgttttgtctctatcagatttctcaagaagacaaaaagtttgatgggacttaagttcggatttaaagagttcaatttctggagaggaagatgaaaagtttctaactttgaattccatattccgatgtatcgagaattacgaagcgtcgcattcaaggaagaaagaatttatttagatagctgcggcacaaaactccattctttcgtctctctcatgtaaacggcgtcgttttagccttatgaagcaacggcgtcgttttggtatctctaatcatcatcttcatttgcttctcaaattgagaacttaagggtttaacggatttattttggtcatgaatcagagtctttgcaatagtcgttgacgttagaattcgataagtaggatcaaagttcggaattttgagtgtgtaatgagcttgaatttggcaaatcctgtatgggttcctgtaaaagctttgttatgtagaacaatcaggagaaggagaattttcactgccactgctataactagtttagccgacaaggtaaaaacttcgcttagtaatttatagcagtttctgttctttgtttgttttgttttgtctgaattgttgttgggttcttaaaaaagggggaaaaggatgagagtgagcttttggttgttgttggtggtggagcagctggagtttatggagcaattagggctaaaactctctcacctgatttgagagttttggttattgaaaaagggagttttctttctaaggttagcttctcttctttccattaactcagttagtgaaatagagagatgatttttgttcattcgttttctcgtttgttattcataggtgaagatttccggtggtggtcgatgtaatgtgacaaatgggcattgcaatgatactattgtgagtcttgttcatacatgaaagcttcaaactttatgcttgaaattgcagaatcatgaagctgctttattgcagttttgtcatgtgaagcatattggttttagtatgattttgaagttttggtaacgtaaatatcgaatctgtaagtagaatttggctgggcattatcctcgtggtcataaagagcttaaaggttctttcttttacacacatggacctgctgatactatgtcatggttttctgagcatggagtgccactaaaggttgtgaatttgcatcatatttgtcattagagatgtttatcttactccgtatctttcgcctaattcatatctcttgacagactgaagatgatggaagagtattccctgttagtgataattcattatctgtagttgattgtctcttaaatgaagcaaacattagaggaggtatcatatataacacatctattgaaatacatattcttctgaactcttgtgtctcccattcatatatcctctcaatttccttaaacagttaggcttgagagaggaaagtctgtgttagctgcttctattaaacccgatggaaagttccttgttaaagttgggaagcaaagtgctgacacgtctgaatctatagaagctacatatcttctgattgcaactggaagtagccaaaaggttatacagtaaccccatttaaagaatacgaattctttattttcaaagctgttgggttctcatgttttcctaagatggttttgcttaattatgttacagggtcactctttagccactaaatttggtcattccattgtagatccagtaccgagcttattcacttttaagatcaatgatccattgctgaccgagttagcaggggtaaattttcctctaaaaccagaattcgttagcacgaatttatttttacgagcttcgtatgtgacattgtttatttctatttcccagattagtttctcgaaagtccaagccaaactgaaattagataatccatgcccggatttgtctaacctcgtgcaggtgtgcatcttttccccccttgctattcttactttgtttaaaatcctttatcataaggaaaagttcatatatattactttgttttctgtcaagattggtcctatgcttgtaacacattggggacttagtggaccggttattcttcgactctctgcatggggtgcacggtacctctttagttctaagtacaaaggtctgaatctttcatttctaacgagagaatttttgttcctgttaactcgctagactttagaacatattcaatttggctgcagggcatcttattgtcgacttcataccggatattaacatcgaaactgctaaatctgtactcaaagaacacaagctgcagttttcagtaacaacatttcatacttttactctttttgttctctttgtttcttgtctcgtttgttgaaaagtttgagcattgtttaatgcagaagcacaaagtgtccaattcctatcctcctcaatttggtcttgtcaatagattctggagatacattctagaccgcgaggttctgacaaaaccttctttcatagcttttctatattgtaaatcctctcaatcttacgtgaatgtcattgattgtcttcatgttcatgcagggttcttcaaaggacaccttatgggcttcattgtctaataactccttgagctctatttctgatcttcttaaacattgtacatttcaagtcactggaaaggtataacatgaaacattttatcacttttcatcaaactactcaagataatgatgatggtgatgatattgtgtaacgttatgttgctgcaaaagggtcaatacaaagatgagtttgtgacagcaggaggagttcctttatccgaggttccgtcttttgaaacttaaaaccaatcctttcttattgcggttcttactaaatctgattttaacgtgtctcttactgtttcaaggtttctttgaagacaatggagagcaaattggttccaaatcttttctttgcgggagaagtaagcattgcaacaatgtttcaacaattcatttgtgtgatttagtaaaacaatgcatttggaacatggacacatgacatgtggaagtaggcatccatgtacacacgcacacacatgacatgataaatgtaacatatctttacttgcatttgtgtattcaggtactaaatgtagatggagttacaggaggattcaatttccaggtgaacttttagttatagcattgaaatatcttttactcaaatgtattaaacgaaacaacaaaaaccatatcttttactttcctaaatgaaatttcacacctgcagaatgcttggtcaggtggttatatcgcaggcacaaacatcggcgaattagcaagtagtagcagaataagttcgaaagaaagaaaagttactataggattgtagtttgcttataagaaaagtactgtcaacattttttttctttttgtcaaaatacagtttctatttatctatgtaggagcattatcggacattattattgtagctatgatatggttgcaacacgcacaagctgaaaaggtgtcaactttgtatcataaaccactgaaagcagagtctaagcatttcaacaaaccatttcaatcaatcatggcatcacacagaaggtcttacattagcagagagtatagaacatcacattccccataaacataccatttattattgagtttacacaagactattggttaaggcgttaacaatgctcattatgctctgagtttgctaactttcttctcaagttcgtcctttttggcaccaatgattctttcaatttctttaccccttttcaccagcacaaaggtaggcattgccgtcacattaaactctttagccacatcctgaaaacattagtcatgcaataaatttaaaattgtttctcagtacaaaatccaataactgttgaaacagaagcagctatgtgaacccatttcaaccaacttctcatctatatatcagaattcgagtgattagcagttgtaccttaacataatctaacttctactcataatcagagaaaaacagagaagtatggatcagtcaaaacaagagacagagacacaaaagttgaaactttgattggcaaagtataaccatgacagagatgcaccaagtttagatatttttctcattacaaaacaccaaatctcatgttatatcagaactagattgatctgcacttatgtaccataaagctatccaatttcttctcacaacactccaatggaggaattttaggtaaaacaaaacagtaaactatagtctatggatcaatcagagacaaataaagtcagaaacttttgatagcattacaaaaaaaagatgaagactttatgacagagatacttacaggaagttcatcaacatctaatttgacgaaatcaacatcattgaacttatcagccatggcatgaatcgcaggctcaatcatcctacatggtccgcaccatgaggccgagaaatcaaccaccagctttattattcacagaaaccaaatcagttaaattccattgaaacacgaaatcgattgaatcgaatcgagagtctgagagacgttaccagtttgtttgattctttgatctcgttgaaatgaagttgccaccgagcggaagagctaaactttaggacgcgacttggctcagattcggtccctgcagctgttgcatcttctccacttccaaacacagttgataaagctcctcccattatcgtctctcgtctcgcttctctctctgattgcgtttaagaacgaccctgctttctttggtcaacgatcgtgtcgtttaatattcaaacatcgtgccgtttctaccactagagctggtcaactatgggcatgcccacctcatttagcccatttaaaatctaccccatttaaaattatttaattttaagatttataaaattgcccatttaaactcatatacccatttagatataaattaaaaaagcaatttaagtgactcggaacacaaaacaactactaaatcaagaatgtgtctaaccttttataaaacaaactaaaatcaacacttaccatcaaatttcaaattcttaccaatcgaaagacactaatatctataaatcaaactcaaacatgttcaagttttcaaacacaataagtttcttattcttcttagttccaaaacatgttgcttcttctacatttgtttcatggtgcacttgaattttctgatcttgaagattctgctcgggtactaattgcaatcatccttgcatattggttgcaaatcatcaatgtcttttagggtacctacaattcaaagtatgaattcgttttaaaacatgatcactgcaagaaacctcgttttaaaacataactacacaatatttttaccttcatattccgcaaatcctcgcaaccaattatgagtacaaagcagagtctgaaagttcttcggaagcaaccagttcatgtatggactcgagacccgtgctctgatgctaaaagcagactcaaatgctactgtcgtgataggaatgctaagtatgtcatgcaccatagatgctaagttaccaaatctgtgttggttttctttccaatagctcaaaacatccaaatttcgaaaagcctttctatgtaaccttggctcatccaaataaacatctaattgcgtcttcatgttgtccacatcactttctaagcttctttctagctcaaaaaggattacaatatcattttggctatgggtgcaatcttggatcctagatgaagttgcagattcttgaaaaaacttataagcttatgagtatgtggatctttctacttctaagtcgaaagctaaagaactcaaaaatgtattgaaagaactctacaaagattatgagaaaaggaagttggcaagtttatgtggagcttttgtcggctctctcaactatgattcgcttgtggagctttttttgactctctcaatattaatgtgaaaaataaagaaccggaccaaactgaaactgtataatcaaatcgaaccaaaccgaaatattaataccaaagatttggattgtagctctttcgattttagattttgttgtaagtatggtttttttaagagagaatgtaaaatttattcaatctttttaaaaatgcatcagtttacaaatgtatcaaactactgttttcattttagtgtcgcaaaaaattagtcgttaaagcatagtataacacataatgtgttattgcatttgaaaatttttatttgttggcaaaatgttcaccaagttgtattttgttgtggagcattcataagctttggaaaaaagtatgaaaaatttaggagataaacaattttgttaagaattaaaagataaatttgtacaaagatttcatttgatgaattacggatcaaattatttaggtttcagtttataggacctgaatcaaaaataattttaatttaagtaaaactaaattgagctgaaaaataatagagtttattaaaaatatatattttttagtttttttatctattatatcatcattagaaatatttgatctaatcctattatgaagtagtttacctacaataataatgtttaaaacgataaacaaaaaaaaaaaattgaacataactatcataaattgggttaattggtattgttccgtcagtcagcttaattagtattgctcagtcatattaaacgttacaaagtccggatcgaattctgaccgaattcaaacggtaaataaatcgaacttacttattacatggatttaaaagcaacccactataaagcccagtggggttttagaacccaaataggaaaacgacgtcatatcatatgtaaatctcacatcactcacgtcgacaaatcggcatgaccaaacaacggcagagttctctcgattctcatcaccggtgaaccaaaaggtttagggttttagcttcatccttctgcttcaaagcttcaatcttttctctcgattctcatttccaatttcataactgattcacaaatgcaaagcttcgtatacccataaagttgaatttgtcgtctgcaatgtctcagtcactggttcgagcaatctcagctcggaagaatcaattcagtcttgttttttactatagatgtctttattctaagctattgcattcccaagatcagattattgcttccaattgctccaatttttcatctttaggtatataaatctcatttctttcaatgtctgcttatatgaatccaaatttgttccttacgttttacttctttctccttcaggattcaattcaactgttagacatagaagtcatcagaataggttttgtagtaatttgatctcagacttgaatctagttcgatccacaaatgggtttgccacggtttctgatgaatcaaatgttgacaatggtgagaaacttgtggataagaagccaaagattttttacaagaaaccaattgatttcaccaaaatagatgccaatttactacctacggtgatgcttatgggcaggccaaatgttgggaagtctgctttgtataatcggttagtttcttctgtgtacgtttaagatatgtgtcataaggtttgatattattgtggatttagtcagttatgttgttgtttagattgatccggaggagggaggctcttgtttacaacactcctgatgatcatgtgacaagggatataagagaagggattgcaaagttaggtgatttgaggttcaatgtgttggactctgctggtatagagactgaggtttcttcgggtactattcttggtagaactacagcaatgacggctaatgtgcttgcaaggactcagtttgcggttcttattatcgacgtgaggtgagattttaatcccgagttgcagcaaactaatatgatgcgagtgttcttttttccttatagattgttgtcttgttcatgtttttgatagggctgggttgcatccactagatttagaggttgggaaatggttgaggaagcatgctccacagattaagcccattgtggttatgaataaatctgaatcaatcggctctcttgatgaagttgcttcagaggcccttgcactaggttttggcgagcctatagctatttcagccgagactggacttggtatgaccacactttatgaagttctgcgccctctactagaggattacacggtcgaaatgttaaacggtaatatacccgtatcaagataatcatacctcccttaaatttcttcttcactgaacctcgcagtcttataatagatataggcagtcaagatgatgttctgaccgatgagaatctctctgatgaaatcgacgagtccaagttgccattgcagttagctatcgtaggtaagcctaatgttgggaagtcaaccttgctcaatgcattgttggaagaagagcgtgtattagtgggtccagaagctggcctcacaagagatgctgtgagagttcagtttgagtttcagggtaggaccgtttatctggtaagattagaattcttatttttcttatactctgactccaactattattctcttgatgttagacagagaagtggaaccagcgttcaatattattcactttgtttgatgtttataccggatatctgttaaggttgatactgctgggtggttggagagaacagagcgagacaaaggaccagcatctttgagtatcatgcaatcaagaaagagtcttatgcgggcacatgttatcgcgttagttctcgatgctgaagaggtttgtatacacacatactctcgtgattcatgttttttttttcctgcagaactgtgaaaacagaagaaagaaaatcaagagatgctcacgctatgttttgtatttgcaatatccagatcataaaagctaaatgtagtatgacacattcagaagtagttatcgctagacgtgctgtagaagaaggacgtggtctagtcgttatcgttaacaaaatggatcgtctaagaggtagagagaactctgagatgtacaagaagatcaaagaagctgttcccattgaaattcagacagttattcctcaggtaataataaaaattgcatcttttattaattctcatttcttcttttgccattcttcgtatttcccggtgatggaaacataatatttgcttgcagataactggaataccagttgtgtttatctctgcattagagggaagaggacgtatggaagtaatgaaagaagtcactgatacatacaagagatggtgttcaagactttccacaggccgcctcaatcgctggttgcgtaaggtttgtactttaaatgttacagactatagtatatacaacaaaacatatgacatcattatttgcttaatcgttttttgtgtgtgttggcgtaggttatgagccggcattcatggaaagacacggcttcacagccaaagatcaagttctttactcaagtgaaagctcgaccgccgacttttgtagcgtttgtgagcggtaaaacgcagttattggaaagcgacataaggtttctgactagatcattgaaggaagattttgatttaggcgggactcctattcgaatcatacagcgggttattcctcgtgcaccaccctccggtacaggtggtggtggaagcggaaacagctcgagtcgagtagtgcaaagaaccacctcagacaaacggactctctcggcctaagaacccattacaagtgaagaaattttccctacattaactagtttgtgtcccgttttgtatgatcatacttaaatacatctttttcacctatacacattcgaaaatctaaaatagttggatggagtttaaccttaaacttcattagtgtccattaggtacaattaatagcagtaatataaagaatctataatattgtatagtacacgaaaaatatgtcatcgtatgcaaaatatttggtcatagaaaaacaaaattttaactaagaaatatgtatatagattcactttttatcacgtagatcattgaaatagtcttcgtaagctttgataggaatacgagcatccatccacgaaatcttcaacatcttacgttgtgagtccaaactcatccacgagactagactcggtaaggttacaatggctccaatcatggctatgactttcgttgcgatatcgtaaaacaatgtccagttctcatctttgttatctttctcctggtcgttgctcatactgattacaaagatctaacttcttctgctctcctttttttttttttttggttgtgtatgtgttttgatttataatttcaaggttgctaatgtgacgcgacctttactattatttattgggatctctgaagacagtcccgaaaaggaaataatataatttgacaatatcaaaaaaggaaacatttaacaaagaatctttcattaattaatttcgagcaattgtgtcaacaataaaaattcataatcatcttctgacatgactttaatgtataggaagctcatgatggagaaagcaaaggcaattaattacactatcggacttgtccaagattgcttagcattttttttgcacagagcttgaagattgtttatctctatgacgttttgtttacttggttatgttttttattttcagtgcggtgacatcatcccttgttgttgggatcaaataattgaattgaggatgatgttctgttctttcttgtttttaaagtatggagaaagacacaagtttgaaatcaaggtcagctgatttctttgacgccaataattcattctgtattattttattggctttaaaccaatttgcatattagatttattaaaagattctgctagttgtctgcttaaaaagtctccatttatttaaaagttctaatcagttcttgtctggggctttggtcttccctttgatttcttggtaagagttccattcctgtggaatctgtaaacagaaatctctatgagctatcttttttttttccagattgttttcatcggtagatgctagactcaaaacaactgattctttgttgttgaaagaagaatgggttctctctgttctatagccatgtttctttcttttcttctgttgtttcttgccaaaaaatccttgtcacatcctttatgtaatgatttgagtaggtggctctttttcttttctcttaaggtttagatagatgactctgtgtgtttgtgttgtttcttttctgatttttggaattgtttggtcagctgcaccgtttaatctgaagcaaccgctaggtttttgtcaattcaatggaagtgtatgctgtaactccctggaagacttgaagttgcagagacagtttaaagcattcaatgtatctggcagatgttctccacttctcaaatcattactttgctcggtaaggcaaaaacatatcaaaaacataatgtgattagattacttggatgctgtggttttgttcgtgatattttagaacctttctagcaatcagttgatgattcccttctgtggttgcagaagtgtgatcctttcgcagcagagcttttccgcgttgagtcagaatctagacaagttcctgtgctctgcaactccacagtttcttctagtaaatcaacacaatcgctagccgacattgatttctgtgccacattttggaatgaatgccagagtctctctgtaaccaacactccgtttgcatctcaagctggagatggaggcaacatcacttccacaatatctgaaatatggaaatcaagtaatgacttctgcaagatttttggtggagcttcagatgaatcctctgtgtgcttcaatggtcaggaagtttcatttaacgtttcaaaagttactggtccatcatctccttcaggcatatgcatcgagaagattggaaatgggtcttatcttaacatggtacctcatcctgatggttctaatcgtgtctttctgtctgatcaacccgggaagatatacttggtgacagttccagctcaaggatcaggagaacttttgaaaatagatgaaactaacccgtttcttgatcttactgaagaagtgcactttgatgctgagcttggtctcctaggaatagctttccatcctgacttcttgaaaaacggaagattctttgcttctttcaactgcgatagagttaagtggcccgaatgttctggaaaatgcgcgtgcaactcagatattgactgtgaccctgcaaagctagattctgataatggagcaactccatgtcaataccatagtgtcatatcagaattctttaccaatggtattttaaacaatctcacctttgtatgtatttttctttttggatgttgctgagacgttattgatatgtttcagggacgtatgttagaccggtggaggtaagaagaatctttacaatgggtcttcctttttcatcgcatcacggtggacagatcttgttcggacctaaagatgggtacttgtatttcatgatgggagatggaggaagtaaaggagacccatacaactttgcacagaacaagaaatcattgcttgggaagatcatgagacttgatgttaataatgttcttggtaatatgttttttctatacagctgaagcatactttacaatgaacatgagatttgattttggttcttctttcagatgcaaaagcgatgaatgagtttcagctatggggaaactattctataccaaaggacaatccgttttctcaagataagaatctgctgcctgaaatatgggccatgggagtaagaaatccatggcgatgcagttttgattcagagaggccgtcttatttcctttgcgcagatgttggagaggtataaccaaacctgaaaccaacatttttgatctatgactctcaatgaacatttccttatatattgagtttgcatgcaggaccaatatgaagaagttgatatgattactaagggaggaaactatggttggcattactacgagggaactttgccatttcatccctcgagttcttctaatatcagcaactcaacaacaaagattgaaaatccgatcttcccggtaatgtggtacaaccattcagacataaaccaacaagaaggatcatcagcatcaataactggcggatacttttaccgttcctccactgatccatgcctttatggaacgtatgttcggctctttcctcttcttctctttatttaccataccagtattgtccatcaagaataattcctctgtttgtgttttaggtatctctttgcagacttgtacgctggaatgatttttggtggagctgaaactccagttggtagtggaaacttcacgagctctcatattccgttacaatgcgcttcggattcgccaatcccttgctcatctgaaacagaaccttcctcttcttcgtctccaccaattggctttgtattctcctttggagaagacgacaataaagacatatacttacttgcaagcactggtgtttacagaatcgttggcccgagccgctgtaacttccattgctctcttgaaaacacaacgtcctcacctccttcaaaacagcctgatcgttctccaccgtcttcgtcattttctaaaaaactacacaacattggtactcttgttgtaaattacttagcttggtgtgttcttttggtagttatatagagaaaaaagaacatgttcgtacagaaacagaagcacatatttaacgtaattctattgagacaaaggatgtgaagtgtcatacatcttaacaacaaaggaggcggcataacgagagtaacattggctgcgtcacgggcgagaagaacgattattggaaacaacaatgaatgtacatagaatcttgggagctgatttcgaatagatcaacctcaacactgttgcatggaacagattcatccggattgtttactcgagaaagcacaagaagaattatatgacattattcaaccaggaaatggctttaagattcctcgttctctcatccgattcatgactcttgaagcatcgtttagtttatctgctctctcatacaaagccgccacaaccaaatgcaactccttgctattgacattaggatcagattctaatctctgaaacaacgactcaaccatctcaaaatctttcttcgatgagtataaactcagcatttggaaatgaacttcatcagggaaaacacatccttcctcttgcatttctctgtaaaccgtgtctgctttttcaaactctctttgtttcccgtacgcgttcaacaccatagctatcacattcgaatccggaaagtaaccagcggttctcattttctcaaacacttcgatgacatttacgtatctttggtttcttgagtaaagattgatcatacagccaaatactgatatgtcttttacctccccggattcaaaggcttgacgaaaaacccatgtcgcctcttccgttctcccagctttagccagaatggtgatagcggtttcccgaggaatattatccgggagctttaactcgtgaagcagacgtttagcatgacccattagaccaactctttcataagccacaatcatggtttgatacagaacttgatcgatttccacaccagagctcctcagcttctgaaacagtgtcgcagctcggtccaatttcccagcttttccccatattgatataatagttgagtaggtaatggcattaggttcaattcctcggctctgcatctcttgaacaagattcgtggccttttcgtgctccatagttttcccatagatcttaatcatcgtattgtaagtaacaacgttctgttcaatgtctttcctctgcatcaacctgaaaagatgaatcgcttcaccgaaaagctcagcctcaccgtaaacacgaaggatagtattgtagctaacaacattaggttcaatatccattttcctcaaactccaaaacaacctatcagcttctttaaccatgtcaagctgaccataaacatcaatcattatattacaagtcgtgagatccaacgcacaattcacctctttcatctctgcgaaaaccgataaagcttctaaaaacttgtgattctctacataaacactcaaaagagtagagtaactaactgtatttggtaagacaccagcttcattcatctcctttataagcaaccgcgcctctctaaacaatttggcctttccataaacattgatcatcgaattatacgcaacaagatcaggcgtaataccagacctcttcaacctcgagaaaatcgagatagccttagagtaatcacacagcctcctagaaagctcaatgaggttgctatacaaaacaaggtcaccagaaacacggtcttgttccatcttttgaagccaagacaaagcagaatcaaacataccctctttaccaaacgaggtaattagcgttgaataagtatacctatcaggggcaagagctctctgacgcatttcgtcgaacagtccgtgtgcaatatcaaactgcttagctctcaacacatttcgaagaacaacattgtaggcgaacacagaaggtgtgtatttggcttcctcatgaacccaatcgagcaatgccaatgatctctgccaatcattttctcgagaaagaagagagaccatgaaccgtatagataattgtctgtctttgtaagttgaaagcaaagaaaaaagctctttttcgttctgggtctggtgaattgaagctaaaagctcgtccatatcgacgttgtggtcgagaaaagcagatctttgatacctccgatgtttccttaaggcctgaaacgacgacgtagtgttcttctccggttgttttctccatacctttttgttttgtgtggattctgaagaagaagaagcagagactgtgaagatgagattgcgttgtctagcttcaggaatggtggagaagggtatcgaagtgtagatatgaggtctggttaagggtaataatggaagagaaagtgaagaagatgaagcaatttctatgtacatcttacacaaaggatttttttaaaaacaaaagtacgttaaattttagtttccagcctcatcgacagtctatttataagtaatatatcagagttgagagtcagcaaaatttaagctcatctctatctctcaaaagcaaagtaaagcttaaccaatggagataaggtattttcatatccgtagttacgtacaattcgtaaaatgtgttttcgtacctaaatatatttgtagagtaaactataacccaaaccaaaaaaatatttaaatttcatatctaaaatttgtgcaaaaacaagagtcaaattaattagtgttagccaacattgttacagtgctaagttaagcgaacacatatatgatgatatgtctttaaaagatatgtagactcgaacctgtaagttatagcttttaaataagtatctaataccgatttatccgacaaccttctccgggttatacacaataaaacaaatttataaatcttaaatatctggtatcaattatcagttcttatttacggaccaaatttcacgctaaaatgaaaatctactattgataaattcgtggaaaagatcaaatcagaagttaagaacaatgacaagactcatttagattcactgctttatgtattttgttagctatgtcttttgaaatcgaaatggaagaagagtctattgagaagatgtatcaaatgatggcggaaattttaattgttgttgatcctacatcaaaatcctagaatttgattattttttccaattcacaacgacattcttttgttaatctgaaaacacaacacacttaaggtatataaactaaaacgtttgggtaaatctcgatgaagattatgagataaaaatggttatgtacctcctttaaaagcaaagatctaaaaccaacatttactctaataaaaattcagataataattgtaaaagtaacagaatgtactttcctaacatgtatacaaccggatatccatcattgtctgaaatggacacacaccctcgaaagtctaaattagttatcactggttacttctctatttgtgtctaacgaataaagtccttggttgacttattatgtgttccaagtttatgggctttatagtggcccatcacatagattccagatttcattttatttcctacctactaagatctgatctggttttaatgctcttgaccagtagtaatctttctcttttcgttatttccttcttcttcagttcctccttcttcaatctctctattctcttactaacgttatttcttcaatctcattgatcaaaaaaaaccaaaaccctaatctgcaaaaatctcaatttcctccaaaagtttcagtttttaaaaatgggttttcttcttttgtaacgaaaaaatgtgtcaaactttgaattgaccatttttttttataaggattcgatgaagaaattgagaagctattactcaaatgtgagacatcatcagaatcaccatcatcatcaccatcatcatagcaacattgtttcttcagagaggaaatggatatttttccctctattgattggttcaatcttcgctttgttcttactcttcctcacaacaaccctaacttcaccaaccggaggagtccgatttctcccttttacccgacccgttttgttaaccggatctggttcatcagctttcgttgaatccaaaatcaaacctcaacaaatctcatcactcccgtcgccaccgcgttttgcttacttgatttctggatccgccggcgacgggaaatctctccggcgaactcttttggctctttaccatccgaataatcggtatgttgttcatttagatagagaatcttcgcgtgaggagagagaggagcttcatggatatatcaaaaactcgtctttgtttcgaaggtttatgaatgttcatatgattgagaaagctaatcttgtcacgtatcgtggacctactatggttgccaatacacttcacgccgctgcgattttgcttagagaaggagctgattgggattggtttatcaatcttagctcttctgactatcctttagtgactcaagatggtgaggtttctgaggaattgtttgagaaaaattgaaacttttagttatgattgttcactaaagatttgacctttttgtgtgtcagatttgttgcatatcttttcgcatttgccgcgggatttgaacttcattgatcatactagtaacattggatggaaagcgtaagaagagttttagagtttttgttttctgtgtcttttgtttcgtatagtagaaggaactctgattttgttgttgttttgatctggtttcttttagatcacaaagagcaaaaccggtgattatagatcctggactgtatttgaacaagaaatctgatgttttttgggttacgcaaagacggagcatcccaacagcattcaagcttttcacaggtgcttgatccctctaaagcctactcggtttgttacactataatcatctctgaaattgctatgatttgattcatgtttagttggatgaaacactgactcatcatacttagattgctaggaaaatctttataatctctgagcaattcacagacttgttttgattggttgtctctatgtagctgtttagttcggtcggtgcttctcagatttgctccatttctcattggttgaacaacgtggaatcattatgcttagattagaacatttgataagatctgcaatattatactaagaagttggttttaagttttgcctttgattgttgggaagacttttcttcagagtctatgattctcacatcgttacaatttcagattctctttaactaacatgtgattcttgggaacaggctctgcttggatggcgttatctcggccattcgtcgactattgtatatggggttgggataatctacctcgtacggtcttaatgtattactcgaattttctctcttctccagaaggatattttcacactgttctctgcaacgctgaggaattcagaaacacaacggtaaatagcgacctgcacttcatatcgtgggacaatccgcctaagcagcatccacaccatctcactcttacagacatgaccaaaatggtaaatagcaatgccccgtttgctagaaagttcagaagagaagatcctgtccttgacaagatcgatgatgagctccttaacagaggtcctgggatgataacacctggcggttggtgcattggaagccatgagaatgggagtgacccttgtgctgttattggtgatactgatgttatcaggcctggtccaggcgctagacggctcgagaatctggtaacttcgttattatccactgagaatttccgatcaaaacagtgtaagtgatctgatatatctagagaacgacatcacatagagatggaatgtagcagccttgattattggggttagatgtgatttaggatctgatagaaatccctcttttagtcaagaatataagtgaagaaatacagaacaattaggctatatgatgtgggaagtatttgtcttgttgctccacacaacatgccttaaggtcttgttgtagttctcagattggaattttgagattttgtactctgctgttttaaagttagtttcttcctttcaacttcttattttgtagttaagttaaacccaaacattgcattcatgcactagtaaaaagaaacataagaagcattttaagctcatagaacaaaattgcgtcaaacagtaaaaatcatcaaccaactatttgtacttgttagttgttcccatcagttttacaatttcaagatcaaaaccggatattgaatacaccggtttgatatctttattggttttctttcccactccactgacttgtctccttagatatacacatgttaagatttttgaggaattcttttgttcatctagaaacttcgtctcaacgttttgatgatcagcactaacaatacgaccacaatgtttaataaaagaagaaagttttgaaggaaaaagttttcatattggaaaaccatacctttcaaaactttctatctgtttatcttcatgcaagcaagtcattttaaagatagattttgaagtttaacctcatagtgctaggattcagacaaatatggattgaagtataaccagattagattacaccttaagacaaaagaagcaaattcatacaaattcaagaccccgtagtgctaggttttgtttgtactttgtaaatactaaattctaatgatgctatttatgtagaacatttaccagtttaacatatatttggtttattaattttagaaaaaagttaaggatgcaaatgacgatagactttttttttttgggtagaatgacaatagacttattcttaacacaaaagttctgtatctaaaataaattcacaaatatgaaaataattttattctattctatatgaaatttttatatgtacaaaatatactcccaatatagaaatataagtttagttttcaatatacctttttcatgatctaaatcctatcaaattcattatttttaattgtcaaattctataataaattgtataattgtatcctaaatttgaaatcaactttgaattaactatgttaacttaaattgaaaccacagtcaaacaaatatgtttttcaacaactcttcttcaataacttcccaaacattgagtcaacataatattgaaactttgtcactaacatattatggtagagagttaaaataattacctaacaatacagtcaaatacttttaaagaattaatcactattactgtatggtagaagattaaatgaaactataaatactagtcgtttttcatctattgttgtacaagatttgcggcgccgcattttctacttaacttaatcaaaccgggattcgagtgtcaacactatggagtctgcattggtagtttataaggtattaaaaccctaatctaattatataggtaaattatgcatacattcatttgttttgttttatggtgcttttatctaattatactatagatttgtgattgtttttaatatattttaataattttgttaatatgatttcttttgctatataatgaaatggaatcaaaatattctaggataccttgatccatatccaaaaaacaactgtccatataaaatgcttttgtatgcatccatggaaaatagcttaaaaatcaatataaacctaaaatatataattttaaataagttttctcaaaataatttttcataaatcttttcgaacataattatcatagttattctaattttcaaaataaagtttattttatagatactttgaggtattctttgatatacaaaattagatttggatggatccacttaaacaggtttttaaattaacatactctgatccgcatcaaagaatgcatagaacttatttttttggagcagataaatcttggattggatatcagatccctagtattttttttcaagcattatggatgacatcaattgctttgacttgctaaaacctaaaaagatatgtgtgcttttaaaagaaattcattctcctaggaattccatttttagaataaattagccatcaacctaatatcacacaccaacacatatatttgtatggatttgagattttgatacttcacattctgtagacaccgtcaaatgaggttcaagaagaaatcaattcattgaggtggaaacgttggacactttcagaggatttgaaactaaaagagcttgtggctgtgtatggtcctcaaaaatggccgcacattggaaagcaaatgcaaggcagatcaggttagaaatgtgctttcgtttttttttacttttttttccaaagattaatctttttcttcgtttttgtgtgttgaaggtaagtcttgtagatcaaggtggtataaccatttggatccaaggattaggaatgatgtttttagtgacgaggaagaaaaattgctaatcaaagcttacaacgaatggggttgcaaatggtctaagattgctaggcttttccctggaagaacagacagacaaatgcagagactatggcgattggtcatgaaaacaaaattggagaggccataaacttctactcatgaactaactgcaaatgacaaaatagaaggcgagagaaacattcaatgtttttttttcttttttttttgggtctctttgaactaacgacctcatagattctgtgttagggtttgtacgtgataaaagtacaaagatgccacaagaggaaaccactcacctcgaagctaagtatcgcaacgaaacaatgaattacttagctcatcaacgtcgcttctataacatccctaaaggtttcttggcaatgtccacaccgcctgtctccaactctcaaccatcatcatcatcatcatcaccatcattaccatccaaacccgaagatgcaaaggccaatatacccgcaaagtatatagactttctcgggttaggagattctgaaaagaaaaagaagaaactactatagaacttcttgattgtaaccttattacatataatgtggaatctgtaaaatatcaacataacaatgttgtatttttacaagcaataaaactcaatttgtgcttctttaattatttttcgaatttccaggtttagaagattaaaaatatatgtccattgtaaatcactgagcttcactataaaactgaaattttaagaactaagaaaaataatctaatgctataatagagatattcataatctcgaaagttcgtaaagttcagatattcataatctctattataccatcagattatttttcttagttctaatttattccaagagtagtgataagatagatacatagatccttaacagagatcttgtataataaattgaaagtcctgaccaaatttttcaaatgaaaacggtcaggacttggccttgaaagcgggctcgtaatcgatgttactccttgcaacttggcctagatggcttagtcacgatccgttgtaactagagttgtaatgttgtttttgaccttttgtagtttgctttgatatgcgtctatatttgtaattttgtcaaaaactctaaaatagtataaaatttcatctttcaccaaaagaaaaaaaaaatcactacatgcatgcatgtcaaaaaaataaaaaaaaagagtaggtttaaatcaatacatcagtacatttacatgcatgaagtatcaaaaatctaattaatactccttaatgactaaatgtggaatttccagtttttcctagttatacccgaaaacacatttaaatcaatacatcagtacatctacatgcatgaagtttaatctaattaatactccttaatgactaaatgtagaatttccagtttttcctagttatacccgaaaacacatttggtgactctgaagaggcagagcagagaagccttgcaccctaagaaagagccttgattcgccgtttacggtttccaaattggaaaatgctttgtagaacaagaagaaacttaaacgcgtcaccaccatgcattaattcaacgataaccgttcctatcacttaattgggtagcaaacatagttctaggcgaagccaagctttcctcttagaatcctagagtagattgtagtattcattattcaaagaaataaggggaaaaatagcagtaaattatatatacatttattattgagattttagttaatgacattgcaaaacatcaccgagattggaatctagcaaccgaaattcataaattgtattagatgtgatttaggatcttatagtatccttcatcactgctaatctatatagctgtggcctgtgggaagtatattttttcttgtttctctacacagaattatcagactggaatttcgagatttttgtgtccctatgtgaaaactttgccgttgcatttcttactttttcgtttctatgttcttttattattagagaagggaaataacatttgcatatgggtttaagactttaagttcaccaaataaattaagctaaataataatcatcaaccaaatattttgaacttgcttttcttcttctcttgttggctcctctgatattggttctcttcctctagagcgctgattagaaggttcaaggatttatcaacgtcgatttgttggtttctggccataagattttccgcgacatcagctggagaaatctttgtttcctccaacagagccttgatttcgctaaacaagggatgagcatcatcaccatcaagatcaaggtaattcttggcaagaatcttgaacgcttcgtaagtgcagtaagacaactcaatgtgcatatccattcttcctctcctaatcaaagctgggtcaagcttctccaagtggtttgttgtgaatacaacaatcctttcttgtccacaagctgaccaaataccatcaatgaagttgagaagacctgagagtgtaaccgagttttcgtctttatcttcttttccatatctttcccttgagttgctctctttcttgattctgttacttgtgaaatctgctgagcaatctatgtcttcaatcacaataatagacttgctggatgttgctgtaagcagttttttcaactccgagttgttctttaccgccgtaagttcgagatcatagatgttatagtttagaagattagccatagctgagatcatggtcgacttaccggttcctggtggtccgtacaacaaataacctctcttccaagctttccctatcttcttgtaatactccttaccattactaaaggcgatgaggtcattcacgatctcttctttcttctttggatccatagctagtgtctgaaaactcgcggggtgctcaaattcaatagatctccacatattttggccaaaaacccattgcgtacttaagttattcgtgaaaagccttgtttgcttgttcttgactataatagatttcccttcttcaaccacatattttatatatgaattggttataagggtccttgcgcggttgtgaaaagtgagcttataatatcggtttccatcattatcaaccactctctcccaccagacattagctcctttgtactcgtctctgactttagcctcgtttcgtttcaataccaaacctttgctttctttcacttggcttcctctaagatgtttggtcttgtcggttgcttttgagtcaaggtaggtatcaatggccgagaaagcttggttgaaactgtactcatcgctttccggaaagtggatctcgacataaggagagaagaggttggtgaaatgatcggaaactctttgagcaaaacagagttgttggaatgaagacaaaagaaactctttgattgtgatcttcaagtggtcagggaagatttgttgtattgttgcccaaagaaagaacaaacttgccatgcttgagcctatacttccaaatgaatcgcccatcatcatcatttttacatacaaaacacaaattttcttactttctttttcttctttctctgtttggtgtagtatgctttttctttttttctgttttgggtttagcactgagcttatttataaacaagtgatcaagtcggtgagaagcgactaacccttacaaagtcttgtaaaatatatgataaaagtcttgcgtagttaaactttttgcctctttcgacgttggtgccaatattaaacagtgtaaagacccaacgcgttttaactttccacgaataggattattttaggatcaaagtctacggaagtagataatggagaaaatgataaactaaaagaccagtcttaaaacctttcgtgtagcgaacacaacactagaccaaaattgactcaaattataatttaacatatttgatcaaatgttaactcgggtacacacatatatacaaacaacacattatctgattttgttattatttatgtcgttttattttaaaaagataaataaaagagaaagagaattctactaaatacatttatattattgtttaacaagttaatatttgtatatcgaattgtgaaatttatcaaatgaatacatatttatatatttttatagcttgtaacacatatccacaacatcttctgtttaaataatatgatattatatagaatgaatcaaaacatgcattgacatagtttgagaagcaaaatacaacttttgtttggatatctccctctcactttactttttgttttagattccagatatatgagatttcccttatatttagaagaaatttatggattttataagctcttgaacatctccatcggtgggatggagaagggtttcacaccaacatttattaattaaaaaaaaatcaatgaagagagagataaataattcatgtgagaagcgtttttccacatatgtcataaaccattggcttagttattaaaggaaaataaaaaagaaataatttaagggtaatagcagaatctatacacagaagactcaataattaagtaagactttttgtcactatttacacaatacaaaaacacataaagttacaatattatcctcatctctattttttctttatttcttaagattttttttatctctcttctctttcatctactcattcatctcttttttctgtctttgtttttcttcatacataaaacaaaatttgttatttttcattgctaattattttcattattatcacaataacgtagttattatcggtagttattatgtattaattatgaaaaattctctctaatacccttttcaactctacctttttttagccactttcatttctaccatctttaaaattttaatgaccattttacctctatttggaaattgttttaggttaacaaaatgaaatattaattttttcgcctaaaatattctaaaataaatttcctgccaaaattttcccgccaaaattataagggttttaaaagatttacaagggattttaaaagggttttaaaatatttgcaagagatttttaaatagttttaaaagatttacaatggattttaaaagggttttaaaagatttacaagggattttaaaagggttttaaaatatttgcaagagatttttaaatagttttaaaagatttacaatggattttaaaagggttttaaaagatttacaagggattttaaaagggttttaaaaaatttacaagggattctaaagggttttaaaaaatttacaaaggtcttttaaagatttttaaagggtttaaaattgttttaaaatggtttaaaaatatttacaagttattttaaaagggttttaaaagatttacaagagattttaaaagggttttaaaatatttacaagggattttaaagggctttaaaagatttacaaaggttttttaaagattattaaagggttgaaaagtgttttaaaagatttacaagagttttaaaatatttacaagagatttttaaagggtttaaaagtgttttaaaagatttacaagggattttaaaagggtttaaaataatttataagagatttgtaaaaggtttaaaagtattttaaaagatgtacttgagtttttaaaagatttacaagaatttacaagaagacactttaaaaccctttaaaaactcttgtaaatttttttaaaaccttttaaaatcccttgtaaatctttgaaaactcttttaaatttccttgtaaatattttaaaacctttttaaaatcctcgtaaatcttttaaaacacttttaaaccctttaaaaatcttttaaaaagctttctatatcttttaaagtcctttaaaatctcttataaatattttaaaacccttttacaatcttatgtacatcttttaaaaccctgttaaaatccattgtaaatcttttaaaatccttttaaaatcccttgtaaatctatttcccgccaaaaaaaaattataaggattttgtttggcgggaacttttttttttggcgggaaaaaagtttgacggaaaatatttttttggcgggataaataaattttggcgcaaagaatttggcggaaaattttcagtttccaattacatgtttttattagatgaagataatttggtcattcagtttaagagaaggggtatatttaaaaatggacaacacaaaagggtattattgtaaaagggtagtaaaaaaggatagttttgcaaatcacccaaaaaaaatagctacactggttgataaaaatattaaatatatgtacacatttttttgttttatggttataatagtaggtatttatttttctaaattggtacatatattgaaagattatttgatctgtaatttgaaattatttcctaaacattcaaatagctgtatgataaaaaaatctgaatgaaattaaacaagatcgaatttcttgaaagtcattactctacacaaaacttttccctcaatattttttataagacataactcatgcatatgatcaaaacattcccatgtgaacaaattagcaaaggaaatcttcccaaaatgtataaaatctttctataatatatataattaaagtcggtttacatttttttttaatttaagtaatacataaattgttgaacagcatataataatattatagctaataaattagctacagctaaaggtaacggtaatgccggattagcagctaggacagaagttgccaacactacaactaccccatatctatccaatgcaaagacaagtcttggattcgtacgagctaataatgtgttggctccgatgagtacacagagggcgttcatagttagcatggaaataagtgagaaccgtgcggttaagtctctgggatcttccacctaagcgtaaatgctgttaaactccagcccagccgtgaggcaataccccagcaccacccaactgagggaattcatccggtgaggctcgagtactaagtgcgggaagcttctctcgtaatagtgcctcagagcgatgttaagaaagtgagtagcatgaccaaaagaggatgatgcttgatcagagtttagattactacgcctcctgtttggtgaattcttggtacttgtgtcttgataggtggtaaagacgatgacgatggatgcgtcccatttgtagggcgaggtggtaaaggacacgtctatataggagtttcctttggactttggttcgctacaataagaaacaccaagggcgagagtaaagagaatataaaatctagaataacagagcatttttatgagcaacgataagaaatttttattaaaaaaaaaatccaaaagaacagagcattacaaaattaagcaacggaagatttttattttgggcaaaacaatttcatcaattttcaaaggaactgactttgaaatcttcatatagagattctaaaattatccatatggttaatatctatgtgttacaaaattaaggaaccacaattaagaatagaatgttacaaaatccaggttaatggggtatggtttttttaaggaaactttgaaaccttcaacttttatagagactagatgagtacccacgcgagtgtgggtttgttttgaaaattgttaaaaaaaaaatacattgatcgttctttatgctaatttatatttactatttgtttattctagtatttttaataaaattagatccataatatgtagttacaattttatggttagattcatttatgatttgaaatattaatttatatatttttttgtataaagctgattatttataagattttaatattttttcacttcatgaatacatataacaacaataatgatattttgatacaattctgtgtaactatgttatttttgtggtttaaaatttttctaactcgattataaataaatcaattccttgttttatgtacttcaacaacattgtgataggctcatgattaaagtttcgattgacatcaactgaaaaagatctgaagagtattcgtacaaaaaaataaaaagatagcaaaaagtgaatttcattgaagtcaacacttttagatctcttgtcattgcatatatcaatattagagaaatgatcgtgtcttggatgatttgaaaattgttcaacttgattataaataaactatttattctccagatataatactccaacaactatgttataggctcatgattaaatatatagaattgatataaactgaacaagatttcaagagtattcatatgaaaagaattaaaagaatgcaaaaattaaagtatcattaaagtcaatacttttagatcttctgtcattgcatatatcaatataagagaaatgatcgtgtattacattatttggtaggtctaatattttgaaggtttattatttgaaaaaacatgaatgtcaatgttatcaaagaatcaaaattaaattactaaactaataagaggttaggtagcaaacaactacaacacaataaaaaaattagtcatgattattgatagtaaaaaattaataaaataaaaagagtatagtgaaagtagtacttaatttgtttacataactttattttatttttttattttggaaaaatcaattaaaagtagaattgatgatatatttaatttgcttatttaattttattagttttattaatttaaaaaacatcaaatgacatatgtcactttgttgtgtgatgatgtgttatttatatggagtgagttgaccaactttaatatatataattcttaaattaatcatatggttaactaattatgtgtgttgatcataattttgtttactgttttagctaggtttaactgtttaagtgataaaaactacagctgctaagatttattgtgtttatagaatgacttacattgaccagttgaaggagaaggttctgcaccgtcaatatcttcttcatgcacagatgatgtctcgatagtttggttacagagagacaaaagcgaagaacagggagacttaatggcgaaaaagagagagataatggtgaagaagaacagaggagagattatggggttttatagaggaacgacttctcttattccattttgttacgataagttgataacatcactctcaaatggtaacaaaatgaatcatctcggaagtttccttggttgtatatttacacattttttaaaaatacttatttatttacatattattgaactgagttgagaaaatacttatatatatttacttaaaagaatatttaacatattaaatacgtagagcctaattcatttattatttctatcattgcaaattgtataaatcatttattatttctatcattgcaaattgtataaaccttcttcttctttttgtttgttaaagcttggaagggtttcttacatcctatgatttagtctcaaatgattcagtaatcctttagtcaatattctagacttttaaattcagtactgaaaatgttttttatcaacatttgatttaaattaaaagaaaatatttaccaaaaaggtgcaaattgataactgaacatgttaagcgattatattcgtttatgttagatacaaaatcataattcatagtaaacaaatgtagataacattagtatacacaaactatcacattaaagtttcttacatcatcaattggtaaacttgtctaagaggtttatttttttcttttgataaaatgtgaaatttgtaatatccaaaaattgtaaggaatatgtccccttaaggaaacagaacaaaggcaaaaacagagtcatatagctcgtaaccagaacaaagtagcctagagctataacagagttgtcgcaactcgcaaagatattataagtggtgtaccagcaaaaagtattcaaacaaaatgaagaatcatctgtgtttgacataatttatctagttacaacaattccgttttacctgtagctctttttctggaatatgttgttgcatatctttaaataaataaaaaggattagtcaagtgatttatttatggaccaactcaaaattcaattagcttggcaagtgaatagaaaccataccgaagacctgaactttaaaactgagcactataaaattgcgttaccctgacccaataaaattgttaggacactataattttagcggaaaacaaaatagaaactgcatatttgcagacaaagatgaaagcgacatactttccttaataaactgtcaaatcaatcgcattaaaatttgtctttattccctttattataaccgttatttgtatttactattgcatttttgttttcttgttaaagctcaaaccataaatgcaaacgccaaaacgtaaatattagaaaagaaaatccgctacattataaccacattttttattttattttattagcatcagattttattttagattaaaaaaaaaacaaattcgaaaaatattgtttacatagataatatgtataaccacagtttaaaattaaaattccctactttcgtcttattaaaacaaaatttccatactttcatcgtttttcacgaaactagttttttcagatgacgtaactcttaaatccaaaattcacataataaattttttgaaagaaaaaacaaattcaataatatctttttattaataacttgattacaaaagggtacatattattttgaggaacaagttaagttttctctcaagaagtagggtttataaaatgaattgaggataggtacattaatgttttgtacgaattttagtgtatgaaacaaatagttaaaagtatttgttttgtaaattataaataataaaataactattttttaaattatgtttggaaaagtaactattttgcaaattcacccttttattaatgatcctaacaccatgtgactgaattgctaactaatgttatgacaactagccgaataaatataatcatcaagaggagtatagttcctcataaccatgtcgagtatcaccgtagttagcttttacataaggaaacaaagatactactattgtaacttcgaatggtatgatcgttacttattgtatagtactcatatgtttcataatataggatgtttaagagtttttattttattttaaaatatatgatgttttacaaatttttatgctactttaaatacatttgatgttttatgactgtttatattctgtagtattttatgtaattttttgaaaatactagttttttatgaccagagaaaattttctaaaatttatgtgtttttagccaaaacatcatatattttgaaacaaatggagttatcaacatgttaatctttcatcgttgtttcattttcttccttctcttccttctcttccttctttatcttcttctcctctctcttcttcctcttaatctcttcctcttctttcttcttcttctcctcatcctcaatcctcctcttcgcttcctctttctcctccttcaacgcttcaatcaatcgcttcaaacaaatctccttagtctcaacttctgatttcttcaacagattctctcccacatcagcaggagtcatctttatttcttctacctcaagtaacctcttgatctcatcaaacaactcattatcatcttcttccttagcatccaagtaattgtttgccaacactttaaacgcttcaaaaccgcagtaggacatctctatatgcttatccattcttccttttcgaatcaaagccggatctaacttatctatgaaattagtagtgaacacaatgatcctctcaccaccacaagctgaccataacccatcaatgaaattcagtaaccctgataatgtcactttacttcctttattctcaccttgatctttcttcatctgcttctcaatcgggctagtctcatcttcgtcttcctcctcgtccttcttctgctttctctgaccagttaggtcaagagaacaatcgatatcttcaataacaattatcgatttccctgaagtctcaatcaacaaccttctcagctctgtgttatccttgactgttgtcaattcaagatcataaacatcatactccaagagattcgccatcgcagcgatcattgttgattttccggttcctggtggaccaaacaagagataccctcgtttccacgctttcccgatcttcttgtagtaatctttgctattactaaacttgatcaaatcgttcttgatctcttccttcttcttatattccatagcaagtgtatcaaatgtagcaggatgctcgaaagtgacgtggctccacttcgtttgcttatagccagaccaattctggctaggattatttgaataaagcttcctttctctgttcttaacctcaattgtcttgccttcactaataacatgattaagatatttctttgtgattacttccctgtcacgtctatgaaacttaagcatgtagaatcttgactcgtcggctttagggtaaaaggagatcgcccggctttcactttgatgcttcttagattgccaccaaactttgaccccttgaaactcatcagtgatctcttcgtggtcgtccatgctaaggataatagatttatttcctttgattgtgtttgctgttagtttcttggctcgagaagaagagtctttgctaagatagctctggatcgcgtcatagacatcgcttcgcttgaaccgctcaccgctatattcatggaacgttatctgaatataagggtagataaaaccgatgaggctctgagctaatggttcgaagtgctctctgagacggtaagggaagaatctttcgaagattgtgtatataaacactaaacttgcgagagcagagcccgtattagtccatacttcacccattttcaccatttttttggatgctctgttcggtggatttaaaaaggggttttgtttccgatttcttaggaagcaagaaaggtttcaaaagatatgtatgggttgagtttttctcagaaagaaaatagttatgataatgaagaaggtagtgtgtatacaccacaacttttgatatatttatagaagtgtataataagattttcttggaaattgaccaagtaaatgcccaatacataggtaatgtgcaataatcaactaggaactgctaaatattaaactaaatataaataaacctttagtggtaaacaacgaagaacttgtcaaattccaaattttccacatataatacatgtgtgctgaccaatttggaactggtaataatcataaacaaaacaaagagtactttttgatgataaaaaccagaaagaaagtaattcattaagaaaaaaaaagtttttaaaagaaaaccttatcaactaagaaagaagaacaaacaataaaatatcttaagaactaagactacatgacatatatgttatgtaggtagagtaataagacaaatttgcagacatgatccatcttgtggttaggacataagtttcaatgaagatatctttctctacaagatattattactttttatgataaagtcaattttaaatgttaatttgaggatgagaagaaatgttaagccttaaacctttatatatccttgtcgacaaagtcgaaaaaaatggtttgtaaataagttcatcctatgtcattaacatttattattaattaccaataaattacatagatatttaccaatatatttttatgaaattacaggcatcactttttttgtcattctacacaataatagttctaaatgcatttcaatagtttcaagagataatgattttttacttaaccaaaaaggagggtaagcccccaatgattgccgatccatatcacatcattgacacgtattctgggctataataaggcccaataaaagaatttttttgtgaatccactatacaaatcataagttcatgagaaaataaactcataatttacaacaaatttaatacatataacatcatttgtaaatgatcaaaatatatcaaaatagatagtttgtatcgtatttttaaaaatttttacgtggaactatggccccagtttgatggacaaaacgtgataagatattccttggcggagcaagtgaccaaaggaggaggtgtctcgtaggcataactgtaatagttgggacaagcttctttaaacaacatagagtacgtgtttcttttgcacttttccggcgttccatatgcattccggcaacaaaatctgtcgttatcaaacgctaaacatgcactcttgcacgccacaactcgtccctcttcgttcaaaaccttttaaaagagaaaattgtattcaaatgagtataagtagatctaaggattaaatatacacttataacgggtttctgtttatccccaactctcaataactctaactatgtttcattgtttggatccaataataaagcaagtcgtagtttcccaaattgatatttgattaaaagaaaaaagaaaaaaagaagaagaagatgcaattctctttacgtcatatatatggttttgagctattcatcattttgatgtagtgagtcgaactacctatccatctactttcagaatgtaatcagttttgaaatttgagcattttgatcggactttgaaactaatgattgaaaaagaaaatatgtcacctgtagttcttcaggacatgtggttttgagatctttatggcaccctaagatggtgcatttggatgatacgggtttcgagttcactacgacgggaagattataaccgtccacgaggcttacatcgtagaaattaggtttggatttgtcggcttgtaccgcaatttgaataagtgttgccggaggttttccgattaatccattacactccagatgtccatcacaatcacctaaatttcgttgtaattcaaaattagtttatatgattctaactaatcttgtgtattaaacaatatcttaatcttctttcaagtcataaagatattaacattgggataaaaaaaaaagaatcatcacctttaatatctatgaaaccccatatattgcataataaaggtattattagaattacaattacctgtttcacaagcttgtttcgagtttgaagtgaagtcacagcctgttctagcccaaatgcgaccactccaacccaaaggagcatcaatgcgtttaatacctccgcatggcagataaaatccaccagaggctagcaccggatggccggagtttggggcaacggccggccaaatcggaaatgaacatttattttgcacgtaaaacgttacctcatggcttgttactttgcctatttatagcatcgattatagttatgataagatcaaaactgagaccaacaaaatgatttaaaattaaggaagaaaattaccatatactatacaactcgatattatgaaaagttgtaacaaggaggtagactggaatttcattggaatttggttgtaacttgacgtttcaaaattgaatgttataagttagagtatttataagtggccagagaggtgatttactaaaagaatcatgtcgttttcgatcttagattatgctttaagactggattatgggtaagttaaaatttgatcctttaagacaagggagctgatgtcgcttctgatggtattaaagaacttttgactagtaaaatgttccttttacgaaaatcaatggaacgatgaaaaacaaatgcaagaatattgttttgggtaattggattcttattgttggggcgtatcaaccaagttatttactagaatatgtaacgttaatataagagacaagtctaattctaaggaatatgagatttttcaaaaaggaattaaaaaacatatcaaaacggaaatagtgttggagttcatgtaagcttattgaatctaaaactaaattaccaaattattgaacctaagtatttccgtaatgctcgaatatatgatc

SEQ ID NO: 798 - DNA, 22601 bp, Arabidopsis thaliana
aatcaaggcatttcgagagttagatgagtctctttaaggtgtttattttacttttatatttgaaaacagaaatttatatttatgagacataaaaattgaaggactaatatgatagaataagaaattagtaagagtatttataagatataaatacttgtaaggaccaaaaagcaaaaaaaaaaatgatcaaagtttaaagtttgaaggttgtctttggagaacaagaaacctcaaatatggttaatttagttcaggtcgtaatacattttttttttgtctctcatggttattgtgtttgatccgtttggattgtttgtaatacaattgatcctcttatattgaattattcagaaaaaaagtattaggacctgaagtaaattaaccttcaatcatgcaacgaacggttttaactactaacttataagaagagtgagagtcattactgttaaatatatgactttatgtaagacattaatctctaaattcagaacggttcatgtcatagactcctagacattggccttgagccacatttaacatttataatgttgttattggagttggttgagtgataattgtagattagctattttgatgggtttaaatctcttcttatcaaagtactattttattatgctttttgatttcagcttggatttgaggtattttatttaaacaaacataactaaataatggtatattatactgctattttgtatggagttgccaatcaaacctaatcttttctaaatgactacaccggcggatacgtacatttaccaaaacaaattcgaaaataggtttaaatgaaaacaaagtataaaatatgtaaaattagtttctcaattgagataatcatcatagatagtactatatgttattgctacatggatattactattaaaaaaaaaaaaaaactatcaacaaatgttgaaatttttacaaataatggttccaaatagtattggcaattgtgttttatactggattaatgttattaaaacattttcgaacattatgaaattttccaacattttataacaaatagatactttatattatacatataaatcttcaccgtgacacacgatacgagtattatccactagtaacttcattgggtttaacactaatattaattgctatttaacaattaaatcaaatctccattttaccctccacatacagagccactgtttcaaattttgaatctctccttcataaaaaaaaaaaaaattaaacacatttttgtttttttcttcaacaatctcaatgtcttcaaaaatcctctctttctctctctttgaccacctcgagtcacatcacagagccttgaccatcaacaacacaacacaaaacccatagattctttaaaggaaacatctttcttctttctcacttgtcgatcatcttcttcttcttcagttattatgagtaaacaaactccaaatcttgaatctttacaagattgttcttcttccaattacaacaatgccaatgctagtccagtttctggatccgcaagcttcaaaactagcagtaatggctctgaagacgttaggcttaacaatagtatcagcttaagtttctgtagcagtaacagtgtaagcagtgaagctaatctcgaaaagactcaatctttcgatgcaaacgaggctaatttcaaaagggtctttgctccttcgaagccgcataaaggaaacgatcttagatgggacgcgattcagaatgtgaagtgtagtaaaaacgaggatctgggtttagggcattttaggttgttgaagaaattgggatgtggagatattgggagtgtgtatttagctgagctcagagagatgggatgtttctttgctatgaaagtgatggataaaggaatgttgattggtaggaagaaattggttagagctcagactgagagagagattttgggtttgttagatcatcctttcttgcctactctttactctcatttcgagactgagaagttttcttgccttttgatggagttttgtagcggtggagatcttcatattctccggcagaaacagcccggaaaacatttctccgaactagccgccaggttaattttcttgtttttgagttttgtctgaaagtgaaatcgaactgaacagaaatgtttttgattgttctgtctagtggatcctctgttttgtcttttcatgtggaaatgttttggttttcgtttgtgattgagggagatcaatgtgctttgattcttctatgtagctttaagaatctggaaaacgttttgatcctctgttttgtcttttcatggttatgttttgggttttgtctgagagtgaaatcacattgatttgattcttatgtgtagaaacttgatcctctgttttgtcttttttgttggcaatgtttttgtgtatatgtgagagtaaaatcaaatagctttgattcttatgtgttgctttaagaatctgaaagacattgaaaccttgatcttgttgtctatttcttggtaatgtttttgagtgtgtgtagagtgcaaatcaaattggtttgattgttttgaacagcttttaagaatctgaagacattgaaaattttcacattctaatagatcctctgttttgtctgtttcttatgttgttaaaattgcaggttttatgcttctgaagtacttcttgcgctagagtatcttcatatgatgggtgtagtgtacagagatttgaagccagagaatgtaatggtgagagaagatggtcacattatgctttcggatttcgatctttcgttgcagagtttcgtgagtcctacattgattcaatcaacttcacaaccttcttgtcatatagcttcgtactgtattcaacctccttgcatagatccatcctgcaaattacctgtagcctgtatccaaccatcatgcttcaagcctcggttcctcaacaacaaaccacgaaaggcgaaaaccgaaaaagctggttcagattcactcccaatgctaatagctgagccaacggctgctcgatctatgtcattcgttggcacgcatgagtatttagctcctgagatcataagaggagatggtcatggaagttctgtggattggtggacttttggtatatttctctacgagttgttaaccgggaaaacgccattcaaaggaaacggaaaccgcgaaacgctcttcaatgttgttggacaaccgcttaagtttccggaaggatctataagctttgcagctaaagatttgattagaggtttgctaactaaagatcctaagaagagactagggttcaagaaaggtgctacagagataaagcaacatcctttcttcaataatgtcaattgggctctaatcagaagcacaaccccaccagaaataccgaaaccgatcgatctttcgatactaaatgaaaccctcaagtcatcagttcaacaacaaggcaagcattcaaaacaatcagattcatcatcaggtccttatttagattttgagttcttctagtgaaactgtttagtaatatgtaattcatttcctccatgaattttttttacccttttagggttgtttaagtttttttttttttttgcctctgtattaagcaacaattttgcattttgcggttaggttatggtttggttgatatccatttatgtttataagtttcaagcgatgcatagaacacaaatatttaggaaaaaaacaaaatctttttagtcttttgttgcaagaaccacaaaaaaaattcattttttttttgtggtgtaatcgagaaaagtgaaaataagaaaatgcaaacttttatcttgcagatgatagacctatatgttagtccccacatcaaatttttagcttttttacttccatgtttggcttttaagctttcttataaagacaaaacaaaatccttttctgcatgagggattctttttgcgcacaaaattcgactttttcttataacagttattctctgaatatgctaaaaactttatcccagagaatgtaagttttctgaaaagaacactgaaatgagacaatacagagaaagaaaatgacttgtatcacctttatgctatggtggtggctcatggtgaaagaaaaagctttcactttagatagacttgtataaaagaggaatcatatagttcaactgaaaatgcaattattcgatgcaaatttgatcaaagatttgtaggaaaaagtaattctcgttataactaggagttatacgatttcacgtaaaaaagaaaagaagagaatatggataattcaaaggaataaactggattggccgattgagaaaatgatgattcaatacaaatttgatcacggattcgattactacccaaaagaatgaagaagattcaaaggaagaaattggattgaagaacattagaattcagaaacaatagtgtatattaacgataataaattggactaaggaacataagaaaaaaaaagaatttgttatgataaagctaaagtcttcaacactgtcaaaactaagtaatctctatggaaaatgtcaatattcaatacaaaattcgttcgttaacttataaaaatgccactcactaattgcatacaatttctagtgaaaagtataaaaaatgttcaaagttatagaagttggactggactagactgaagaacatcagagacaaaatgtttatacgctcataaacaaatataaaaatccctaatctctatggaaaatgtcattattttcaacacaaaattcgatcatatgtaaaaatctgccaatcgctgcaatatatagtttacatagtaaaaagcatgaatgtcagaaacaaaataagtttattcgcataaagtcatgaactctacaaaatccttaagaataatcaatggaaaatatcatattcatcaatagaaaattcgattatagaatatgacattcactgtaaaagcataaatgttcaaaagaacaaattatatagaggaacctgatcatcagaaacaaaaaatcatttattcgcaccaaactcaagttaccaaagacaataataatccatggaaaccacaaaaatccagaaaccctaattaagaaaaaaaacataaaacacgataagataataatgcagatcaaaacaatcaaccatcatcacaagatcaatcgaagagactcatcattccaccgtcatcttctgattcctctttctcctcttccttcttcttggactcaaccgaggcaggctcagcggctggagcagcaccacctcctccaccagaagcaaccgcaaccgcaccaccaccggaagatagagccgccatcttctctcgtccaacagcgataagctcagtcacatcgcgatctttgatcagagagaagaacagatctatcttctcttggtcgatctctgcaccaacagattcgacgatcttcttcagatcagcgacggatggattctcattgccactgagtttagcaaggaggtacgccgcaacaaccttcatcgttctctctcttttttttctgaaaaaaatgaaagaagcaaatcgactgcgattagggttttcgtgaaaaaaaattcggtatttaaggggagattagggtttttgcacgtaccaatgaaaaagtcacgtgggctacacgaaatctttccaaagttgttaatgggctcattatataattaaaaactagcccatgtatattatcccgcagtctcatgaattacaaactagctcatttccctcatttaatttaattatgggaaggtctaactttggataacatttttgcattaaactagattttaacccgcggtgtaccgcggggacaatttgttttttaaaattagtatatataaaaacttgtaaactatatctatctataaaatatttttattttatagtttacaactgttattaagtaacgtcctgccaaacccgtcccgcaaaacccatcctgcaaaaaaaaacatttattttattaatgttgatcttatttatgaatcattgtctaaatattttagtcgatgcgggatgttgaacccacacatttttcgccaatcggttaatatatgttcatttttaaaattttgaatcacaaaatatgacggaattttttttgagattttttaaactatatattatataatgatgttaaattttttgatatattaaactttttataagtttaaatattaataatgttttataaagtttaaatatataaataataatattttaaaatatatatattttttgccttttaggtaatgacataataactctaaaagtaaagatttagaagatttaaatcgttaattaaatattttcatttctaaataattaatgccaatagcatgacattgtaaataagttcaaatataggatttatttatttaaacaaaaaactttgttttaaaatattgttaacaaatatgtttatgataattttaagggattaatgtgaagtttgtttggattaaatttgattgataatgtgattgacaatttacattaagaatttaaagtaaaattaattattttagaaaaaaattaatgctaatggcattgggttgtaaataagtcaaactctaggatttatttgttaaaatgactgcaaaaatgtatatatagattaaatgagacaaaaaggcccaaaatgttaaaccacaagtgataacaccacaaatccaagtatacaaaagcccaaagtgagtgatggagttgtacgatcacataatttagttatttatattttagagtatagatagaagaagctctttggtgtttctcactagtggtccaatgcaatgaattagatttttcgtgtttgagtcaagtttttgtttggaggtacgttaagatatgcttaattttgaatgggttggtgttaaatcattatcttatttcattattacctaagtaattttgaatgatatgaactgatttggttgacgaaaatcataaaaccattaaatttagtcaaattgatatcatcgtgaaaaggagaagtggtatctcaacaccgagacattagcttgacgatcactacgtagccaaaaaaattgtaagtttgttctcaagccgataaatttgtagttcattacaagctttgccattgaaaaatagaaattatactttaaattaagaaaaaatatctcatcataaccaaaagggaatttgaggaaactcaatagagcaataacacagtgtacttagaaacaagcaaaacaatcatgtctctgatttaatcgttaaaaattgttggcaaagaaaaaaatcttgcttaccaagtaacatccaataggaattgtatcaagctagcagccaatcacaagacatggatgttgcatttggatgagcgtttaggaagaagagcaagaagatcatttgtgagttgcaacttgttctcgatctcatcactagtgttcactttcacctcttcaagattctccatttctctcaagaagcatttgacttggttcagttcctcaagtcttcctttatactcttgtatctcaaccaccttcaccatattcccaccatcaattccaacctcacagtcgcttataccgtacaaaccctcgaggactagagtttctagctttggagatttttcaatcatattgcaaagcaattgccaatattctttctcactaccctcaaaatgtagagtggccaagttcttaaacaatgaatctcatcaagatcaaggcatgcatacatcaccttcaacacatcaaagcaacaaaaaaaagcatcatcaaacaagacaaagaaagaaagaaaaaggaaagaaatttagattgagagagacatacctcaacagtaaaacaagagaggtgaaggatttgaacattggtgatagaattcatgatttttaaacaggtgtcgtgttcatcaccccatctcccagcccttgcgaaagcaagatcaaggcgggcttctaaaagatcattgaagtgattctccgaattatataaacaagttagataatcagagtagtctaggtaaacaagatttggtgtgtagattgacaaaatgcgaggagcctgaacatcgttattgtagcaaactgtgagtttctttatgttgtgggctatataatgaggtgctgtatgaatgttgaattcttcatctctatcttcaatgtaaatgtgatgtatgtataattcttcaagctgagggcaaccatccatcatcacatcacatatagcatgatttgacagtgtggaggaagagactcttaagcaagggaagatcaacgttctcccaaggagacctaccaagacaaagctctgttcctaaagtgagcttgaccaatgtgttgttaatgaatacggtgtcaggaagaagacgtggtggctcgtacatcaaaggcatgtatatgtaaagttcaagatccgaaacgccttgttccaaagcctttgacatcattccggtggtaagacacatgcgttgaacatcatcatcttcatatgttagtgagaatttcttcaaggaattgttgttgcaacctgaaagtgttttatcaacgaaatttctgaagctattgtgaattacataatattcttcttccgtctgtctctcgggatagagtaaatctgtgtcgtctaaatagagagatgcgcagagatgattcatgagtggaaagagagtcctccatcttttggagaggattgaggtagaagcagctcgtttagtaggaagaaaagacaagatatgagaaagtaactcatctggaagagggctgattgaatctatggaaccagatgatgacaatactcttttcgtctccatacggcaagaaatgaagacggtaacaagttagggttctcaaactctcagggaccactttttaggaaagaaatgggtaggaacaacatgtttctcttttttttttcaccattcagcagtaattttttttccaatttgtaacatgtggaccccacagtattcctaatcattccttagttttggaggaatcgtagaagaaaatagaggaacaaacaggaaaacaaattaaaagtacgtgacgtgattaaacattttttaattaaaaattaaatttatggaaaattagaaaaaaaaaaacgtacgtgataacgtttaatatttaatttagaaaataatttatttattttttaattttggttactgtttgttctatgttttggttatcatttacactcattccttttcattcctattttatcatttttattttcctgtttattcttttttaatcatatatctcttcattccttgtattcctttataagtcatcaatcggacccttagtacctaaacaaagattgtaaataccaaattgttattgatttttgtgctaagtttgacatttagtccctatacttttagatggaaaccatgataatgagaaaagtatattataagaatgaatgcaatacttttcaaaaaaaaaaaaatttgaatgcaaaatttgaaggataaatgttatgactgtaaaaaaggaaaggataaatgctatattctcctatatctcatgaaaagaagaaaacaatttcagatattaatcctaacaaccgaaaacgtaagcctattttggttggattaaagaattttgctatacgttaacgaaatttgttttaaatgcttcctttttttttttctttgtttctcggcaacattgttttgttctataattttattttcttattaaaaattgagatatctaactgaaaagtaaacaaaataacgaaaggctctaaagcatccgttgacgaagttgcttcttctctgattcgagtctcataatcatcactgatcaacggccaatgttcttcactgtaatgtaatggctacttcttcctcttcttgcaattgggtttacgacgtcttcccaagcttcagtggagaagatgtccgcaaaacatttctcagccatcttcagttggtacttgatcgcaaactaatcacgagtttcaaagataatgagatcgagagaagccaatcaatagctccagagcttgtccaagggattaaggattcaaggattgctatcgtgatcttctccaaaaactacgcctcttcaagctggtgtttgaacgagcttttggagattgtgtcttgcaaagaagacaagggtcaactagtgatacctgttttctacgctttggatcctactcatgtcaggaaacagaccggtgattttggaatggcttttgaaaggacttgtctgaacaaaacagaggatgagaaaaatctttggagggtagctttaacacatgtcgctaacattcttggatatcattctgcgcaatggtacgagtcacaacccttgtttttgtttgactagtcttacttgttttttgcattgatctttatctttctggttataggaataatgaagcaaaaatgattgaagaaatccaaatgatgttttgtgtaaactgaatttagctccatccaaggattttgatgactttgttggcttagaagttcatctaaaagatatgagttctttgttgtgcttggattccaaggaagtgaggatggttgggatatggggtccttctggaattggcaagactactattgcaagagcgttatttgctcgactctctcgtcacttccattgtagtgtgtatattgacagagcctttgtatctaagagtatggcaagttatagtagagccaacccggacgactacaacatgaagttgcatttgcaagaaacgtttctgtctacaattttagggaaacagaatataaagatagatcatttaggtgccttgggagagaggctaaaacaccagaaagttcttttatttattgatgatttagatcaacaagtggtgcttaacgccttggcgggtcaaattcaatggtttggaagtgggagtagaatcattgtggttacaaatgataagcatcttctaatatcccatgggattgaaaacatataccaggtttgtctcccatctaaagaactcgcccttgagatgttatgtcgatatgcttttaggcaaaacactccacctgatggcttcaagaagctggcagttgaagttgtgaggcatgcaggtattcttcctttgggtcttaacgttctaggttcgtatttgcgggggaggaacaaaaggtattggatggatatgctaccgaggcttcgaaaaggtctagatgggaaaatacagaaggctctaagagttggctatgatgggttggataacaaaaaagatgaagctatatttcgtcatatcgcatgtcttttcaattttgagaaagtcaatgacattaggctgctgctagcggatagtgacttgaattttaatattggtcttgaaaacttagtggataagtccctcgttaatgtaagatcaaatattgtggagatgcattgtttgctacaagaaatgggtagggaaatcgtccgagcacagtccaatgaggctggagaacgtgaattccttatggatacagaggatatatgcgatgtacttgatgataatattgtaagtattttcatgctcttttacatatataactagctgatttgattaatgtggtattgaagttaatgatttatgtttctcagggtacaaaaaagatgttaggtatatcactagatgtagatgagattgatcatgagctgaatgtacatgagaaagcatttcaagggatgcgtaatcttcgttttctaaacatttacactaaggcattgatgtcagggcaaaaaatcagattgcacttacccgaaaactttgactatttgccgcctaagcttaaactattatgttgggacaaatacccaatgagatgtctaccttctagctttcgtcctgaaaacctcgttaagctcaaaatgcaagagagcgagcttgagaagttgtgggaaggagttggggtaagtgttttaaataaagtgacaaatctcatattactttttgcacttggtgtatgactttaactttgctctattgtttgttttgtttcgtgggttcagtcgcttacatgcttgaaagacatggatttggagaaatctaaaaacctaaaagaaataccagatctttctatggcgaccaatctcaagacacttaatcttaagtactgctcgagtctggtgaagatttcttcctctattcagaatctcaataaactgacaaagttaaacatggaaggatgtacaaatttggagactcttccagctggtatcaaccttaaatctcttcaccgcctagatctcagaggatgctcacgtttgaggatgtttcctgatatctcaaacaatatctcagtgctttttctagacaagacatctattgaagagttcccctctaacttgcatcttaagaaactctttgatcttagcatgcaacaaatgaacagtgagaaactatgggaaggagtgcaggtatattcttttgcaatttgcatttatataatgacaaatgagatagtttacaacttttgactatgcaatgttagtgataatgcatgactagcccaaacttaaaaagctacaattgtagatgagaaattacatctaatagttggagttttttttgtatttctccctcttaataagaagtttaatactttgagcttacataacttttgaccacaaaagtattactgtatttggagaagtaaaatcatttgagatttgaatttaacatttctaagtggtttttgattcagccgcttacttgcctcatgaagatgttgtctcctcctttggcaaaaaatttcaacacactgtatctctcagatatcccaagtttggtggagcttccttgcggtattcaaaatctcaaaaaacttatggagttgagcattagacgatgcaagaatctggagtctcttcccactggtgctaacttcaaatatctggattaccttgatctcagtggatgttcaaagttgaggagttttcctgatatctcaagcaccatctcatgtctttgtctaaacagaacagggatcgaggaagttccttcgtggattgagaactttgttaggctcacatacctaactatgttggagtgcaacaagttgaaatatgtatccctaaatatatttaagctaaaacatcttgacaaggctgacttttcagactgtgggacattgactgaagttagctggtgcaacaaaacaatttccgtggcggcggcgacagcagataatatccagccaaagttactagtgtctgaggcctcctcttccctatgtgtccagaaatctgtggttagattcataaactgctttaaattggatcaggaagctctccttcaacaagaaccggttttcaagagcttgatcttgggaggtgaagaagtgcctgcatattttaatcaccgagctactggaaactccttggtcatccctctagttccgacctctatctctctggattttttaggattcagggcttgcgccttggttgatgttaaagctatgtccatgcctggtagagtagatatccaggtatcttgtcggtttagaggcagtctcaagaaccattttgattctgctgatcactcacacagtctagtggcctttcacaaggctagtcatctgcttatatttgactgtcgtttcgctctaaacaatgacagtaatcctctgaactacgctcatatggatataacgtttcatctcactactgactctgtgagcaaaataaatgcatgtggtatacggttctctgagggggtttcaccgcagaaacacctaaatggtccaagtagtattgtacatgtctgtgaagccgatgaaagcaagttggataatgatagaagacatgcccatgagactgaacacggtgaagagtgtggagacagcaatgtagagacagtggtaagcaggaagcgaatcaaggtaattaagcattggtcatgaattgaacagaaacatatatctctcataactattttcttaagatgaatcaaaacagcttttgatatagatcactgggttgtttttacagatattgtgaacaacaactcaagaatgtgttgcttagcttagcagccaaagcacgaggaattcatgcattgacatatggtttgtgaagacttcatctccagaggctttgtagaagaaaatcttgtgactaacagaagcttaatatagatacacacacctacctaacgtaatcagaagtatatgtataaatgtttcaatctttgagttggatcagatatgctttgaacaaaagtcgccaaatatactcgttctttctcgtgttttgtaatgaaaggtgtgacagaagctgttcaagaaacagatgagacacataattttaatgtttttgatttttaagtacaaagaaaagcaccatactttttcaccaaatttaagacttcttcaacaatagggaatatttttctcttcactttgaacgtgaaaaaaacagagagtttgtcttcgaaatcaacaagaatatgactatgcgatcatctttaccttcttcctcttcttcttattcactcgcttctacaagtttgagcaatagacttgagacgcaagaaaagcgttactcttcatgggttcagaacaagaagaagaagaagaagaacaagggtttgaagaatccgaacaagaagaggaagacgagtcttaagaagaacaagggtttgaagaatccgaagaggaagacgagtcttaacaatgttttaaagtatccactcgctgatcattactctcctgaccaaatttcacaactaattcagtccttagaacctcatgtctctaaagtccgagaaagattcgttttgttgagtcgtagaaacagaagcagacaaaaccggatcatcagagtttagcatcaatatcttctctgaatcatcagacccaatctttgaaccctagccagttctcgttgtttatgtacaaccatggagataatactctctctcagatcccagtgactgcatcaaatttcaatcaggatttctccgcgttactacaagaatctggcttgatgaagcaggagctttatggttatgattagaacatgtttatgaacaacaacttccaacattcttttgtctcaaacacacaagattactactctgctcctaccaaccttcttatcgacgactcatgtttctctataagctcatgtcaagagagtgtgaaactgtttttcatcttcttgtaagaattttaatatgtttgttgttgatgtttattttgctaagtattgcataacgcataatgttttcttgtatcaagctatattactatgtgaacatccaatttatgaagtgaatatatattccactgcataaacatgttaccaattactttgcatgtcgtttcgtgaaaatatcaaatcaaatctcccattttaagaatagcacaaaaggattacggacaatagaagaacagagtcctaacttaaagctttatgaagaagacttaaaaacatatttctcctgattgactatttttcacttggaagcttcagttgactcgtttgtgttgacttgtagagggcactgagatacatatggcttcagctgtaaaatacaaatagatatacatcagcagagcagctaaatcacacaacaaaggttaatgtaattaagtaagcattcccatttcaggtcactaactcaaaaaccttacaacaagaacaaaccaagataattatcaggatgaacctaaggacattctatcaacaagacttgtaagaagatttctcactaatgtttggttctcaagtttcaattaagatgcaaggtacatactagaagtatcaaagacaaaaggaacataagagtttagagggtgaaatgaaaaaccttaaagccggtgagatcagggactacgtaattcggtaacttatctggctgcacaacatatcctcctgcaaaaacaccatgtcacaaaacttaggtcaagatatcatgaagtctcgaaacaattgcaaaatacatatacaatatgatgatagttcttttgccaaaatgaagtctagaaacaaatgcaaaagcagtatactacacatgtacaattcgagttaagctcccacatttatttgagtggaaagctaacttctttaactcaattttggcaattatgaatgtagtaacaaaaatgcaactgatgatcagttctttgccaaaatggagtaaaagttgttagctttcctcctacataacaatctagtatctaaactttgccttagattccatatatctaatttcaaaaacactcaagtatcaaaaaattctatgatgatcatcaattgagttaaagtagttagctttgccaccaaaagaatctgatatcgtaaggcatgaaaactaaactgataatagctctgccttaggttgcatattatctaattcaaaaccaagaacaacaacattcaatcaccaactaactaaacaagtgttagataaaaatggattgcagcatgacaagtgaaaaccaaaccaattgttgcagtttcagtgaacctttccttgtaagtagttttgccacaactgagttaaagttgttagctttccactcaaagaatctatcttaaattcctaacacttggttcaaacaaccaataacacaagattgcaattatcaactaaactaaaacaagtgttaaatagaaatgaactgattctcaaaattaggaaccttttctcgtgtggaaaccagtaggtttgcagtttttgcccttgtagaagtctctaggagctcgttttggggagaggatatcaagagaagaagctctctttcttctgaatgatcttccaatccccattaacaatcctcctatcgtcgtcattctccaacaatgtattagactgatatcagtcgttgatcttaaaaaaaaaaaggacctgatagaagagtgcaaatctcagagaggtcaaattaggggtttttgttcaagtgaggttgtaggttgaagacactgtaaacgatgtcgtatagggggtaaaattcggaaaattgttgttttcaggaaactatctgactctaaacaaatgaaactgaaaatataggggtcatatttacaaattagttatcttcgatttacgcacgtattatatgtttgttgtagatgtttattttctaagtattgcataacgcataatgttttcttgtatgattgtatcaagctattctactatgtgaacatccaattatcaagtgaatatatattccaccgcataaacatgttatcaattattttgtatatcgtttcgtgaaaatatcaaaccaaatctaccatttttagaatagcacaaaaaaggattaaggataatagaagaacagagtcctaacttaaagcttagtgaggaagcttcacactcgtattatcgtcaataaaacaaagacgagatacaaatgactcttcacactactattattgtttatcttgtgatgattcctttcctatcaaaatgtctgcagcaacttcactctcttgttgacttttatcttgtgatgattccttcctttccactatatcggctgcagtttcccactcctctaggcctttatcgtctgttgcttccataagtttccacacttccattatatgtccaccttgctttgccttgagtttgagcagtgcagctacccactcctctcgacctttaccagctaaaaacgaccctaacagtctaaggcccaaaggaagaaagcctgcgagatggacagcacgaactgcgagctcttcgaaatcagaaggtggataaggctgcttgaaagcaaaatgagagaagacttgaagagcttcatcatatcttaaagatctgacttcgtacacatccatcactccggcgtcaacaagcaaattcttgttctggctaataagaatgactctgcttcctggagcaaaccagttagcatattcaatgatccacttcccttgttccatgttgttcacatcatcagcgataaggagaattttccggtgtttacgccttgcttcggtaatttcatgtccatcgtgatatgagcttattattaccgttggatcttcttctccttcaaactttagaagcttgtctttcatgttttcaacattatctaggaaaacatgtgtctgaaagtttacaaagatctctgcataaatgtaccttgcaagtgttgtcttcccaacaccagcactaccccaaatgccaattgtacgaacctctttgttaacttctaaagccaacaagtcataaaccactttcatgtgacgatccattgcaacaagggcattcgaatcgtttgatccggagtagaacacgacaagagatatgtcacgagcaatttggttgagtagatctgactgatccattcctgcaagattttgagataatggatactcagcggcaaggttggtcaatttggtaagtgcagttctccaacttggcgccttctccggatgttgtctgcatatttcttccacattaaaagataaatctgtaagaaaaatgggtatgaccatgagtgaacctttttcctgaaactcgagtatcactaagagctcttctaggaagccaacggagcaaggtttcgtcgtagaggtcataacaaccgcgactctcgactcttccaaagccttgagtgtccgttgaccaattggtccgaatctcttctccaagcatctgtaggataaaaaagttctaatgccatttcgaatcaaaatattttgaaaatatccatggctagtctggcagcagaaactcaggaagacatccacctcccttccaagcaacaaagaagcagcagaagatgaagaagcagaagacattgctttggttaaaaacactaattctgcagctggactcgaacaacgaaaagctacacatgtgaaacagctttacaacaaacacaccacttataaaaaaaacactagtagctaatgtgaaaacaaacaagacaaaaaagacaaaaactttacgtagaaatatataaataaacagagcaatgatagatttcaaagtatttaaaagttcttaatagatatctatcaaaatgacagcatacaaagtagcatttggtttattctttatatttttttgccgaacaaaatcaaagattcactgctccaagacatgatccacttgcttgatagattaatttcttatattttccttgtttatgcatcaaaccaacattaaagaaacgacatctctcttatcttttgatctttcaggattcaaatgatcatcttgaaacagagcgttgaaacagagtatctttgagcctcttctaagccaaggtctttgacaatggcttcctcatccgcatctcgtgcatccagctatgatgtcttcttaagtttccgtggggaagacactcgacattctatcgtcagccatttgtacgaagcacttaccagcagaggaattgctaccttcaaagacgacaaaaggcttgagctaggtgatcacatttctgaagaactccaaagagccattgagggttcagattttgttgtcgtggttctctcagagaactaccctacttctaggtggtgcttaatggagctccaatcgataatggagcttcagatggagggaagacttggtgtctttcccgtcttctacagagtagaaccctctgcagtgaggtatcagctaggaagtttcgatctagaagggtaccaacgtgatccacaaatggctgatatggttcccaagtggagacaagctcttaaactgattgccgatctttcaggcgtggcatcgggacaatggtatgtatttttcctcgcacaagactgaattttattacatatgcataatcttagtacttgtgttctttttcgattatagcattgatgaggcaactatggttcggaaaattgtcgaagatatttcaaagcgcaagacattgaagcataagatagatttcagaaattttgttggtgtggatactcacctgcaaggtctcaagtcgctcttggacatggactccaataatgatgaggttcgtatgattggaatatggggaatgggaggcattggaaaaaccaccatcgccaagtgtctctatgaccagctctcatcacaatttacagctagttatttcacacaagacattaaaggtattcataaagagcttgatctactgcatttgcaaaacagacttctctacaataccctcggtgatgatattatgccgtggagtgtggaagctggacgcgaggtcatagcggcaagacttgggaaccacaaggttcttcttgtgcttgatggtgtggataaactggtacagatccatgctctggcaaaagagacaagatggtttggtcgtcagagccgaatcatcataaccacccgagacaagggcttgctcaatagttgtggagtaaaaaccatctatgatgttaagtgcttggacgacaaggattccctgcagatgtttaaacagattgcttttgaaggaggcagtcctccttctgttgattttgaacagctctcaatccgagcagctcggcttgcgcacgggcttccttctgcccttcaagcctatgccttatttctccgtggaagggccaactctcctgaagaatgggaagaagcagtatgtggacttgaaagtactcctgacgagaatataatggaaatcctgaaaattagctacgagggtttagcaaaagcacatcagaatgcttttctccatgttgcatgtctctttaatggagacactttccggcgtgtcacttcactacttgatgttagcagaatggaaagtaacttgtggatgagagttttagcagagaaatctctcatcaatataacaagtaatggatatgtaaccctgcataagttggttgaacaaatgggaagagaaattatgcttgccagtggaaaattcatcggggatccggagacaattcatgatactcttgtaagtatctacttaattcttgatattcatcttgtaatcctgcaacttatcgtgctcactgctatattttctatcaccagggaatgggacaaactgaaagcatctccctacacatatgtgaaatgacctgtgcattttcgatggcgaccggtgtttttagcagaatgtataaacttaggtttttaaaggtctacaagcatgttaacgagagagaatcgatgttgcaggtgattcctgaagatgaatacccttccataaattgtctcctactccattgggacgcatttccattgagcaaatttcctctcaggtttaatacatattgtcttgttgaactcaatctgcgtcacagcaacctagaaacactctggagtggagtactggtaacctcctttcttactattttgaccatcagttcatgttttcgctatagcaatgtgcaatatccaactattctttggtgtccactcctcagaagtttggtcatttgaggaaactagatgtgacgggatctaagaatctcaaacaacttccagatctttcatgtgccgaggagcttgacgagttgcttctagaacaatgcaagagactaaaaggaattccagagtccattgcagagaggtctaccctaggcaggcttaatctatcatactacggtggggctaagaatcccatgggtgttgttatacagaaagtttctcagacgcaacgtattacattgttgttcccaacttcaagcgtggaaatgcaacttatgaatatatcaatcacgggagacattagatttcgtgtttttgcagattttgaaggatatgctgaatacttctcctttagtactgagcaaaagatccatgctacaaggacagtaagtgtccaccaagctcctcggctcatctcggagcttaacaaatctactacactcaatatcaggaggttcagctacaaagagaacggtcgacctgtcactttacacagctttccagatattcctggcctgaaacagctagaactagtcaacttaaacatccaaaaactgtcagatgggattggtcactttgagttcctagaaaatctggatctcagcggaaatgattttgagaatttaccagaagatatgaatagactttcccgattgaaaactctctgtctccgaaactgcagcaaactcaaggaattgccagagctaactcaggtgcagtcactcactctttctaactgtaagaacctcagatctttggtgaaaatctctgatgcaagtcaagatccaagcttatacagtttgcttgagctttgccttgacaactgcaagaatgtgaagtcattgtcagaccagcttagtcatttccccaagttggcatatttagatctcagcagccatgactttaagaaactgccatcaagcatcagagatcttacctcattggtaactctctgcctgaataactgcaagaaactcaaatcactggaagaactcccactgagcctccagtttctcgacgcaaagggttgtgattctcttgaagctgatgatttagaacatttcaaagggagagtaaacagagaggtgaaatattctgcacttgacccttctctctactctggtctatgtagtctcttcatcatcttcattcttttctaggtatcagcacaaccacatagtgctcgcttccaagaaacggagatgccaagttacgagcaggatcaccaagccagaaagagtcgcctacccaagttcctatgctgctcatatttctagtcattcctacatgccacgctttattgttgttcttttcatttt

SEQ ID NO: 799 - DNA, 61001 bp, Arabidopsis thaliana
gatcccgtgtgaacacaagctacgtttatgagtatgctaggaagagattttgcaaacattttgatatatctctaccattccctagcagctattttctttccaacaactcgagatttctctgctaataaactaactgacaagaatgcaattaaaaagaaagagtcaaagcaattacctccttcagagtcaatgttatagtagcagatcagagagagtgaagctgttatattggtttcagtattgagtaaaactgcaaaaacagatgtatttcgtttattactctttcttttcatatgaagagtagagtatctgattgttgttgttaatctatactcagctaatagagtcaaacttcaatcatcatccataggtaacataactaaaagccaatcttctctattttttttttctgactacgcataaaacattcacttttgctaaaatatgaatcaaactcgtctctgatcttgacccaattcatagaaaccttctaatagcaacccatttgttctcttaaggacacagccaaaataaaacccaacgaaccttaaatgatccaattccaccatcatcgccgggaatccgattctgagactccgataaaacggagagacttttggaaactctggcgattataatctggtttacactttgggatttggttcgaattcggattttggttttaaaatttaaatttgcacctccggcggaatctggtttactctctcgttaaacccaaaaaccgaattcgaaccaaatcctaatttcgtgtaaaccagagattatatgtcttcctaaccactatatatattttaaattttttgacagcaaccaatagaaatttatgctagggtaaattagttggtaatacgtttgttaattgttgctattattactttaatttgcaaatataattttaactaaatttggtgttactagagtgattgtttcgttattcattatttgtcaaaagttcaataacatatcatacaaatctagttatataaatttcacaattcgcattagagggagatcaaacatagagaaggaaaataatggatttactaatctgttagcgaataagttttatctacgaaaaacatcgtcaaattctcttgggtgaacgacctgtgtgcccttcggaagtttcatataacactagacctacaccgaatttcaacctcaatcttggtccacataaatggaaagttctagtcctatttcccctaatttgaaagttagaaacctcaaacacacaggtcgttataaaccaattaaaaaaacgtttatgtgttttgaggtttcgaactttcaatttagggagaaataggattagaactttctatttgtgtggaccaagatcgaggttggaattctgtgtagttctaatgctatatgaaacttccgagggggacacaggtcgttcacccaattctcttcttttgtgtatttttctcattatatggcatcaaatatagagaagaaaaaaaatagattcactaatctgttagcgaataaggcttatctacggaaagtatcgtcaaattctcttcttttgtatatcgttctcatcatacagtaggacacaaatatatgcttatgtaataatttgttttttttatagttttttttgtcattcgaaattaattaaaactcaaacgaaccaatcctaatgggatattgtttacatgttttttttatagttttgtataataactttgtaatctcgattgatatcaatggattttattaaagggtaatttgcagggcacaccctttgaccatgttttattttcagggattgcaaaagtgaaaggtggttttcacgttttgtcttttcaactgaaatttgaccattttgcccttgctgctacagatgagaaattgttgaatgtatggtttagttagtcaggtttagttaggtacactgttccggtttagttagagatatttttgtttcacgttgaggagcgcgctttacagttagaagggagattttttcattataaacgaaatgacatcaacatttaatggcccaaaaagtttagacgtgactcttgttataattaatgcaaaatcatcattacatgttattatattataaaattattgataataattgttgagttaaagatgaacccaggaacaaacattaattgcgaacgtacattgatgctcaagaagtgttgatcttgtttatttacgaagtttggagccaagataagcattatcgtgtaagtaatgaagttttaaagattttttttgttataacacgctatgatcttcattgtattcgaaatcaactttgtttttttatagaaaaacccaaaaaaattttatttccaattttgttggttgaaaatgctaaatgtgtaaatatatatgtttataagtgtgtacaatcatgttttcagttgcatttaatgggtttctcctgaatttatgatgcagttgggtaatggatattcccgtatttactatggtcggtgagtggagatgcaaataagaaaaatggaaatttgaaccaaaggaagacatgtttggtcgctgtgtacgtgttaaggaaaacaggacgtacacagaatttgtacgtacactaagcgaggctttcagtttgaaatccatagagatcaatcccataattagttactggatgccgggagagatgttagtgctgatagatactaaacgccctcctgtctacattgacagtcaagtggggttggatacgttctttttaattcgtggtcggtatccttctctcaatttgtttgtctctttcattacaaccgtcaagacacccgataataatgtctctaggactcatggtgatgatgctgaaagtgaccgtgtatgtgatagtgtttcaaatgttgatgaaaataatgaggccgtagatgagaaagacgacgatgaagacgataaaacaaatgaggatgaagaggagggggacaacaaagatggtggtgggtatgatgattatcagggtgacgatggatctatagggggaagtaccctcgatcctactattgatggtagtgaaagtagtggcgaagattatgattacaacaagtggaacgatgtaattgtagaagaatatggaatagggaatgttgacgagaacgtcattctcacaccaggggaattcagtcgtctgttggcagagtgtacgtacacaagtcagcgtgtacctggcggagataacatttctcactcgggtgaccgtacaccagttgtgactcgaagaagtatgtgtcaacatggtttgtaccaatgtacctacactatagattgggaagtgtttttaagaacagaaaaatcatacaacaaacaatgtcttatctcagccactgccaatattggtttaatattgtattaataaatttttcttaataatttcattcacaaacaaagatgtacgtatattattacacatgtacatacattaatttaccaacaaaaatgtacgtacattatttcaccatctatttttatttaattattatgtatgtattgagattattgagatataagaatacgtaataaaatagtttgaattattagaaatcgtctcatatatgttccataaataatttcgtgtacgtacacagaaaaaattcgatgaagggtataattgtaattttccagtcatcttcaacctgtgtatccttttctgcaaacctaattttgcggccgtctttatcagttttctcaaaatctcatttttttacgttttgattactatttataaataaatcttgtaaacttagagtatctttagtttaaaaagctaaagtgtttgtatctaggagctttttttttgcattttgttcatctctgaaaacaagaaatttgttcctcaattttggagttcaatggagagatgtcgaaatatgaaggagtggataatgaattttgaacttctttctacttctctctcgaattactccgtctctttctctttttcttcttctttgtttctttgtttcagtgttttttttttgtttttttcaaaactgaaccattaaggataaaccaaaatcacaaaaccattaagggtaaaccattaagtttcaaaacaaaaccagaaaaactaaaccgaaatcaagtgctgtgtgatttggttgctcccattaagggtattttagtctgaaaacaactgaaaagacaaacggtaaaaaccatatctcactttgacaaaccatgagagcaattcttttttcatccagtgaaaatttctttttattaaatctataaaatacggaaatcaaatctatactcgtatttccttttcttaccgatgagcgtgagtggttatgaaaaccaaatctttacttctacatctataaatatatgattttactctccaaacctaatacattagtttcactctctcaattttattcttcttcgccttcgtgctttctcttaactttgaacgtgaaaaaaacagagagtttgtcttcgaaaccaacaagaagatgactatgcgatcattacctttttcctcttcttcttattcactcgcttccacaagtttgagtaacagacttgagactatattcaagaaagcttcagagctttgcactctctgtgatatcgaagcgtgcgtcatctattacggaccagacggagaacttaagacatggcctaaggagaaagagaaagtgagagacattgctctgaggtatagtcaattaaacgaagccttgagaagcaagaaaagcgttaatcttcatgggttcctgaacaagaagaagaagaagaagaagaagggtttgaagaatccgaacaataagaggaagacttgtcttaagaagaacgtgaatgttttaaagtatccactcgctgatcattaccctcccgaccaagtttctcaactgactcagtccttaaaactccatgtctctaaattccaagaaaggcttcgatttcttgagtcgcagaaacagacaaaaccggatcatcagagtttaacaccatcctctttgaatcatcagacccaatctttgaaccctagacagttttcgctgtttatgtataaccatggagacaatactctgtctcagatctcagtctctgcatcaaatttcaatcagaattatttctcagcgttacttgaacaatctgagttgaagaatcagttaatgaagcaggatggttatgatcagaatcagaacatgaggatgggtgacatcaccaacaacaattttcaacttccttacttctcaaagaaagaagcggtacaagaatctgtgaactactttgggatgaatcagttgatgctgaaggagttatatggttgtgatcaaaacatgtgtatgggtaacatcaatagcaacagctttcaacatccttgcgtctcaaaggcacaacattactcggcggtagaaggatctgtcaataaccaacgacaatctgagttaatgcagcaggagctttgtggttatgagcagaacatgtgctttaccaacaacaattttcaagtctcaaacaaagaagcggttcaagaatctgtgactaattttgggttgatgcagcatgaactttatgggtgtgatcaaaacatgtctatgggcaacatcattaacaacagctttcaacagcgtctcaaacacagaacaagaatctgtgaataacccctggttgaatcagttgatgcagcatgaactctatggctatgatcaatggtgaagtagcggaacagagatagtgaagctgttttcttgagtcttgattcacttgttaatttttatttttgagtacgcttgttaatctgtagagatttcgttctgagttttaaagttacaacttgtattttcggtttagttattacatatatatgatataaaaactcgagcaatctttaactaacatgttaaattgaggcacatcgacgaaactcaaaacaacaagcaatacagtagcaagtagcagaaacaagcaaagcaatcaaacaattgtggtgatgaaacatgtagtaaagtaagagaagcttgcctattagtaacatccaattagaattgtatcacaaagtagggcaagtaaatcatttttgactagtgtgtaacttgtatactatctccatcactaatgttcactctcatctctgaaaattatgatggtgtaataagagaacaataataaattcttcaaacaaaaaatatcctcgaatttaaaatcttccaacgcaactaaaatttgaaaacaaaaactgactgttttagtctgaaacacacataagtaaaggcgtgagacaaacaagctggaaaggtgatttactctgcatcttcatgtcatcaccagtcaccagatgctccgttcaatgccttaactctctcgatcaacttgttcttcctctcttcgtacgtcagtttcttcaagtcgtacctgttttgtttgatatcacaatcaatcaagaaccaagtgagacacaccaatcacaacaagaagattaaagccagtaatgattatttgttttacctcttgtgttccttggtagctggtttctcggttttcttatggttgggttctgctcggatagctgcgtgaaccttcttgtacatctcctcgatgctctcagcttcaactcctttcttaatgtaagcactgaagagagtttgtaacttctctggctcatattcccccaacagcttcatgtagtttgagacgtggccaccgtagatgtagttactgtggattttatatggtgcaccattttgcacttgcaagtgatctttgcttccgagctatggttacttttaagagcatttttgtatcaacccaacctctgatccttgttatggtgtacacaatatgatgataaagctgccgaatttggacaaggcttattgtttatgtattgcaatgagagaggtaagaagtagctctatgtatcatatgattgttgttgttaacctatactcagctaatagaccaaaacttttcattaatcatccatagataacataactaaaagctaattttatatatttctgatttctcactagtcactacgcataatacattcgttgtttttgctaaatatgaaatatctatgaattaaagattgaaaacaaaacgcgtttaccaaattactatgcatttttagattaggaaatatctatgaattaaagattatatcgtaaaacatttgacattattttcacatttcgttttggagataatgtttttgatattgagatggacaaacatttacaaaatatttttagaatctggtttctaagtgagactttgctttttgattgtgagctagacacgacttaaaaagtatttataggctttaagattcaatggaatttcaacacaaaaatagttgcattggcttcggcccaagatgagatcatcaaaattacattcgttagtatagtatacatacatgcaacaatcaaccatggtccatgtatgcatagcgaaaatctaacaaagaaaaatgagtaaggttgcatataaaataaacgtttttaaagaaaattggttattcttatttgctataaatacaaagttagtgtatacgaaaatttaaaacatgaatcaaaccaaatacgaaggcaattacttcgaaattgtattttgatatgctttttactagttttgagttttgacgcataattgtttctaagttgagagtgaagtgtgaacagaatgcgtctctactctctacttcctgatttcttttctgaagaaaattggcacaacgaatattaactttagaaaaaaggcaaaaagagtaagcaaaaaacttgaaataaacagcctataaccactcttcaaaggttcaaagtctaaaggttgtgtctttctcatcattgattacacgtatacacatacatattgataccaaatacatacactacctatacatagacctatctgtagtcttagcaactaagaatacaactattaatcttaaaatgttttttatttttgatagaaaatactaaaattgttttactttctctttttatgttatcatttctttactttattcccatgcaataaaaacaaaagagaaatttccagttataaaagtgttaagctttgagcctagtgtaagtcaatatatctgttcccatcaatctgaactgcaaccttatatatagagtcatgtatgtacacttaaaactcattacacaattttacccgtgaaaatagtaatcacttatgtttttatataaataaatattttagtttactagttaattaatacttttgtttactagtctagcgaaatatcatgaggaaacaaataacattttaatatcacgataaataaacatttctaacattgggtagacaatatactaaattggagataatgtctgtcaaagtgattgaagaaaggaaacaaatttaattctcagaaacaaagggcaaaaaacataaaagcaaaaaagtagaaactttttgaacattcataaagctgaaaacgacagtattgttcttggttaaaaacagtgtttttgcataaagctaaacacaaataattgcatcaacatgaaacattaactaagcttttcttttgagcatgctccatcttagacatatgacatatcattaaccttttagattaatgtaagtttgaccaataagtagcttcatttcactaatcttatgtcaccatataaatatgattaacttctcaccaattgaagactaaaggtttatttatctttctaaattctaacatttaagtttgtgtttgtataatactccctctgtttctatataaatgtagtttaagggtttttattttttttcaatttaaatgttgttttcaactttttatgcaaataataaatgtatttaatattctttaaccaattatatttaatcatctatttttttattggttgaattggttataataaatgatgtttttatataaaagaggtagattaaatgagatttttatgatttcttaatttgtgtgtaaaaaccttaaactacaactaatatgaaacagagggagtactgtatttcatggagagacgagtacaaattacgttttcattaatgaatttttgttttatatgggtcatatatatatatatatcttcaactttaattacctagctaccaatattaaaataaataaaacaaaaatattaatctaaactaattttcttatcaacatatattgaggatctgcaataaaaattatatatgcataaatcatagattgtaaaatctaaacggctgggtatctaaaggtttaaatccacaaatattttcttccgttcttttttgtttaattttatagaaaaaatattgtttctaaaagattaattttttaggttttcaatgcaatacttattagttataattgatagattgtaaaatttaataaataaattgtaaaatttaataaaattattaaatattattaatttagagttattaaaaattataaattacaaaaagtaatatatttaaaaacaacatttaatatgttttttaatatttgtgtttttaaaaaagaattaaacggaaaaaaaatagaggaagtataattttggtaaaaatagtaatttaaaattaccataaaaaacatcattaatgctcagtatacaaaacagttgaaaatacacatgtgaatccacaaaatcccaactcaaagaaaaattctccaatcaattaactctctcacaaaggacgtatcttctctttacctaccaaaaaaaccaaacccttgatttttagttttttacatcataacaactaaataatgataatagaacaacatgaccaagtccatacttcttctaaacaataaaatctccctcccaaaaatctctcatttacagtttcctcaaatctctcccacaaaaatctcatctttcaaggtttcaagatcattcatgggtcttcttcttcttcaacaagaaatcaactttccccaattccactctgaaaaatccaatctttaatggagattcaacgaccagtcatcaatctcatggttcttcactcacaacacgacaaaagtgacaacctttcccgacgagaatctctcgccggtaaatccaaatggagaacctccttatcccgttcttcttcatcttcttcatcaaacaacaattctccgaccaaaacagagattccggcagagtttctctgtccgatctcaggttctttaatggctgacccaatcatagtctcttccggtcactcctacgaaagagcttgcgtcatagcttgtaaaaccctaggctttactccaaccccacctccagatttctccaccgtgataccaaatctcgctttaaaatccgcaattcacagctggtgtgaacggcggtgttttccaccgccgaagccactcaactccgccgccgcggagaagcttatactcgcattaatggagaaaaaaccacaaagaagaaaagtatctgtttcagagaaagagcttatccaagctattagagataaaccatcagtgagacttaaccacgccgcgacggagcttgatcggagacctaattacttcaactcaagctccgatgagtcaatagcttcttcaagccgtacactacagttaacaactaaacctagttgcttctcttcaccttcatctggagaaatcgaatctttagaacctaacctaactccagaagaagaagctttactaacaaagctaaaaagtaatcgaatctcagagattgaagaagctttgatttcgattcgacgcatcacaagaatcgatgaaagttcaagaatcagtttatgtacaacgagagtaatctctgcacttaagtcactgattgtttccagatacgcgacggttcaggtgaatgtcacggcggttcttgtgaacttgtctttggaaaaatctaataaagtcaagatcgtacggtcaggaatcgttcctccgttgatcgacgttttgaaatgcggttccgtcgaagctcaggagcattccgccggagttatcttcagtttagctcttgaagatgagaacaaaacggcgattggtgttctcggaggtttagagccgttgcttcatttgatccgagttggtactgagttaactcggcatgactcggctttagctttgtatcatctttctcttgtacagagtaatagagggaagctagttaagcttggagctgttcaaatgcttttgggtatggtgagtttaggacagatgattggtcgtgttttgttgattctttgtaatatggcttcgtgtccggtgagtcgaccagctttgcttgactcgggtggtgttgaatgtatggttggggttttgagaagagatagagaggttaatgagtcgactcgggagagctgtgttgcggttttgtatgggttgagtcacgacggtggtttgaggtttaaagggttggctatggcggcgaatgcggtggaggagttggtgaaagtggagaggagtgggagagaaagagctaagcagaaggcgagaagagttttggaagtgttgagagctaaaattgaagatgatgatttggtggagaatgaggagattgattgggaggagttgcttaattccggtgatgttagtcggagccggtgtcgactcggtggtgagaaatcttgtgttaactcggccgagttttgacgtgtcattttttaactcgttacttttgttttagttttaattgtgggttttgcgactttttctttttttctttttaaatttctaaataatagagtaggggattgtaattagttggagatgagttttttttttttttttttgtgaatttttatggttgggtggattcttgaattatttggcaatttgggtggcttttctttttgttaattccatcctttttcttcgtattatctttttgcttttataaaatttagaaaacgaacaatgaaaaagattgaaaagaaaactaatggaggacttttaattccttaagatatgggaattgattcttccgtttacaaaatttaaatgaattttcaattttaatttgatttcttcaattatttgcattacactcgatcataactcatcctatattataggttatttttttttaaattatactatatgttatatatttcagaataaaattttgatatattataatagtaagtgaaaagaaaagaaaatttagcaaccagaaaataagattattctatttgatcaaattcagtaatcctcagttatcggaagacgaatcgactaattataatcatatataaataatcacacatgagccttagatcaacaattcaatctcgccgaaatctcaaacatttgctctaaactaactaatcaacaattaaaaaaataaacaaaaacgaaatctcacaaatcgtaataacaattaagaagaatctctaagacgttttagttgatcgcatcacaccttcgtcggatctctcctcgccgtccggtcaaaacaccgtgaagactcaacttctgcatagctccggcaaagtcgttaaagaaccgagattggtctctcgcgtataactcaacgaacggacgggttctcgggtcggagaataaaccgtgatccgattcaagtaacccgagacctttcggaatattctggaaatacatattatcgaatttgttcggagtcataacgtcgttgaagacagatatcgtagggtcatttttggaattcgaacaagctttctttaaagctaccgcgaatctcgggttatacccggtactattattcgggttgacccggttcgtgaactccttgcaatgtgagaatccgatggtgtgagcaccactcaaagcaaccatttcttgaacggagaagcctctggagctgaattgatcgatgagcttcgatatctgcatcgacgggagcgggaggagatcggagacgagagatgatttcgaagttcgtgaatcgcgacggccgagggagatttcgtagtaaggtccaccgacggttacgaggagatcacgtaccgcgacggcgatgatatcggagcaagagactgtgttgggacaagcgagttcgagagctgttttagctcggattactacgtcgaatccgtctccggggagagagagattgattgatgaatcgcgttcggcggtgttgaaagcggtggaagaaacgaggacggaggcgtcgcagccgttggggaaacagtcgtggaagaagaggcggagagctgcggcggcggttgttggagttgagatctgtttgttggtgatggtttcgcggataatgtcgaggaatttagggcatgatttggagtagaaatcgacggttaggtgagattcggcggcgaaggatagtgattggaaggataagcagaggaggaggaggatgatggtgagattcttgagttgagattgttccgccattgttgaagggagattcagaactcttgagcttgagagagtgagagtgaaagaggcggtgagattttaatggaagtagaagagagagtgagagtgagagagtgaagaaaacgcgctttggtttagtgcaaccaccaatcacgggatagaggatccagttattttcttatatgagccggtttattacgtttattctcttaaaccggttgattgtgtttggttttcggttcgaattagaggtttggcaaaaatagttgttatctagtatggtatctacggtttaaaccgatatataattttatttaattctaaaatttaaactctaaccacttttttataaactcaacctgacatatgattttgtttaaattataaaatctaaaccctaattctcatttataaatacaaacggacatataattctgtgtaattataaaatctaaacccaagttattatttataagcacacattgatatttaaccttcctttattaaaagtatacagattttatttttatatttgtttgttttctgattttaattttaatttatttttaaataaagtgtgacatgtcatattatgtattttgattagttattaaagagaggatgaatccaagaatttttcttaatagaattatatgtcatttttggtttgtagagattttcttttcttaactttttttgttttctaattttagttttaattttaatttaatttaaataaaatatatgacatgttgtattttgattggttattaaagaggggggtgaatccaagaattgttcttttttcgatgcttatggattttatacaacaaatttaaattttttagtgtttcagaaaaccttggcccaaaaaaaaaataaataataaagtgtttcagaaaaccaaaccatgttcttctactttaatcacttttatctacttagattacaatcaaacaagtttcagttgatgatatatctcacaacaagcgtgtttaattagttgtttttaatttttagacgaaatctcccttaaaataattgtttctagattcagccattttcagtaaaaccagtttttaaaagatatagctgtgataactatttttagttaatgatatatctcaaaagtcacaatatatatggaaaagtgaaacaaaaaaaaaacctataaaaccataatctctcagttgattaaaaacaccattatctctcaagtcttaatacgaaaacaatggaatccaagagatcatcatcttctcctctactaattttgattaccaccatcatgatcatattcatcatttctggttagtcctcgtcgtttttcaataacaaattgataatcatgtttatatttgacatagttttttttttaatccgaatctgttttagattggccaagactactcacatgcatatatttcttcaaactaacgcttctgtctttgcaggacctaaatctgtcgatgcagattgcaaacacccggttggaccgtacacggactcatgctttacggattgcgtatctggaaaatatggatataattatgaatccgctttttgtagccgtgacgagaccggaacttgtaaaatatgttgctgcgaacttatcaacgaataggtgcatatgcatttgcatgtttcaatgtatggttggtaacaaaaaaaaaaagatgtggagaaagagaacaaattatatacttgtcttccctattttaaaggcaatgcataacccttaaaattattatttacttgcacaatcttgcaatgcttgtaatttaatatatatgacataacaatgtgtatctttgttatgcacattatgatacacacacccgaataacaagttcatccacgaatatataaaagcagtaattacaaactcaatcgggtttcttctaccttaaccacttataccggtgtagattacaatcaaaccaagcaatggcaaatgcagtttagtaatctcaacctgatcattcaaaatctcaccagctctttctatatatccccggtgggcataatcttcaatagcttgaccagatcatatgacttgaaatctcttccaaagcacagagccaagtccaaagctaatttcccatcctgaaaagacagcaagaaaccaaaaccaaattgatctgttatcgaacaaaaacaaactaactattcatatactctcagtttttctctacacatattttcgccattaacacctttgttcgtcttgttttatcagcaccattggtcaacaatatctttgtaatgtctcgatttcggctttgtacagctatatgtaacggagtccatccttcctgtaaaacaaagaaagtttcatcgaatcaaaatcagaaattttttaatggcttgagataagcttttagttgctactaagtactaacattatctgcaacattgacgtctacattgtacttgaatagtagttttacagtctgcaaggctccaacttgaactgcataatgaatcggagctgcaccgtcctgtatctttgaacaatctggttaataaagtatgaaccttttccaaatgggttctacgtaaatggaaccagataagttctcacccgatcttgaagatgcggattagctcctttcctcaaaagatgactaatcaccgcttcttttttaccaatgattgctttgtgaagagcggtttggttgtcctgtttttgtagattcagtcagtgacatgataaacaatagaaaccagatttggtatgtttaaaagcaaaccttgtcaacatcatcaatgtctagtccgttttcaataagattatccattaactgaatctgcattgacagagcaagtgtctgaagtggcttccaactcttctgcagattccatatttacacaataagtatacaaaccaagtgaatcaaaaccactacactcgtagcaatatgatcacagattgatatgcatataagagatactgaagaaaatcacatgaaaacttactgttgagatcatcttgagatttggtttctcattttgctgaagaattactctttcttcaggttcaagaagttgttcaacctctgcaaatactcaagcccatgtaaagcaatgatacacattcacacacaaaagtactaactttgaaactattccagttcttcatactaaaagagtgatcttttacacacaattcggataaaaatagtaaagtgagagactttaaagaagaaccttttgcaagctcttcctcgtagttgtctgtagtagtaagcttttgtactctcgagtcatcttcccaatcactctcgttatctaaatcattcccaataccatcttcttcttctccttcatattcgttttcactgtcgctaccatcatctggatcttcccagaattcatgtttggattgcacggaaggtgttcgacgatttgtctcagtgaaactgcgagttctggccgtggattgtctcttgacggagcttcctcggacacttgtggagagacagtacacgattttcgatttgcaattgacagaatcagagatgggtaatcgtggaagtagacaagtttgtggagggatggataaaaccgaagagaccattgcaatttaaaagctgttctggcttttgcttcaattgggcatatctttggaagtgtcattctgtttcatattaggatgtttattttgtttcacaatataaaatgttataaacaaaaaataaaataaaatcattaaaactattttaaatttatatactttgtaactacagtaaatatttttattggccaaactctatttaactaaatattaaaattatgtttttttaatgtatataaaaaaattagttttttaaactttgtatttttagcaaatacatcatagattttcttgtttagtattaaattataatcccaaaaattatttttactgggattttatttgttttaaacctgtgtcataggaattattatattataatattaaataaacactaaataaacagaaaatatatttttcttttacattttttatagttaattaaaaagaataaaagatacacaaatctcagcaaatatagtgggttttaagaaatagcttgctaaatgaaataatatcactcttgttggaacttaataatctataatattaataattaacgaatctaaaaaaaactataaaatataatatatatatatttttttatatgtgctcaagctaataatataacaagtactttacaaaataacagagtacattagtcttgaaatagaaagagtagttcaaagtgtgtatactaaacaagcaagcatttgagcaacatttaaagtttacaaagtctgtctaatacgaaacagattaaccagaaaatcaaagctgtgttgttagtttatcgtcaaagcccaaaaagcaaagagtagtaaactgattattttacatatgattcaacaccaaaatgaagaagaagaaacaatacatctcaaagtcgaaacaacttatagaacaagaccggtttgtatcgagcaaaggcttgtccgatcgccagtccaaacaacactccgggtccatagcctatcgcagctgctttccagttcaacgcatgttcttgctttggtagttcttgctcttgtgtatgtggtgttgatggtactccatttccccttaaacaactctcttgaagaggaagaccacaaagattgatattcccttcaaaggaggatttaggttgccctccaacctgtgtactctgtggtatttggccggtgagtctgttatgtgacatgttaacatatcccaaaaacgtcagctctcttagctcttgaggtatatttccagagattcggttttgagatagatccaatgactcgagttgtttaagtttggccaacgacgatggaatacgaccagtgaaagagttgttagataagtccagaacaatcaacgatttcaaatcacctattgattctggaatctgtccttcaaaactatttcctgagaaatctatcgacgtgtatgtatctggaatctttcccaactctatgcttcgtccttttattctcaaatgaatggaaggataagaccaaagcggggtctcatatttagagtgttcatctcctgtgtactctggccaacgatatccttgtggggtattaaccaaaggtgcactccaattcgcaaagtagttttgcggtaggctcccgttgaagctgttacgggaaatatcaattatccgcagtgccgtaaatgaaagagagacctcaggagaagaaatgggaccgtggaatctgtttgatctcagaacaatgatttcaagacgcgtcaaagccttcagccagaaagggaaagtgtcgttgatgtggtttccttccacatttagaaactttagggttgtgcagtttactagagaccttggaagcttcccacttatttggttgtggccaacgtcaagtagtactaagcggtcttctatgtccggaagtctcccagtgaggctgttgttactgagtttcaacgcttctagtccgagtgacacatttgtcaagcatctcggaattgtcccactgaagttgttgtttgatagatcaaggagactgagtcgatatcttttgcagaatataagtggtatgcctccagtgaaatagttatttgatgcagccatgatgttgacataaggtggaataataggaaaagatcctttgaaggcatttgaactcaaatctaactccgaaatcgacgaattgaggattatttttggcgtaccttccaaggaatcaaaggagttgcgtgagagatttacatggagcatagaaggcagagtccataacaactcaggcacttttcctttaattctattattggaaatgtctaaccaccataatctttgtaagtccttaataaacatcgggaactcggtgatgttgcagctcgacaagtctagatgtgtcaaattttctgaaccggtaccaaccactgaaacactatttccggaaagatccaaacgcactagagacttgaagagcaagaaatcaaagttgaatgtgtagggtgtcttctgaaaagataagtcaatttgtatgaggttggctaattttgagataggttctaggattcgatgactcataaggttataagccatgtctaaaattaaaagtttagaggttgcagaataatttatattctcaagagggtcactaagatggttttggcgtaggttaagagaaactagaaaaggcatggtgaagaggtaagaaggaatggctccagaaaacttattatatgataggtctatattctcaagaagggttaaactatgtagattgggaataccaccggtgagcttgttatatgaaaggtctaaattggttaaccggcttaggttacttattgaggatggaacttctcctataaacccatttttgctaagatccaaggattccaagtaggtcagtctaccaaatccagagggtataggggacgagtcaaaatgattttcagagagatcgaggtacctgaggtgttggaatctgaagaggctactattagccttgagactagtaagacattgacgaccaagggacagctccttcaccacaccggtctcgctatcaaaggaaaccccactaaaggagtcagagtctttggtccaggagcttatatttgctctagtgtccattcgaccaaagtaatcgagtttccaagtgaggtcgcagttgaaggatggaaactcattcttcaattccaacagaatctcaacttgatcgcgtgggaaaggaaatggtagagtgtaaactgaatcgctggtcacaaagacgcaacagaagaaacaagttatgaagaaaacggccaaattcgatttcatgatatgaagatatgaagaagaaattggtatgtatgatttggtcaattttgcagtctactcttctaacaatcatatataataaagataaagagttatatatataataaagataaagagttatatatataataaagataaagagttatatgtcacatcgcttgctaggaaaatttgagtctttcagcatgtaaatattgaccaccacatatttagttcgaccaagaccgataccaaccgggtagacagtggaccaattaatcaattttctagatactttatattgtctctacacaaacgtttcaatctagacaattatccaactgtagtcttctagatattttttcgatcttgtctgtggcaaaaagatgaatttcattggtgattctgtagccagaaaccacatggagtctcttctctgcctcctgtcaatggtaagattttttttttggacaacatcttataacataactccttaagcttgtgacttaagaaatctcgtttctttgctttggtttcacaggaagaaactccgaaagatatctacctcatggcaaagtttctagtggccggactcgaaaggactcatgctaagaagaccggaacaggaatctatgatctcgacattgacaagcgagcaatgggcaattgatctgctaaatacagacattgccattgccattggaaatcttaacatctcagatagaacagcttgaagatatttaaacgtgacagcttaaaaaagaagaagtttgaggttttggatgtgactagggttatgctaatgagaccagacgggcacccgaattcttactggggaaataaatggatgaagggtttcaatgactgtactcactggtgcttgcctggaccaatcaatgcctggagcgagtttctcatggccatactcagacaactcaggtaaatcttgaggataagaaattttaaaaagtataaggtgatgtcttaattcaattctcattacaacctttagttatatgtgtaagaaagagaagacacatattatttacaggacatatacaaaactgcacatacctggcattgtttaatgtattcatgatcatagcctgcaaaaaaacattgagcagaggaataacagtttccaccattcttagtgttcatgtgaagacatgaaacataaaaatttcctgtgatcttcctaagaatctcaaagtgcataaactcaaaatgatgacacagaaaccaaacggaaattttcattcaacggatcatagcgatctaaaagaccaccttgaacagtccttgtcccaaactccagagactaaaaattacagagaattgagacagaaatagtaacagctaacttactcaccaaccatgactacaacacaaagcctcaattgtatcctaactcttaactctagctatcataacacaattcagatcgaaacacacatcgacaaaagatgagaacataataagagaagtgagaaaggtgagattgataaatagcaattctccaactattccttagaaatatccgagttcaacagtaaagacataaaacacatatcataggaacttctaaagatatcgactttgactacaacacagagcttctatgtgttctagtagttaactctagcaatcaaaacatcattcagatagataaatagcaaattctccaactattccttagaattcaacagtaaagttcgaagctttacatagagaaattacataaaaaccaacaacaacagatcaagactccaaagtgttaccaagaggaaatgagaagacttcacgaacaggagaaaactcaacgagaccaatctccataccataaccattcaccggaagcttcaaatctctcaacacagagaaagcctcagccatacgagacttaggaacatcaagagccacgggacaaaacggaacccaagaatcaacacgatactcttcaccaatgtcaacagattctttcttcaacatatcacataactgagtctgcaactgaagaagcgatagagacggagtcggagatagaaacagtacgttgttgtcgctagagaagctaccgatagtagagaacgagatcgagattggttcttgcttggatacgaagtttttgatgacggattcgagtctcgttgaatcgaagaaggaggtggagaagagtgttatgtgtggacgagactcagtgttgatcaatttggtactgatttgacggcgagcgaagacgttccatgctttcaatacttggttttcgagtgctggatcgaagtatagctcgattgcgtagccttctgacattttattccaagtcggaattgaagatcggagatggaattgaagatggatcgcgatcggagacagaaggaagatggtggagtaagagagatcgatttactcaaaaagggaaagtgagaacatcatcaaatttcagatttggtttgtgcattttaaccgatcctaaccgaatcgaaccgaaccaactctaaatccaactttattaaattcggtttgagttcagcaacaaattacgaatctctgtaactaactaattatggtttagacttttaagatgaagaccaacaaggccaagtttgtggttttaacctaatgatggcttgggttaacataattataattcagtaattagaagcccaatatcgttattgggcctaacttcaggcccatttgtcttatattcaggcacgacgggacaatgatcgccgtttcttacaaccactctccgattataaaccctagccgcgtcttcttgcaaatttcaatttcaatttcactgagaagttacaatccagaggaaaagattatctttttccttctgggttgagggaaaagatgaagaattctgagaagagaggacgtaaacacaaaaggcaagatgcttcatcggcggaaaacgccggcggcgaagttaaagaagcttcggctaatgaagcatcgttacctcaatcccctgagcctgtttcagcttctgaagccaacccatctccgtcgcgacgcagtcgtgggagaggtaaaaagcgtagattgaacaatgaatcagaagctggtaaccagaggacgtcgtcaccagagcgtagtagatctcgtcttcatcactctgatacgaagaatggtgattgtagcaatgggatgattgtttcaacaactactgaatcgattcccgctgctccgagttgggaaactgttgttaaagttgttccttcaatggatgctgttgttaaagtcttttgtgttcacactgagcctaatttctcgttgccatggcaaaggaaacgacagtatagttctggtagtagtggttttattattgggggaagaagagttttgactaatgcacattctgttgagcatcatactcaagttaaactcaagaagcgtggctctgatactaagtatttggctacagtcttggccattggaactgaatgtgacattggtatggatcttgtatctaatttctgcatctgttttctgttgttttgagttgcaatagaatttttaagtagtcagaattgattttagtatgtaattacagctttgttgacagaaactgatgatttactctttttagtgtagtttgagttgcaatagaagtgtaactagtcatattgattttctatggattgtacttttctccttgttatgtctgttataagtttcattgacaaatgtgtgaagtctggagttttactgttcttgtctatgtggctgatgatgttatacacttggattacagctttgttgacagttacggatgatgagttttgggaaggagtatctcctgtggagtttggtgatttaccagctttgcaagatgctgttactgttgttggttatccaattggtggtgatacaatctctgtcacaagcggtgttgtttcccggatggagatattgtcgtatgtgcatggatcaaccgagcttttgggattgcaggttggacaacacatttgacatgatatttttccttatctgactagggagttaagggcacttataaaaatgttttctgtttttgtcttttcagattgatgcagctattaattctgggaattctggtggtcctgcatttaatgataaaggaaaatgtgttggtattgcatttcagtctttgaaacacgaagatgctgagaatattggttatgtcattcccacaccggtgattgtacatttcattcaagattatgagaagcatgataaatacacaggtaagtttcaccgatgattaatgttgtttgttatctatctctacatgtgcttttttctcatacttgaactgttttagggtttcctgttctcggaattgagtggcaaaagatggaaaatcctgatttgcggaagtcaatgggtatggaatctcatcaaaagggagtgcggattagaagaattgagccaaccgccccagaatcacaagttttgaagccgtctgatattatccttagttttgatggagttaatatcgctaatgatgggactggtaataattctttcaataacttattagcaatcattaatgggaccaatgagtgtagttatttctggttaagtctagacaatccttaataacatttctgttcatgtttgtgtttttgcagttccatttaggcatggagaacgaattggctttagctaccttatatcccaaaagtacactggagattctgctctcgtgaaggttctacgaaacaaagaaatattagagttcaacataaaacttgcaatccacaagaggctaatccctgctcacataagtggcaaacctccttcgtacttcatcgttgctggctttgtatttacaactgtctctgttccatatcttcgatctgaggtcctttactgtctctctatctttccttactttctcgctttctctcatgcatccattcacagtttatataactatttcccattgatatgttttgcagtatggaaaagaatatgaatttgacgcacctgtcaagctattggagaaacatcttcatgcaatggctcaatccgtggacgagcagcttgttgtagtttcacaggttggtttctcctgtttcacacgttaatgcagtcataattattttggtgtcgaagcctcaacacccatattttaacttgcaggttcttgtttctgacattaacattggttatgaagagattgtcaacacccaggtttgttaaattgcatttatcatttgtcactttattgaagcatctgtcacgctaaatgttcaaatcgccgtgtaggttgtcgcctttaatggcaaacctgtgaaaaacttgaaaggtttagctgggatggtggagaattgtgaggatgaatatatgaagtttaatctggattatgatcaggtatgttattttctcatcttccttaacttttatacaaacttataaacaatttttagctaaaattctttggtgtttctacagattgttgttctggacactaagacagcaaaggaagcaacattagatattctgaccacacattgcataccttctgctatgtctgatgatctcaagactgaagaaagaaactgaaacagaaggaaccataaccagaaggagagaaagagagatttttgtccatggaaggacataaaagcaaatacagtcatggaaagacaaagagaagctcaaaccataatttgatttttcttgattctgttttgtatttggaaaaatatgcaagaagaaatacattggttattttttctctcatttattttctttgaagtttgaacttggtagaacaatcatatatatccacacaaaaaaagtatgcaaaaagaaagtgaaatggatgagatataatcataggttcttctaccaaatacttcactttccattcatctatatgtcccaagtaaaatagtgggattcgtagcgctttgacattaagaaaccctagtctggtttagctacctgaaccgattttgaaaactaagatcgaaccaattcagtgaaatcaccataccatggtccaaggatcacaaaacaccaattttattaacaaacactaatatgtgtgtctctggtttttgtctacgcctttttttaatgagttttggactattggtcgaactatattataaaatggatgacacacataaatagtattaatctgtcagaaatcactcatgaaaaactaaagtgaatattgattagcttttaaaattatccaagagaggagcattatgtgaaggagaggactctattgctcctattatgtcaactttgtcttccttggctttaccccacaacaccatgtaaaatcctattgatatcaatattcctcccatcacactgtactcaaacatatagaggaggattgagaaatgacatttacatagtgaatttaaaatcatgagaagcaacagttttgtggtataccttccaaggtagagcgactcgccgaggaaaatgaaagttgatacggctgctatcaatatagataacggtttgaacatagacaaatacacaggtcccttgtgactcactgcccacgtatgtataacataatatcccgaattcaaaatcccctatgaaaaatgtatattccataaatcatcaaagaccaagaaaaacgaataaatgaacaaacatatgaaaccaaagttataaatataatgtcatgagtaccgttgctactacggtaattaaggttatgtcgaatcttatgacccatgccttcggattgtccttctctgccaaaaggctcacaaatgcacacacaacagctatgcaaacattgtgcacaagcgtcacaacgacggcagatggatatcgacccattgtgtgagcctataaatagccgagttttgagttaccatatattaatataatataactaagacaactatactatttcaatgacattttggatataacattatctagtaaggtataccataacaaggtaagagacggagacaaggatgtattggagagcaagaaggccaccaccgatgatccaatccgaatgtgaagacattagcattggaccgtggtagagagtaaccacaagtgcacctattattgacaatattgttcccaacactttggctacactactctttttccctagagatatattttccattcttcataaaaaaaaagtgcaagtgagtaaaatataaaaagtattctttctgttcctttttaattgattttttaaacaaaatacacagattaataaaaatatattaaaactgaatataaatgtatttatgaaggccaaacaaaattttataaaccacaccaaaattttttataaactattatggatttgtttatccttctttcctacctaaactcgagagtcagctctcatatcttattataaactattgatatattttcgttatatataatttatactgatatattttatagttttcaagaaattttcggaaaaacattaccttgcacacgttttcagtgatgcttttccatacacgttttaattttattttttcttttgttgacttttcagacaaacgttttcaataatattaaaatgggacaaattttcatgctgttatattataaaattaatctaaaaaacatatttcgtggacttagcgcgagtcttccggcgagaaacgagctactagtgaaacgatgattgaagaaattatgattatatatgtgacattaactaaaacgatagagatctttttcttttttaatttccatcaaccatggagagatttatttttcctttttgtcaacaacaacatcgttggatttcttaaagcataaaaaatcttataacgtaaagcaaagaaaattaaaaagctaaaatggctacgactttttacaagaaacaaaaaaatgattacgactaattaatgatttgaaatatttgggaaatagaatttaccgaaaaacaacggcgaggatgaaggtaaaagcaggattgacattgctcatggccgaagataaagtcggcgagctatattttatcccattgtagcctaagatttgaaacgcacttctgttctttttatgaagtacaaatacaacaaatttaagtaagaaatttcttccataaaacaattttttttgaatacacacttatatgcaattcaagaaccaactaataattggttttgaaacctagctaggaagatatatgcattgcaaatgctactagatatagtgtttccaaaataaaagtaacttacgcaattagaccaagaatccccatgttgcatagaattgaaaatgtcaacggagggagagatcttgatctgtagagataagtctatgtaagaaaaattacttaatacttaacataaaacttgaaacagaatcgtgagaatgaagaacctgaaggagaagaatgtaagaggaagaagaagaagagatccaaaagtgtaagagtatacaagaaccacaaatgggctaagtcctttggacgtcgctgctttgaccagagtgtttactcctacgttagaaaactctgtcaccaccatcgccgtcaagatccagccatctctgttacataaccttccatgaaccattttttagttcttggcttcttctttcttctaagcctctgtctctctgaaatttgtatatattattagttcatgggatcttgatgggaaaagacatgtgaaacagtctccatcaaataaatgattaattgttgtcttcttattggttgaaaaaacatttatttgttgggtatgaaatgtatgtggtctctgaaaaattgtaattaaatggattcctacacatgttgtggctagattaaaacacacgtttcatatttcatttttacatacaaaaagttattgacaaacaaattatagatggatgtatatatcctcatcaaacatcatcaaataattacaaaacgtataaacatgtgacatctatatagatagatagatagacaagataaaccaggaccatcttcaaatgggtacaaaaccaatagatgaatccaagaaattagaagagaagctaaaactaaattcttatttaccctggctctgtataaacagggaccaaccatcttctaatgggtccaaaagtaagtaattaaaggatttcacttgcatctaacatatcttcatggtaaggtttcattttcttttgttgtgtttaggcaacaaaagtgactgctgtgaaagacttgctattttggctgcatcttctcttgctttgccccaaatcacagtataaaacccaaagctcaatatcattgatccaatcacactgtccacaacacagagatgcaacatagtaacatgaagatcatgagactaaacatttcaacaacctataactaagataactaagtttatatcacttatgtttctcaagaaagagacgctatagttgaaagatatggcacatccaaaggtgaagtgcatcgccaaggaatatagcacccatgacgactgcaactgctataaacaacggcttgaataaggatacatacactggaccattcaggtggagaccccatgtgtgtataaccgagcacaatgatgaatcaaatactccctgaaacagagtggtagtttctgagcttaaagataagagtcagtagttgaagcaggttataaaaggtttgactttaaccgagtatatgactgcagcgaggaaatatccggtttaagctgccaagaggtcaagtctttttctgcaaactggtggtgaaattagcattccacataagttgtagaagaagactacagttatttcttcagggtagatctccatgacctgactctgaaatcatgtacagctgccaaatttagcttaagtttatgtgtaaccaacaaaacccaaaatctcattcatgaatcagttccaagtatatgtacctgaagaatataccagactgaaacaagcaaatactgtgaagtgatcaaaaggcctccaattatccaacttgactcgaatgaagtaaaagatgcagcatcaagaacttttcggcctttatagagaacaacaaccagagcagcagatatcgatactatcttgccaatgatctaagccagatttgcagagcttcttagtgttacttgttccatcctttataagtcaccagataaaaaaattgatagtcacaaaaaatcctcatatccatcagaagtttctcgggaaagaatgataggctaacatgttgatatcaccgcaaggttgtactagtacaaccacaattagtggcatgagaatgtttctgcattttggtattgtttcatatttgacagttactgtctgtgttctgatattgtttcatatttgattgttactgtttcagaaacatatattttgtatggttaacgtggaaccactcggttgttcattttctacaaacagagaggaaagaaacaaggtggaacctgaagaagacggcaagtatgaaggtggaagatggtgtgaggttgctgatagcagaggtaagagttggggaactatattcaatagctttacaaccagctacctgtatggaaagtgaaagtgcatgtactgcttcatactatccaactaataaccataaaaaagctggagataattcagattattataacatataactggtgtttcccaatggaacacatatgcttagttctacttatacaactaacacacacatacacagttattgctctgttgagagtctctattggaaatttgagtttattatgcataagagagaaatcagaaatagatcataagactggcttttagtaattaatgtttctagggatgatgattcaaaatttattacaatattagctgaatacagaacaacaacacacctaagaacaagacattagacacacagaattaatcataagaaattaacaaaagtctgcataaccgtaaccataaagttcattctgcatcaactgattcaaccaggggttattcacagattcttctaccgccgagtaatgttgtgtgcttgagacgcaaggatgttcacagctgttgctattgatgttacccacagacatgttatgatcacaaccataaaactccttgtgcatcaacccaaagttgttcacagattcttgtactgagacgcaaggaagttgaaaattgttgttggtgatgttacccatccacatgttctgattctgatcattaccacaaatctcctgcttcattaactgattcttcaactcagattgttcaagtaacgctgagaaataatcctgattgaaatttgatgcagagactgggatctgagacagagtattgtctccatgattatacataaacagcgagaactggctagggttcaaagattgggtctgatgattcagagaggatgatgctaaactgtggtgatccggttgtgtctcattctgtttccgcgactcaagaaattcaagcctttcgtggaatttagagacatggagttccaaggactgaatcagtggagaaacttggtcgggagggtaatgatcagcgagtggatactttaaaacattcaccttcttaagactcgtcttcctcttcttgtccgtattcttcaaacccttgttcttcttcttcttgttcaggaacccatgaagattaacgcttttcttgcgtctcaatgcttcgtttaattgactatacctaagagcaatgtctctcactttctctcgctccggaggccatgtcttgagttctccgtctggtccgtaatagatgacgcaggcttcaatatcacagagagtgcaaagctctgaagctttcttgaagatggtctcaagtctgttgctcaaacttgttgaagcgagtgaataagcggaagaggaagaaggtaaagatgatcgcatagtcattattgttgatttcgaagacaaactttctgtttcagagtgaagagaaaacacgaagacaaactttggcggctttgtgaaaaagatgaagaaagtgagaaggaaactgtgtgaattagagatatattttgatcactagggtttgaaaaaatatttatcactctcgctgatcggtgaaaaaacgcgtaaagatatgtgtgtgtgcgcttttttagattcgatttccatatatttgcatagattttgcgtttagagccgttaagggttgttgataaaatggaaatataagagaaggtttcctaactggcaatatcagtcgtcttacattaattaaaaatccttaacttgaaatagtacaagaaagaaaaacatacaaaattaccatatgtacaatgtagtgtagctatacgtaaacatcaatggggaccatctcttaacagattccacttgcatcagtcacagcttaatgaggcttcttcttctatggtgtgtgaaggcaacaaaggggactgctcagtaccagccacagttttgattgaatcctctcttgcttttccccaaatcacagtgtagaatcctaagctcaaaatcaatgatccaatgacactacacacaatatatatgccggataattagtactgtctcgaaagaaatatttagaaactatatatggcggctaagtgtgacttgtgacgaattaaaaccagaaaccatataactctcaatgtaattccatggatagatacatggcactaaagctgaatgttatggcacctagatattagataatatgttgtgtgtgatatttatgaagattgtgaaagataaagtacctcccaaggtaaagtgcatcgccgaggaacataacacccatagcgaccgcaatgacaatagacaacggcttgaacaaggatatgtagactggacccttaagatgcagaccccaagtgtgtataactgagccaaatgatgaaactaagcctccctgaaacagagtgttagtttctgagcttaaaatataatcattacttgaagcaacatattaggattgattctcaccgagtacatgactgaagcaagggagacacccggtttaagtataaaagaattcaagtctttttccgcaaatagacatactggtgccgagataagcgtagcgcataagttatacaagaatactacagttatttcttcagggtataactccatgacccgagtctgaaatcatatagagctaccacatttagcaagagttatataagtgtcaccaacatatccaatgtcctttttcatacctgaagaatataccagactgaaacaagcaaatactgtgtagcgagcaaaagacctccgattatccaactcgaatcaaatgaagtcaaatgctggtaaagcgaaatggtaggtgatggaggtgtaagagatgcatcagttagaactttagggcctttataaagaataacaaccaaagcaccagatatagatactatcgtgccaatgattttggcctgagtcgcggagctccttaagactatttgttccattcttttgagtcacacaaggaagcagtaacaacaagagttaaatgttcagctgatagaaacaaacacccctctagtttacccatatttctctctgtctcttagaacaacatgtgggcacaacattttttatgcaaccacaaggttgtacttgtactagtggctgtgacaaaagcaaaaggcttaaaactttgaacggttaaataagtgtggaactaccgcattgttaactaaattatctatatactatcccagaacggaaacgaaagaaaaagaggtggaacctgaagataacggcgagcgtaaatgtgaaagctggtgtcagattgctgatagcagaggcaagagttggtgaactatattctatacctttacaaccaactatcagagacatgaacctgtttcccaaaagttagcaaactagaaaagaaaaacaggtaaatgaggctaaatctggtagtataaggagtatatcattacccaacaagcgcaagtaagaaaatattgaagaagacaggggtcttggcagaaggtaatcgttttgacctgcacataaactatgttcacattcttgaaatttttatactggtcaagagtacttgaagagatcagtaccttccaaaaatgagggaaagtggaagaagaacaagtgtagcaacaacataggtatagaagacaaagacatagaagctcaatcctcgcaatgtcgcagccttgaacagtgtattagatccaaccgtaacacactccaccgcgaccattgcagtgaacggcacaacatctctgcaaaagtaactccatgccactgtctcccctcctgctcctcttgtcatagatctgatgtcagactttcaaaaattctcagaagtcaacgtgagtttataagaaatcatagtggttaatcacctcacgtttgctaattattttatttagataaattactccaacaacttgaccaatactttacatcattgtcacaactaatatatacattgaccaatacttcacaccaacttaaccaatactttacaccattgttacaattcaactaaaatacatatcatgaaggatccgatccagataatcagggatcttccaaatcaagaaactacgcatctacaaagaaagctctataccttagaaagataatatttggccatggagctctacctcttttactcttcaaagagggcagggatttatctaccagaaacttatgtaaggttgtgaacgcactgataagataattaaaaggaccaaatatttcttatagattcataattctcattcatatgtaacatcaaaataaaacaagaaaaaaagaacagatatcttatatgtaactatagacatatatggtacacctcttttagggatccatatttattaataaatagtataaggatttcacttgcatcaatcctagcttaatggaaaggctccatcttctatgatatgtgtaagcagcaaaggtgactgctcagaaccagctacagttttgattgtatcctctcttgctttgccccaaatcacagtgtagaatccaatgcacaatatcattgatccaatgacactgcccaacacaaaatatgcaaaacttctatacgttattactgtctcaaaatgcttattgcagtttacacagagatatacagtggaattgtggagactaagtgtttctcacatgtgaaataatacagaagaaaccatatatgagagctcatgtagaatagaatccagaaaccatataactctctaaatgtgattccatagatagatacatcatactaagcatttcaactaccaagagctgagtactatatttctcagtacagataaaatattctgaatacgctggaaagtaagaagataaaagagatggtacctcccaaggtgaagtgcatcgccgaggaatatagcacccatggcgactgcaatcgcaatagacaatggcctgaacaaggatatgtataccggacccttcagatgcagaccccatgtgtgggtaagcgcgctgaataatgaaacgaagactccctgaaacaaagtgttaatttctgagtttataaaatcgtcagttcttgaagcagattataagatctgattcttctcaccgagtatatgattgcagcgagggaaatgtctggtttaagcacccaagaagtcaagttgctctccgcaaaaagacatactggtactgagattagtgttgcaaataaattgtagaagaagactacggttatctcttcagggtaaacctccatgacacgagtctgaaaccatatacagctacagaatttaatgtgtaaacccaaagtcttttttagtgaaattttcaagtgtttgtacctgaagaatataccagacggatataagaaaatactgtgaagcaagcaagagccctccgattatccagcttgactctattgaggtcaactgctggtgaagtgtaacggtaggtaatacagttgtaaaagatgcagaggcgagaacttgtgggcctttatacagcacaactaccagagcaccagatatagatagtattgcaccaatgattttagcctgagtcgcagagctccttaaccttacttgctccatccttaatgagtcacccaaaagaaaaaccagttcaaaaaaaagattgatagtaacaaatagaccacatatcatcatatgcaccaaacttatctcatgaaagaatgagggcaaaccatttctaaccaaccactgagttgtacttgtattagtgagtcttactcttatgtgacgactaagtactttgtagtttaaataaacgtgagaagttttccgtatttactggtatcgattggcatcgaatgctacagcgtataaactactagtcactgaacataagatggaaaacccatgacgtccaaaaaggaaaatttaaattcattctatatacgcaaaaggcttgagattttgtatgcttagtaagtgtggaattactccgttttccactgtctagactaatttccaaaaacagaaacagaagagaaagaggtggaacctgaagataacagcgagtgtgaatgtgaaagccggtgtgagattgctgatagcagatgcaagagttggggaactgtatgcaatacctttacaaccagcaatctgcgacatgaacctgttccactcaagttaaaaaaagccagaaatgcccataaatctagaagcaggagtacgatgttattacccaacaagcccaagtaagaaaatcttgaagaaaagaggagacttagctgctggtaatcttcttgacctgcatatgtacaaaagtaagttcatgttcttgaaaagattataccgggcaaagagaggagatcagtaccttccaaagattacagaaagtggaagaaggagaagtgttgaaacaatataagagtagaagacaaagacatagaagctcaatcctcttaaagtagcagccttaaacagcgtgtttgacccaacagtggcacactccaccgcaaacatcgcagcaaacggcacaacatctctggtaaagtacttccacgccactttctcttctcctgcttctctcatgacagattctgatatcaagatcctcagaaactctctcttgaaaattaaagtgaatttcagaatcaatcaatcatgttgtttttttggttgttcactacaccacgtctgggaatttggtcattgtttaacacaaaaccaagactttatcaatgacgacaatgtggaaaaaatcagcctctccttaattataaaatatcccaacttgacccaaaacttcacatcacaaggatccatattctaatactccacgagaccaaagacaaggacctttagccatagactctaataccttcatcaaccccaatcatccaattggagaaattttccaacttgcatttgaacatatctcctccaatgataaaacttgtagctttgctttagtgttgatgaatcagctccaacatcagaatccaccaaagatcaaaaggaacctaaaactcaatcaatcgtaataacttaagacaaattccaagagcagtgtcatcagtgacctacaattcccccaacaacagaagataaagcaactaaatcacagtaactagtttaaagaatcgcaccaattatcagtcgtacgcggcggagaagctcatgggggacatttctccgtgacctttccggtgacttctcgttcgatgttgccggcgaatttacgaccgtcaaaagaattgatcaacggttagattttgagacgctcgttgacagttacacgcttcccaattgtagtagagtttgatccgtactaaaccgaaaaaaaaaactaaaccaaaccatttcaaccgatatttatctataaaccaagtggtcgaattaaaatcgatataatcggaaacgaaaccataactaaaacgctggttatctgattttcgttctattaattcaaattaaaaacgaaaaccaagataaccgaaaccgaaactaaaccggaatgtccactatagctagagctggtcacgctcctaacagtagatttgattaggataagacaattgggcttgatggtccggcccagtacggatctaataataagtccaaaaacataggaaaccgtcatttttttttgtctgtggagttgaccatctgacatcaatgcacgtgggcccaaatctaaaaaccgctaatttattttcattttcatatttcaaagctttttacttttttaatttcactaatgttgttgttttccaacttttgcctcgcacttcgaaattttacaaaatcactttgctattttcttcgagttttctacttccaccattaaagctcaagaaaaggaaaggttatagcgaaatagatagagatagaagagagagaaaggacgaagaaagagagttcctttaactctctcttcttcctctgcaaatctgacatattgaaccaaaccaaaaaaagccctctttgattagggttttgtgtcaagattctggagagagcttttaggtgagttttgtgtatctctgatgttgatgttattgaaattggaactcttctccacttaacttggagttgttttgttttttgattgagcttttgagatcttgaaaattgagatcttggagttgtttgtttctaagtgacctaaatcttacaagatgtcttgggttcgattcacaattgagcaaaaagatgggaactttgcgtacccaccaccgttttacaaagacccaattctttctccgccgtctcctccaccaccgtcgtccggtaacagaatcagtccggcggttttgtttgtaattgtgattctagctgtcttgttcttcatttctgggcttcttcatttgctcgtcaggtttcttattaagcatccttctgctactgcttcttcaaggtctaatagattcccagagatctcaactagtgatgctcttcaaagacagcttcaacagctttttcatttgaatgattctggtcttgatcaagcttttatcgatgctttacctgtttttcactacaaggagattgttggtagtgctggtggtggtggtggtaatggtgctgctcaagagccgtttgattgcgcggtttgtctctgtgagttctctgagaaagataagctgaggttgttgccaatgtgtagccatgcttttcatttgaactgtattgatacttggcttcagtcaaattcgacttgtcctctttgtcgtggtactctcttttcccctggtttctcaatggagaacccgatgtttgatttcgatgatataagagaagacgaagagggtgtgaccgagaatggaagtcagaaaactatggagattcaagaaatcgttgtggagaaaggtgttttaccggttagattggggaaatttaagaggcttgacaatgttggtaatggccaaggtcaggatgttgttgccggaggagagactagtagtagtaatttggatgcaaggagatgtttctcaatgggttcgtatcagtatatactcggtaactcggaacttaaagtcccgtttgccaacgacagactgccgcgtttgaaacctcaggacaaagaatctgagcagacagggaattcatcatcagaagacaataaaaagatcaatactgtggctaaaggagagagcttttcggtttcgaagatttggttgtggcctaagaaagataagttctcttcagatgctcaaagaaggttgccttcttcatcacttaacgttgatgatcttccgaaacttccatggatggaagaacataagaagctggagaacgacggaaggtagtatcttttgctcatttttcaaccaaaatcatcgatacttagggttgttactgatcatattttggggggttcgtaatcatatgttgtaccatattgttcaaaagggtttaattcttgataagaacttcagttggattatgcttgttaatcatatgagatcaaatttaattatgcatgctcaacaaaaatggattccaaaagactgatgctttagctttattttcattatctttgtctcttttttcttcactttggggtcactggttctctttattttcttcttttccatatactttcctttactctctcaacaaattcactgttaactttataaatataaatgtatttgttatatacatgctggttcctgctggtcatcaactaatgcattatagtatggtttacttttttatttttataacttgtctagaatttttaactgatatactcaagtctggatccagaaaacaaatgggaacttttgacttgtgttcaaacacaatcttgaatcttctctttggtttaggttaggggtttttggctctttgtgctataaaccaaaacaaaaatgaaatcttctataaaccaattacatttaggactttaatttcaaaagtctttggctctaatggtttatgttggttgttgtagggtcaatatgtttttctgacactgatataaaaccattatatacccactcgatcttgatttgattgcacataaacaaataaagaaaaagataatccagaataaacaaatgatgaattagaactctctagttcccttgcactgttgcacatatatctcttaaagtatatgataagtataataatatatagttatattgttatattaataagattatttattaaataatcttactatttataagattatttaatatatatatatatatatatatatatatgagaattcaaattaaatattttcatttgtaagaccaccctctagcttatggaaacatatatcataccatgacaatttggctccgagccaaaacacaaaaagagctgcaaagactattaatccttctaataacctgttttggaaggaaaaaagcactagtccaaaactacagtctaattattgttgtaaatttgaccacaataagtgtaatgcgttaaaatgtaaaatcttcaaaatctatgtcagtgtgaattaattaatttctgtacttttgaaaataaacgtaaatcttgttatagaaatctacgcaaaaaataaagaatttgacctcaggatactaaaaacagtaaaacgtatgcaattaagactaaaccgggattgcattgataaaccgatataaaaatttgaaataaccatccggtttattttccgtggccagcaagtcccatgaattttgtttgatggtcaaacaaatcccatgatatcgctcgtagattttgcatgtgtttgttgtgaattgtactgttggtggcaaatctcgtaattatatagaactttaagaccctatcagtaatctcaaaaactaaattctgacgtggcgtgtaacaacaactaatacggacgtaacggaaaactttgaacacacgaccactctgaaaaattcagaatctttttaattattagaaaaataataaaataaattaaaaacgactaattaatttacgatttcatgcttatccttacgattcaaacaaaatttatcttaaaaccaaattgaatatcattagttttttttcttcgggtatattgttttttaaatatattatgcgttatcaaaattaggaacgttccaaaattagacattgtaccttctttttttcaacagacgttaaattggtattctttttttttgcaaaatcagatattataatccgaccttaattatagcagtttaagataatatttggtcaaaacaaataaatttactagtctttagataattaatagttggataatctttggtcaaaacaaattaaaacgactaattattttcagtttttactcagatttcatgtttatccatacaattcaaacaatattgatcttaaaattctatcaaagtgataatataaattcttgacatacgataattaagtttccaagtcaaagatttaatactatcattaatagttttttctttctccgcgtataaaattgttttaaagtgatggaactattttaaaaattattatgctttatcaaaattagacattaatgcacattccttttttttcttgtcaacagaaattaactttttatccttttcttgcggaagaaaatcagatattataccctaagataatctggtcaaaataaataaatttggtagtgtttggataataccaaaaatagaaaagataatgataatttccaaaaaatgtttaaaataacaaaaataataataaaagagaatcataagttgataacaaaaaagtattacgaaataattaatacattatgataattccccaagtttaggagaatattgactccttgactcaaacgtctctcttatcttaatctctaaaatctctcttatctctctctctctatatatacacacacataatacccaaacgctctcaattaggttttcttctacacttgttcttcttcatttgctctcttcttcatcaatctctctctttttgtaaacggcgattttaaaatggttgatgcaaaacaagttcgtttcatcatcggagttatcggtataacaatctcttcctttccctcatcgttctgattcacgtcgtagttgcattgttgatctgaatccgaagcgtttttttgttatcgatcgcttatgttttatctacatttggtgtagcagatgcgaaactgattttagcttcattgatcacgattctaatggcagctttatgatttgatctgattcctaagcttttttcatggtagattaatcgatgatcatatcgctcatgcttttcgtgtgtgtttaagcttgattttaatggtggatgcttttttggtttggaatttggctatagcttttgatctgtgtttatgtgattaattagtgaaaattctcatgtgattaacaaaatttatctctcggtttaatgcaggaaatgttatctcctttggtctctttgccgcaccagcgtaagattctctaatcctctttatttgcctcactaaatcatataattatgatttatggatttacatattcgagatcaaacctaatctatatgctaataatagatgcttgagagtcaatatatacataatgattagtggttaatttctaggattattgtagatgagaattttgataatgtgtgtgatgtgtggttgttaatctataggattattgtagatgtgatttatagcaatttgattatgttttgtgttagttataactatgagtttggtgatatacaattataggaagactttctggaggatcttcaagaagaaatcagtggaagagttttcgtatgtgccgtacgtagcaacggtgatgaattgtatgttgtgggtgttttacggtctccctgtggttcacaaagacagtattctagtttcaaccattaatggtgttgggttagttatcgaacttttctacgttggtgtctacttgatgtactgtggtcacaagaagaaccatcgagtaagtaattatattctttatcaatcattgatttggtttggtttctaattgtattatttggtgatgtttgatttggttgttttctatacgtgcagaggaacattttgggattcttagctcttgaagttattttggtggtggctatcattcttattacgctctttgcgcttaagggtgattttgttaagcaaacatttgttggtgtgatttgcgatgtcttcaacattgctatgtatggagctccttcattggccattgtaagtctctctgatccttaacgagctaaaatcattttactttgtgccttttttttgtttctaattgattgattgatactgttgttgttgttgttaattaacagattaaagtggtaaaaacaaagagtgttgaatacatgccattcttgttgtctttggtctgtttcgttaatgctggaatttggactacttactcgctcatcttcaagatcgattactacgtcctcgtaagttctcttctctgtataaaacaaaacctattaaaatatttcataaaactttgattatggttttgattttaactgtgtgattatttttaaatttacaggcaagtaatgggattggaacctttttggcactttctcagttgatagtgtacttcatgtactataagtcaactccaaaggagaagacggtgaagccatcagaagttgagatttctgctacggagagggtttaggagaattgtgctttggattctatcttcttacgtacattttacatacacaatttgtgtgtatgtttaggcttttgggtttttatgtttggtagaattttccaatcgtttagtttctggattttgaggattcgtcttggttcattttcttaatacattttttatggtgtgaaacgctttgacggaaatcatcaagttttggatttattctatttatgttttagatacattctgtttctttgttcttatgttcttatgtgtggtggacctagtcaatgctttttcataactcagttatagatatattaataatttattatatagagaattgaaataggttacacaaacggcaaagattctgtggcagtaatttaatgataaattattactcttcaaataaataaattttttggttgtatcatctacttagaagttgaccaattcatgtaaattataagattgactctagatcaaattagctagcttttgaaccaaacaaacaacaaatgtatgaaggaattcaaaaaattcgtccaatgataattgttatgtaggctcaatacgtagtttctctattgcaataatttttccacgtatgctacacacaaagttttacattaattaaaagattttagatctatacaaaacaactatttcagcaacacaaaaagttttacatctcacatccaaatttttttaaattttattaatttgtggtattacactatcatagtagactagtcatagatatataaatacaattcttaaaagaaatgtgtggaaagaacaccaagttcaaaacaaggaaaatttcatggcttttggctcatgacaattcaacgatacgtgtgcttatagtgagaagtgattaatggcagcgaattcatgaaaataaaaatacaaaacttcttcatgaagggattgttcatcaaacatcttgaccaaacggaaagggttaaaggaaaacatcatcatattttgaatgtgacacatgctatgatgtttcaaagagcatttgacaacggaacttttgggcgaatgtattcttaagggaaacttatttgataaatcgtacaccgtgagtgacattacataacttacattaggagaaaacttcatattctttggagaaacactaaagtataccgtgatacatgtgtttggatgtcttacgttagcacagtcaaaagcgacaagagaataagtttgctagatatatttttttcgtgcgttatctatctctatgcaaagaaggggtgcacttttgtttgatcttgacactagagagcaatttgcttctcgagatgtcacaatcattaatgaccacttttcttttctcaaccaaaaggtaaaatcgaatgtatttacatctgatatgttgtcgagtatattgttgcaactaatgagataggtgaatggcatatagactgagtaaaaagcatatgttaataatgtagatgcaggcgagtatacacgattaagtaaaaagcatatgttaataatgtagatgcatttctcaaagttggtttaggttaaaatctattttgttgcttttttagagtaaaataatatcctatgaaaaaatgtcaaaagtagctactgccttcaatgtgaaaacaaaataagccacacaatctgcgaagctgtgcttaaaaaaagacttaagataaaaccgtacgaaatccgaaatcttaagaaatggtgccttgcttttccttttcttacgtataaacacgctgtctgaatccaaggcttcgatatcgtaagactaaggcatgctatatgtacacgcatccatatctaaagtttcaagaccttaaaaaccaaaataaaaccgtttgaaatgaaatgaattaaggccacgtgtaattacatcacacgccttttctttttctcaggtgttgcgtgtacttgagctttgattccatacgttctcatttggaagttttcaaatgcctcagaaactgcttctacctgttgatcaattttgcaaaccaaaaataaaaacgttacttcgtgtgcatcactagaaaccataatgtattaaagattaatgagggttaataataatcacttaccaattctggttttttggcatatactctcactatcatgtcttgatatgttgttggtaacaagtgactgactctgtcctcaggtatcacaaacttctctgcactatcataatcctgtaaacaccatataaatcaatttattgagattctgtgttattttcctctttacacatttacagaagcaaatctcaaaaacaagaccaaagacttttctgtatgtaccttatagaagttgatgctgaaggagccagatccaacacaaaggtaagttggttagaattttaatgagggaaactgagaaaacaaagaagctaaactgtactttttttaccattcaagcggattttctctcccacgagccaagtcaatcttgacgtttgtaacagctatatcttcttcttttagtgtcaagcttgtgtgcttctgttaaatcagaaagcaatataagtatggtaatggactgtacaatatacttttcctctatttaagtgctaaagattgtacaaacctgagaacagatgatatcttgaggagtgacagctttgaaatgatcgattttgtcctttggaaccgcatattcgttacagaactgaaagtcaaaattcatacaggtcaatcttctgaagggaaattcttaacctaattaagcataaaagaaaaagaagaaactgggtgaaaattttatatacttggtacaactgccttctgcgaacacggagtatcagctctttcgcttctgcaagttctggatctggagctatttcgatagttttgaggattgtgtcgtctaactgcatttgtttatggagaacaaaaactatgtaaacaagcagaaaggtaatatttgtcttctgaggaagaactgtaccttccagtattcagatgggtcattaatcatagaagaaatttccaaatgattgttggctttgaccatggcatctactatcatcagctctatcgcctgcaaatgaatggaacgagacaagtgggaaagagagaaagaatagtcaaggtacagagagaatgataatggtataatacctttactttcgaatgcgtgtagacggttcgataaagatcagctcgagttgcaaataacttgtggacactaagatctgaaaaattaaccgggtttaaaatgggatagaagcaaacgcaaatagagaatttaggtgggcaaaacttacactccttggcgcggaagcagatttcattgtccaggactctcatcgtctctgtcagtctagaaagttctaataattagcaatttccttattagaaaccagtgaaatgactatagaatagaatgaagacctttggaattgaaaattggatcccagtccacaagctcgagaatcacggacaaggtagtcaaacctataaatatttgcagacattaaaagttgatgttgtaagataaaggttcaaatttacgcaccatgatgagtgaaaagggaaagaaagaaactgcagacaagtatacaggtaaagaattacttgtccacatcaatcccatttcgaccattagcaacaatatcatacaagaaacgcttctctgcattgccctgcaaattatgaaaaagggaaaatatatacaaagcttaagtagttgttcatgtttgattagaatagagaacatacttgttataaaacttactttcagctgtgaaaattcagtactagctagtatcatgtcctggtcagttaacattagagaaaatcatcagcaaagagacaaaggaagcaataaatattaaattggatttgtaaagactggaaataatgtcacaatttccagtttcaaataatagaggccatttgagggaagcaaaacagtcttaagaaagaaagttaccttcactcttttcagcatttgagcatcaatatcgatgtgatgtgtatcaaccatatggtcaatcatgtttacagacattaactcatgagacctgcatcgaagaattggcatataaagagctagagataatccatagaagccaactactaaaagttaaggcatagttcttataatatcaagtaacaccatggcattgatcttttcaaggaatgtgcaaacataccactgacagtcacttatgacctttggaaggaattcacgctcaaacatatgactgaaaggcccatggccaatatcatggagaagtcctacacatacaaacagatcagaaattgtatcaaggaataatgtagtcattgagctaataatagttaccacttaccagcaagtctcacagtctgaagatcataattgtcaataccaagctccattccctatagaaagttaagcacgtacattacaaaccttaccatacttaaatcaaaatgtgactgcaccactgaaatccaaattaaaacctggaaattttttagcctctgagcagtttcgcctgcaagccaatacacgcctagagagtgctcaaatctcgaatgtacagctcctggatataccatgtttgtcactcctgaaccattaaagaaaaactcctctcaacgaaagaagatacacaactcaagactcatttctgttaaaactagaaaccttaacgaagaatctccttaaagttttcaaggaaaatttcctatatttgacaataaatacatgtttatcgatggggggaaaatagacataacaagactgtcttcttcgttaaacaagaggagaggcaacttgagttgaaaacgcaagccaactcaccaagttgctttagttcacgaagcctgaaacaaggaattagaataatgaatcagaacactgtggttttagcaagtcattcattgaaggaaacaagcacaatccaagactttacctctgaaactgctcagtgtcaatgaattttaaacaaagctgcaaaccaaaaagtgaactattagtacagatgccatgttgagtcaatagtaaactacatttgggaactattagtaatgagattccatagacatatgaacgtaggcactctagtggtttagagaatatgaaaactcttgtttacacagaaaatacgaaacaattttagcaaaagccattaacaccagtaaatttttgcagttggttcatcaaattagtctccgactcaaaactcaaccatacatttcataattttccggtaaacagcaatctctaatccatccgtgactcgatagttcaattaaattccgacgaaatcacggcgatgaatgtaagataaacgaagatagtatccagattccaactagaacaaacggcaccggaatttcaacagaaatctccatagaaacagttctagagcgtcgctccttatctctcgcaaacgaaccattaggaatcacagaaacaggaaacgaagatgattataaggaaatcaaccacttacaggatcgagatagatgtttccatgaacgttatcgtagacatgcttgctgaaccggagctcgttcgccggagcgccggaggagaacaccggtaaactacttaggttttcgtcgcaatacgctcccatcagttgaaatttcacgtcgaactcactcactcgccgccgtgaagcagttacgttgagagaaactgaaatgggtacaacgacgagaattgagaaagcgattttaaaagctgcagagagagagagagagagtaatgatctttattaaattcctttttgacgtttttatgcgattaatattccactaaaccttaaatgaaaggaaaagtttcgaatagatccctgtactttgctaatattccaataaatgtgcatatatttaaaattacttagattaaaacctcaacttctattccgagtattttttggcaaatataatgacagcaaactgaattatcacggatgtggcatatgctcatgcattttgacttgattctagttagaagataatttatgattatcatgtgagattaattttatttaatattaaccttttctgattatcatgtgaaaaaccatttttgttaaattattggatttgaattccattaacaatagatttatacaattttatttttttgattctaacaaaataatgatttagatagttttgatataatatctttttttttttaatcgcaattgttcatttctttgcataaagtaaaatctaatttttaaaaagaagcaacttttgataaccaaaaaaaaaaaattgacaaccaaacttgcaatcataagacaaatcagcatttttgtaaaagtgtgagcgttttggccaatatattacataacttctagtttgttgtgcatatagttttagtaaaggggtttctttgtattaaatggaaaatatagggctatatcgcaaatttcgtgttttaggtagaggttgtttaggtggtggactggtggtggagaagtgggtttatggtgacggttcagaaaatccggaggatgatcatcgtatctcaaccgatcagttacgggataaattaattttggtatcgttaaaacaaatcgaaccggcatttaccagaaccaaattggtattttataaaaagacccatttacgtggacgctcgagcacgtaagcccaaaaccagattattgtgtttatgaatcccttctttctccttctagggaatcgatttattgctgctctcaaatcttcccgggaaaaacaccggcgctgtaatttaattggtgtggctcctgatctcttatctaatgttctatacttggctgttgattttgaatattgtttttgctgctcttcttttaatgatacttggctcttcttatctaataaaaatactttttaaattactactttaataccttccatcattactataaactactcttaccttctctgcttcgttagcagaagcaaactcaacaaagccatcgcccacatgctcgcccgtgtagtctacaataagtcgaacatgtacaacttgtccaacgtctttgaagaaattgatgctgtaaaacaaaggataaatattagtcatgaaaaatttgctccagtaaaatgaaagagaaaattatcggtgctacttacatatctgatatttgagcttccggagagagacgggaaacaaagagcgtcttttttcttacagcaactgcctgaatataacagccaagtgtgttagctcgactctttaaggagaaagaaagaactaaaattgcataacaacaaaagtagattcatcccccaaataagtcatctttcgactttgtggcaacagttctgttattaaatatctaagcctgacatattttgaagataataagaacaggtacctcaacaaaattgggagtttcatcaagtccttccactgctgtctcatcttattctatcacaaggttttgtcgtcgaaggtagtcttcgtaactgaaacatcaaaaattctagtgatctcataccaagaactacacccaatgtgctcatgataacaaaactcacaaggaaaatagttaaatcccttaccaaagcttctctgcaaggttgtacctagttaccaaaaataatagcgttagtcttctgtaagggtatcaaaactccaggaataagtcacaaccagtgttacagaaaacgtgaaaatcaatttacttgggtcgtgtagggtatggagctgtcttagccacttgaagaaaaatctgatgatcatgcaaatattcaccattcttcttttgcagcgcctacagtataaaagatttagtcagcaattgtacttttcaaatgactacttgaatacctttttcataattacaacaaaactactctcaccttctttgcttcgttagaagaagcaaagtcaacaaagccatagcccacatgcttggtttacaataagtcgaacactaacaacttctccaacatctttgaagaattctttgctgtaaaagtgaaggataaaatatcagtcatagaaaacttggtccgagaatgaaagtggaaatttgaggtgctacttacacatgcaatattttagtttggggagagagattggcaacatagagtacttcctgaattcaaaaaaatagagattggcaatattttagtgtgtgaataatattcatccctaaaaagaagtcatctttcgactttgtggcaacagttctgttattaaaatgtgtgagcgtgacatattttgaagaggtacctcaacaaaatcggaaggtgtctcattttcttctatcggaaggctttctcgttgaaggtagtcgttgtagctgaaaaattaagaaaacctagtgagctcttcatgtattcaaaaattcaaccagtgtaatcaaactcaagaggtaaatagttaaaatcccataccaaaccgtgtaatctatgcaatacctaattaacaaagttaaaagcgttagtctagcagtaatattgtatcaaaagctctaacagtaattaataaccagtgtcaccagaaacaaatgtcaataacatggaaaattgaatttacttgagtcctggaggtcgtggacgtcgtggaggctgtggacgtcgtgaatacacataaagaaaaatcttataatcgtgcaaatattcaccgttcttcttatacagcacctacggtaataaagagtttattcagcaatcgtacattcaaattgaaacttagatacactatatatttttcatcataactaactataaactagtctaaaccttttttgcttcgttagcagaagcaaagtcaacaaggccatagcacctatggatacgcttggcggttacaaaaagtcgaacacgaacaacttctccagcatctttgaagaaattgatgctgtaacaaacagtgtaaggtaaaaatatcagtcatgctcagagaaggaaagtggagattgaagatggtgctacttacatatctgatattttagtttggggagggatatggccattaaagagcgtcttttttgtcacctggatttaacagccaagtgtgttagcacaagattcttaattgaacagaaatttgtacaaaatatctagcaaatccgttggttgtttcctcctgttacatatgatacaagatcaaagagtagccattagaagaagacagtgtaaagaagattgttttgtcaaagaagaagagtaatacgaggccatcttagggttaccttattctacttatgtctcttgagaatggaattggtcaccaaatcatcttcttcagggttacgcttacctaaaagaagagcaacaaaaaaaaaactcttgagacaagtttaacacattagataaaagagagagagagagaggcaaccaaaaacaaacccaataaattgctactagaagtggccatggagaagatgaaacgaggtttatgtatttttccgttaagagcaagcaataatatagccctaaagaaatatagacctagcctaggaagaagtttctaagaccatccttatcaatgaactcttacataaagttctaaacaattttgatatacaaaataatgtttaaacattagaatggctcttacaaaaaaagagaataaagaaaaaaaaaacttagctaagagccatttttcatttcttaagcacacttttttatttttttattcttattttatttaatataatattttgatagttcttatgatattgttaacaacctattgataaggatgctctaactaatcttataaataaaacaatgaatctggtttggtctgggcgtaacagaaattatactcttttttttttttgtcaagaggaaattatactaagaagcaacagattaaacattaaagcgtatagtaaaattaattgtttgagaatcttaaaccaaaccgaaccggtattaaaccggaaccaaattggcaatgaaatttagatgccagtagtaacccgcttgattcgtttgaagtgtgtagggctcagacttgaccggagtggactcaatcggcgaatctgtcacggaggacacggggaatcaacgcggcggagagtgatggaagagctttcaagcctaaccgtgagtcagcgcgagcaatttctggtggagaacgatgtgttcgggatctataattacttcgacgccagcgacgtttctactcaaaaatacatgtaagctcacggatttgattttctagttttcttcatgatctgatgaattttagtagcgtcgtgaaagaattattttcgtcgatagatgaatcttactgatatggaagttgttctatcctaggatggagattcagcgagataagcaattggattatctgatgaaaggcttaaggcagcttggtccgcagttttcttccttagatgctaagtaagtgacatgatgcttggcttcttgttttcatgaatttcttagtacattttgtccagtgagagagtaaagcccctttggatttttgccaatagattagaagtttgattttggcttttttggattttggaacagtcgaccttggctttgttactggattcttcattcaatagctttgcttggggagactgtggatgatgaattagaaagcaatgccattgacttccttggacgctgccaggttaggctcaattccttttgcttgtacccaatcatgaaaactcttcatatttgctcttgcattcttcttgattttctgctcctttagttcacgttttcttttcccgttgctattagtgttatctgttattgttctttatgtacttagtttgctttctcatgtcgcttgtcagggctctgaaggtggatacggtggtggtcctggccaagtaagtatatgtctgtttctttaaagtgtgtggatcactttcatttcatgcaattggagaataaacattgagaccagattattttattctgccagatctcttttaggtgttttttttatgcatcatctcattgtttggttgtgatgcctttaattcaagcagcacacgtagtttaagtttaagtttttttctgtgaagacgtaaaatggtgtctttagttcaagcagcatttagttgtttaagtttgtggttgtaaattttccaaacatggcagagaaagttaggatatataacttttggtctgcctttttcagtttcctttttttttctactagtaatggagatattttttcccagcttccacatcttgcaactacttatgctgcagtgaatgcacttgttactttaggaggtgacaaagccctttcttcaattaataggtggtgcattcttttttctttgtggtcagtttcttttattaagagtctagtgatgtttcctctagaatacttacatgtgactcattcttctttcagagaaaaaatgtcttgttttttaagacggatgaaggatacaagtggaggtttcaggtttgattctctttctgcttgaacttcttaaaggcatcatttttactgacagctcactctttatgcattcgtatcgctgttaatgccataccttcagtcatgttgtttttttaattcttgcttaattctacttactcactgatcgttaggatgcatgatatgggagaaatggatgttcgtgcatgctacactgcaatttcggtgagttttaccaacttctattttccttttctctgtttttgtggacaccaaaactttttaggattaatgagatcaacaaagtctggacccattatgctatgtttcttccgttttcatggcttaaacatcacattcagattacgatatgatcttattatttgcacacttgcgcccaccagatactttgaatagagattactcgttttgagacttacacgtgttgcaaatgcatcctatggctggttttctccctgatatgtttgacttctctcttgtgacacaggttgcaagcatcctaaatattatggatgatgaactcacccagggcctaggagattacatcttgaggtagcttttcttattacttttatctcgcattatatatatatagctgaactactgttatacagttgtaaattcaggaattcattaatttccctgggaaagctcttttaactcgatttatattgagcagttgccaaacttatgaaggtggcattggaggggaacctggctccgaagctcacggtgggtatggtctcctacttacttccattatgttgaggcttagataaaaattgtgctttgcttccctcttccttgatgacatggttattgatggttaagtataattaattttctgaaataggatttgtcacctgcagctttgcttattaccaagttgttttttgtttaggtatacctactgtggtttggctgctatgattttaatcaatgaggtcgaccgtttgaatttggattcattaatggtaacatacaatgctgtttggagatgattaataattttccctgagagatattttccttaccaaataatttccttatgattctagaattgggctgtacatcgacaaggagtagaaatgggatttcaaggtaggacgaacaaattggtcgatggttgctacacattttggcaggttaactttctatctttcaggattattattggccctacttctaaattcttcaccgttgttgtcttttcttatttcctttgggtatatgttaaacaggcagccccttgtgttctactacaaagattatattcaaccaatgatcatgacgttcatggatcatcacatatatcagaagggacaaatgaagaacatcatgctcatgatgaagatgaccttgaagacagtgatgatgatgatgattctgatgaggacaacgatgaaggtattcaatcaaatttctcaaccatcaagtccatctgataattcaaaacacaacgaaattttagttagcttatatttgcagattcagtgaatggtcacagaatccatcatacatccacctacattaacaggagaatgcaactggtttttgatagcctcggcttgcagagatatgtactcttgtgctctaaggtcagtccagaacaaaacatccagtcaagttaacacttaacatttgtataacacaagcacacacacttgtatgcgcagatccctgacggtggattcagagacaagccgaggaaaccccgtgacttctaccacacatgttactgcctgagcggcttgtctgtggctcagcacgcttggttaaaagacgaggacactcctcctttgactcgcgacattatgggtggctactcgaatctccttgaacctgttcaacttcttcacaacattgtcatggatcagtataatgaagctatcgagttcttctttaaagcagcatgacccgttgttgctaatgtatgggaaactccaaacataagagttttcgtagtgttgtaacttgtaagatttcaaaagaagtttcactaatttaaccttaaaacctgttacttttttattacgtatataccatttatcatatctttggtttacgacttaaagaatttgatgattgttgaaagacttgcatcgttattggttttagagaattctgacaaactcgtgtagtagaaatgcatggattcgtagtgaacgagtttgtatccgatatcacctgaacgtcaggtgtttcgaaccaaaaattggatgttaaaaccaaaaaatagatcaaccaaacatgaacatatctttgttcttcaaatcttgtcgagatataatatttaacaaaaaaaaaaaaacttattacttccaccgtcaccaattcccccccagaaacaagaacccatgtaatgaagtaaatcatggctaagccacgtagttacatcagtacttgagctttgattccatacgttctcatttggaagttttcaaatgcctcagaaactgcttctacctgtagaataaacattgcaaaccagaaaaataaaaacgttactttgtggttaaataaaacgaaacagtaatgtaatcataaaagagagtaataatcacataccaattctggttttttggcatatactctcactatcatttcttgatatgttgttggtaacaagtggctaactctgtcctcaggtatcacaaacttctctgcactattataatcctgtaaataccatagaaaaatcaatttgtttattgagattctctgtgttattttcaaggtttcctctctttacacatttagagaatcaaatctgcataacaagaacgaagacttttatgtatgtaccttatagaagttgatgctaaagaagtcaagcacaaggataagttggttagaactttaatgaggaaattgagaaaacagagaagctaaactgtactttgtttaccattcaagaggattttctctcccacgagctaaatcaatcttgacgtttgtaacagctatatcttcttcttttagtgtcaagcttgtttgcttctgttaaatcagagtgatacgtatatatggcaaaggtcctcactgtatataaaaatagtttcctcttattttgctgtgttaaagattacaaacctgagaaacagatgatatcttcaggagtgataggtttgaaatgatcgattttgtcctttggtaccgcatactcgttacagaactgcaagtaagaagtcatacatgtctttcttcagaaggacgatactttacctaaataagcaccaaaagaaaggtaaagtttgtataaaaaagttacttggtacaagtgccttctgctaaggcggagtatcagctctttagcttctgcaagttctggatctggagatctttcaatcgttttgaggattgtgtcgtctaactgcatttgtctggagaaaaaaatgatgtaaactacaagcaaaagagttttgatgcagagagggaaagatttgtgtaccttccagtattgagaaggatcattaatcatagaagaaatctccaagacattgttggctttgaccattgcatctactatcataagctctatggcctgcaaagaaacaaatgggaaagagagaaagaatagacaaggtacagagagaatgataatggtacaataccatttttttgggatgcatgtagacggttccacaaagatcagctcgagttgcaaacaacttgtggacagtacgatctgcaaaaaaaagtcacccgattttacataagaggcaaatgcaaatgcagaataaatatgtatcaggtggacaaaactcacattccttggcggggtagcagatttcattgtctatgactctcattggttctgttagtctataaactactaagaatcagtgaatgtcaaaacaaaaactgaaatgactataaagtagtatgaagacctttgaaactgaaagttgcaccctagtccacaagctcgagagtctcggacaatgtagtcaaacctacaaaattttcagttgatttcgtaagcatcatgatgagtgaaaaaagaaagaaagaaactaagggaaagatagaattacttatccacatcaatcccatttcgaccattagcaacaatgtcatacaagaaacgcttctctgcattgccctacaaattatgaaaaaaagaaaatatatacaaagcttaattagttgttcatgtttgattagaatagagaacatgcctgttataaaatttactttcagctctgaaacttcagtactagctagtatcatgtcctgtagtgttaagtaaacatttgagaaaatcatcaccaaagtggaaaatatttaatactaaaggtcatttgagagaagttaaacagtcttgagaaagaaaattactttgactctttttagcatttttgcatcaacatctatgtgatgtgtatcgactatatagtcaatcatgtttatagacattaactcatgagacctgcatacaagaactggcatataaagaagagctagaaagaagaataaatccatagagccaaagtagtaaatatttttattttatttttgaagaaaatgtaaaatttattcgaaaaagcgtttgtacatcagcaatgtagtaatatttcttgtatcatatcaaattatcaagtaacaccatggcattgaacataccactgacagccacttatgacctttgggaggaactcacgctcaaacatatgactgaaaggcccatggccaatgtcatggagaagtcctacaaaaatatacaaagagatataaaaaattgtatctcaatgaataattaatgtagtcatatatttagctaacaatagttaccagcaagtctcacagtctgaagatcatgattgtcaataccaagctccattccctataacatatacattacatacttaacaaaaatgtgactgtacgtaccactgaaatttgtacaaattatccaaatacctggaaagttttgagcctctgaacagtttcacctgcaagccaatacacacctagagagtgctcaaatctagaatgtacagctcctggatataccatgtttgtcactcctaaaccatgcatgtaagaaagaagatacaccactcaagacttattacagctacagctaataaactaagcaaaagaaaaatattttggagaaaaatatttctatattttccttctagcatttcatacagtaattctgaatataatgcttctttttttttggtattgaaaaggtaagaaaaactcaccaagttgctttagttcacgaagcctgccacaaggaattaggataaaaagaatcagcacatttctcagtctgattttaatataccttttgaaatgagcacaatccaacaactaattacctttggaactgctcagtgtcaatgaattttaaacaaagctgcataacagattaaacaatgagttttcacagacttatcaagtggtttagagcatttgaaattcaagccaaaattggaaaaactctaaatacaaagaagataatcacatcacagaaaatccgaaccatttggaaagtgagaagaagagaaaactaacag

SEQ ID NO: 800 - DNA, 86263 bp, Arabidopsis thaliana
gatcaagatagatgtttccatgaacgttgtcgtggacatgtttgctgaaccggagttcattcgccggaaaacaactcaggtcttcattgcaatactctcccatcactagatatttcacgtcgcctttttttttggtcaagaaaacctaatctgtaatactaatactcgcacacgtcagcaaattaaaatctaactgttgaaagtttctgatatttgtaatctgacggacaagattttcttcatgtcaatttattacccaaagcaaactgtgtctgtttcgcttaccttccccgagttaaacactttgtagaaaccacaaaacctactttttttggtcctcaatattgaatgttgttattggtaacacatcaaagtctttaatggtttagcggcagaaacgataaaaggataggtttgggaatatttttcgggaaaaatgtcaaaaaaatcgcgaactttcaaatttgggatgaaaaaagcataaatattcaagaagacaattaaatcctaaagtttagtttgacttttgataaaatgatcaagttttgttaacttgaccatttagggcatgtcgttaagtttccgtcaaccaaacaatcacagagttaactttccgttagaatctctcttatatcaaaacgacgtcgttttgaaaattagaaaatgaaaaagaaaaacagcagttcaagtgactcgaaatgctgatcttctgaactaatagaggaattcaaccattaacctgcattaacattataatatcttacagacatagtatatatatatatatatacacaaaacataataatatacaattaattaaatatctgcaatttattaaaaataacaaaactaaataaaatcaacaaccaaatatatgcaaatattaaatatatttaccctcaataaatatttggaaatttcaattatttagtttgctatgttagtttcttctatatttgaaaaattattgatttctaaattatataaaacaaactgaaacttggataaattaatttgtatttatattataatatatattagataaatataaaacataattattctaacttgaaattgatgtaatattaatagttagatagaaaataaataaataaaaattattttagttacattataagaaaaagtgataattgtattaatggtatatatatttaaatgaaaaggattgtataattttaaactcacatatttaatattatatattctaatggtttctgttatttttttacattatatatatatatatatacatgctctgtttaccataatacaagaatattaatgtagttcaatggttgagtgtctcttataagtccaaaaggtcagttgttcgactctccttgttagcaaattttccttcttatattctaatgtccaaaatgacgtcgttttgatttcacggagattctaacgaaaagttaacaccgtgattgttttgttgacggaaaattaacgacaagccctaattggccaagtcaacaaaacttgatcattttatcaaaagtcaaaataaactttaggatttaaatgtctttttgaaagttcaggttttttacgtcccaaatttgaaagttcacgatttttttgacatttttcccgatactcttccctgaaagctcattagataatttggaaatactctttcccgtgctcgaaagttcgtttcttattccacaagttaataatacgaagaatgatgcataggagggttgagacttgagataaacaccaaatcttttaatcctaatccctttaaataaacaattagaagattattttcgggcattagaacgaaacccctttttactaattaaaacaagctaataattcaaatgtaccacgtccataaacaccaacgtaaagcccaaaatatatatgctgcatcatttaatcatcagtttgtttcaaaatttatgttgcgtcttttttatatgtatatttttctttttagatttgatctccttaaattgtttcacgtcgactatctatgtttggttgtgtgcatgatgcatcttctgtaagtcttttcatctcaagtttatttatttcgttttatcgagaattaagaatttaaatcaacgtttttaataaattgatgattttaataacactttcgccaccaataaatcggaagaaaatgggattatatgtttcaaacaatagtttaggttaaagttgcaagaaaccaaagaaaccaagtccttttgcaaacacttatttttaaagtaagtctttttctcgtcttcttcctcatttgtgtccattgaccaaaggtggaagaagaagagcttacttcatcacttccgctgtcaaacaaactcaaattaatttttaaaaacccacaaaatatctacgaaaatggaagaattagaaaaaacccagaaatttcagaagaagaagaagcaacaacaagagaaacaagaccagtcttcaccaatcaacttcgagatgtcttcaagatcatcacttcattcattaccacaaacaacgattgaatcacctcctgattcaccaaccctctcttcaatccccgatagccatggatcttctcctcacacgattattccaactccttctgtggccaagacggagactccttttagggttactaacggagaggaggagaagaaagtcagcgagagtaggagacaattgagaccgagcttttcttcttcttcttctactccgcgtgaatcgaaatgggcaagtttgattaggaaagctctacttggatttagggttattgcgtttgtttcgtgtcttgtttcgttctctgtaatggtttctgatagagataaaggatgggctcatgattctttctacaactacaaagaattcaggttcaagtttcaaactttcttagtatctgaacatgttttgaaggatcattagctttaaaatggttcctagattgatatgttagtacctttttatcttagtttaggtttggtttaatctgagctcaaagtgtttttggctagatgactttgatttggtctaatcactgtgggaaatttgaagtttttaccttgaaattagctgttgaaatttaagctaatgaagtcatctaaggttttgtatttatcggagatcaagtgtagttggctagagtagactctgatttggttcaatcactgtctggaatttgaagcttttctcttgaaactagctatagaagtcgttttagctaatgaagttatccaggaataagactaggtttaggtttgattttcatctgaggtcgaatgtatttggctaaatttggtttaatcactgtatcgaatttgaagctttctcttaaagtcgtttaagctgagaaagttatccaatgaccagtaataaaactagattttgatttacatttgaagtcagacatatttggttagattactctgatttggtttaaatcactctgtgtatattcgaagctttctgatgaaattagccacggatgtgtgtaaagcttatgtagttatctaatgacatgttctagctaaagtgtaacactttttcctggattacttttttaactgctaatatttcttgcaaatgttttcttgcgtttgatttatttgtgtatgttgtttggcatttttggttgcaggttctgtttggctgcgaatgtgattggttttgtctactctggttttatgatatgtgatcttgtatacctgttatctactagcatccgaagatcacgacataacctgcgacatttcttggaatttggtcttgatcaagtatgttccttctgcctctctgtgattgtatactctgttcttttagtgaatacccaaattgaaacttgatgtgatagaactaaaaagaagatgagtttttagtgaatctgattggtcttttctaaatactaatcgacttcatccttatcaaatgtgattggtttcatcatttgagctaattctatctgattcttgtacataattttagtattagtctctgtttgatgacatatcatttatgttacctccttactgatccattaaagtttagtgtggctatggcttatatagtcttttgcatttgaattcaactatgttcccgctaaaatgatatatggatgttgcagatgctagcttatcttcttgcatcagcttcaacttcagcttcgatccgcgtagatgattggcaatcaaactggggagcagacaagttcccagacttagctagagcatctgtcgcactgtcttacgtctcctttgtcgcattcgccttctgctcattggcttccggttatgctctatgtgcactccggtccatctaaactaaacaagcgcaagctcgagacaaaaagtctcattttgtctactctcagaagttgtatccttgaccctaaacgggtccagtttctgatttttagaagaaacttttattttatatagtggagaatattccatcttgttaaaagatggtgcgaatgctcgtttatacatcactttatctatttcactttttattatatagttctaagaaaagctatatgatgctatcttctccttaaacttttgatttagtgcgattgcttttagatgcttacatttaactttaagaagtcagtatatctaagtcaggtcagagatatgtcaagttaagtattgacattttcttactaaaatagtaacttttttacacttacacagacgcgtatgaagtacataaccatgcatgagttacaattacatgtaacatagatgatacaagaatgccaaattaccaccacaatcactaataaagataatgtttattcgattttcaattatactttactaaatatatcctcgcatgcatcttatttttcggagatgatcaagcaccatcagtataactttctttttcaagcaaccgagtccaagcaccagcagtaatagtctgaacgtgaaaggtcgagcaactcctctggagacatcctctctagttcattctgcctccacgccgcaaagttattgtggttctgcgtgtccgaggccagcggataggcctcggccctgtgtttctgatatcgcattctcgtgtatagcctcattgtcgcgacacagtcctcgtaaggatcttgtattcccacatgaatatcataactttacaaagccaaggaagttgaaaattagtaaattactacaagaaccgcaattattctagattgttttagttaaagtactattttaaaatataactgatgaattctaaactctaatctaaaacaaacctgttaaactcaacctagctctaaaaacgaaatcattgacactaacgtaaactaaaaagtatatttctttagtttgaaagattcgactatttttcatattaatcccagttaaagatttgtatttcttagaaaaattaaaattgcaatttgtgtatgaaagtatttttggaaaaccttataggtaggaggggaacaaaataagacatacgaacttttggttatgaatcacaataatataaaatatgaggtagagagtagagacagacaaatcgaactttgatatggacgagatattcttaggattatcatcggttgattttattcgaattcttaagaaactttttaagctaatacgcatgtcgtactttatacggtgattaataacttttaatcatgtcaaaaatcggataccttctttactagcttatagttgttgcgtccgaatatcacacaagatttgttttctttttttgaaaagtatatgcatggtttagtagatgaactattttgttttcaagttgaatattttttaaattatcatggaacattttaaagtctgatcaatagattttcaataatttatgatatccaatatgacaatgtcagtttgtatactatggaaatgtaaaaaaaaaaaaacattacccgagataggcttgggttaagtacttgagagagttgcttagcttgcttgatttcatcaatggagggtattccgcagtatctctattaacaacaacaaaaataattgatataattgtaaaattcccactatatacatatgaattgtatataaatcagcggttaggaaaacaaaaacaaaaaaaaaaatcgtcttggtttacaatttctttttatcatctatatgaaattcagttcagcaaaaaatagtgtatttagtttaaaaactaaacggtcaatatccatagtgtatttaatagtatatcgatagggttcttacacgaaaggattaatgatactaaagttgaaaatggtcagtatcttttatttcttttgataaagagttaaaacggtcaatatctttcttatcacatattttttttttcacttttatttatgaccatagattatagactaaaaaccaaacattatataacttaagaaattagtgtttctagtaaaagtatttatttaccttatcatagaggaagaatattcaagttgaagagagtcaagatggttatcaagtccatgtccaacgagaatccttgctttcccatttcttggacgaatcttccacattggttctccattacaaagaaactcttgaacctttctctgtgcgtgctttaatcgcattgcgtcccttagattttcaggtcgaatccctgtcatctcatacctataattcgttacgggtatcgttggcttcacatacgtgtggaacacaacattttcgctctcatccgtaatgcaaactcttgcgcataggtcaagcgatccgtcactgcctcctccaaccatcttgcatgagagtgccaccactcgaggtgacctcgaagaagtgtagtcaattgttgagttgtttcttaggcctaaggccgccatacgaatcattaatccctaaaatatcagtaaaaatattagattatatattatctatatgcatttacgtttaatactaatgattttttaaataaggtcgtttttagtattttaaattttaatatatatattttagtaatgtttaaatgcaagattaaatatacattgaagaagaaataattatgacatgtatacgatggttatttcatatatgtgaagatgatatatacagaagtgacgtttgagagctggcatctctcttgatggattctacgagcgttggggctttcgaggatcgtaagacagaatctgcagccgcgaatgctgaaaatgttcttacattcttgtttcggcaatggccctatgtacgatatgacccaaaatgaaatgaggaaaagtgaaatattaaagacaagttatgaactaggttagagatatatataccaatgagatgttcacggagggagtcaaaagatcggcaatgtttgttgcaaataccacaagtaggttcatgaaccgaatgataagagatcctcatgtgttccaccaagtgctccttcttgttgaattgcctataacaccctccacacttgttcctgcatgtatccatatgtttttaataataatttatactttatatatattttagatacggtttcgcactagattagtaaattacaaatttacctagttaagattacgtattgttcatgtttgaaagagttttatgcatacatattcgatatcattagatgtcggtggtaatagaaaaaatgcgtacaccaatggtggtacaattatatcaaagaaacacaagattttactctaatatagataaataccttagggtttctgaggaatccattaacaatctgtagtccatagtaaataacagcaacctcaaatatgttgcgttaatcaggagaatttgattaaacaggtttaatcttctttgtttttttttgttttttttttaaatgttgatctgtgtgtcttgatttgagaatatatgagaatgcatgtgtgcttatataggcaaaaaatgaggcaaaaaagaaccagaaaacaaaaataaaggcgaagttagattattccctaactattctaacatagaccaattttgaggtttttagggtttaaaaaaagggcgatgcctttctcctgtatggttctagtctcatggttatatatatacgattcggatatgaagacaattcgaatcgtacgttattgagcttcgttggacattgattatttagctatttctataaaactacctaaaaacatactcatgttggtgtagctagttttatgaaacttttcatataaaaaaggtcgacaggttcaatttactcaagtgttgcattccatgatacaaaatctataagttcaaataagaaaacttcttatcttcgtctatggaaaatctaaaatcataccatacatatcaatataaaatagaagtacccgaaatttgcaatgcaaaatattaatttggatatatttcttaggggagatatggtttgcaataatggtaatagaaaaaaaaaggtttacatatgtttagtagagtggcgaaaatgatttcggtgtttattgttcgttttgtgttagggtcaaatatagtccatattattatttttatacaactataatgattgtactaaaatttgttgggatcagatgatcttccgatgtttatagacctctctgccctgggtcagcctcctataaaattcagaatataatcgttaaaagagaatgccaaaaaatttgcatgaccattgttcaaatttgtctaaatatatacaatcattaatttcggatgacaaaaaaaaaaaaagataatttttctcttttcatttgttaagcactgaaaaagaaactaacgttacaattttactattaatggctcatgcatattcccttatctctagctatgtatgctgaagataatggttggtataatcttattttgtgtttcaagtcttgtatttaagtagcgtggacgctttattctcatctctggatcatactcatttttatatcatttacgtatagtaatttaagattcatattcatataatgaatcagagtactacctcaaatgttatctataatgtttcaacattcgaaatgtttcaacattcttctaggatatacacttggggtttaactttttctaagtcttacaaaatccaagcaaaagactatcttttgaccggtatgtgggggccaagtcaattattctatatgtgtttttttgtttgtatttctgctacaaaaatatgctagatcttgtaacaaattcctttaaaaagagaaatatatatttatgaacattatttatatgaaaatttgagaatgtatatggtccactgtggtataacaccaagtatatgcactcataaattttctatttctatggtcaaacaaaaactttgaacacaattataatatattagaaattactgacaattgctctcaggcaaaaagaaaaaaaaaatataaaagatcatttttattttagtaaacatatatgtgtgaaaattttatttcttacagtaactaaattaatttcatttagcttcttaaatagtttaaaaatcggtacgcaagctttcacatctagaagctacaactccttgcgccaataaatggtagataaatattttagagagcacattatatttctttgttagcataaaaatcttgtggacaaatctttttgtttcataattagactcatcctaccaaaacaaaacctcacttaaccgaaatgacttcgctttatgattctgaatcatttcaaatcttataagaaagataatttgggacggtctccactaacacttttctgattgacgtgtatgaataattccgaatgacagtgttcaatgttaaatatttattagaataaaaggagatgctaaattaatttgaaagttattttactgtgtaattgaatcatatggaatatatatttacgtttcacaccgagattcataagactaacataaagacatcattgaacagtcaaatcttctataccactattaaaagtaaatgtacttagggaatatcatgacgacatcatgggattgtcctctctaattatttcgtctctgaaaaataaaaaggaaaattgcaaattgcaaatagaaaaaaaaaaaaaaaaagagattgaaacttttggaaaacgttagaaaaagctaaaatgatgcctctttgacccaataaaaccatgaagcttttaagttgtgaccgtctagaaaattttttttaaaaaaaactttgatttttaattattttttttgtttctagttaagtgtggtttaaaaaatttctattttttttaatataagtattgtgttcacttttctatgtaaacattaaatatatttaatagtttttaaccaattatattttacatcatatttttgaattggttgaattagttataataatgatgttttttataaaaaaaagataaattaaataagatttgtatgttttcttaatttgtgtgcaaaaaccttaaaactacaaatattcataaacatagaaggagtatttaacaacagtaggtaaaatggtaacattctgattcgggtaaactgggtttaccttttttcattctttggtacaagggatggtttggcatcctagttaagagataagaaaataatcatagttatccataattgaaatcgtaatgagaagacttaaattctgatcttttattcaaaatgaatcagtcatccactagaccaccattaattattttgtaagaataaagtttgttacgcatgatttatagtggattcttgggatttcctaacatgatattaggcagttacacttacacatatctactggttaaatcccttatgtaataaaaaaaaatctcgagttcaaaaacttgaggtcttttccaaacattgatttttgggtgatttgcagaaatgatcatgtttgataatctatttaagaatataacactttaatatgtaaaactaagtaaataacagtagaaagggatgaaaagtcaagtaactccttgttaaaatatgagaatacgctcgtgaaaagagaagaaaagtgacgtgatctttcacactcttttcggttaatggacattcataaaaagacaaaagtgttggctagcgtgatggtggcgaagatggcgatgatggtaatagtaacaatgacagtaccgatggtgatggtgacgacaacagtggcggtgccgatggtaatagtgatgataacagtggcggtgccggtgacgatagtgagacaacagtggcggtgccggtggcgatggtgacgacaacagtggcggtgctggtggtgatggtgacggcaacaatggcggtgtcagtggcgatggtgacgacaatggcggtgccggtaacgaaaagataagtacaaatatatattgatctaagaaaactaaaccttaagatactatacatggaactcaaacaaaaatcattaaacgaaatgaaatcatctcaagtttcaattttcaaaaatctagcagcaaaatagaatagtacaatggtgacgatggcttcggtgacgattttccggtgatgatggctccggtgacgatttttcggcggtggtggcttcggatacgattttccggcgacaatggctttaaaggtagtggtggttgtggtggtagtggaagaaaaaaagaaagaagagagaagatgttcatgcagaagaaagaagaagaagatggtataattgtatttattacatataatatacataatatcaccttatggtttttgaagtgttagtttccaaattactaaatttttttaggttatacttacaaatttcccttgattttatccaacgtcggtgccatatacaatcgttgttaccagatgatgtatgttagtaacttactaacgtttgagcacaaaaatatcatctaagaaatatatggatatttaaagataaagttgttatatataattaggggtgtcaaaataggtaacccaactcaactcaactcataatcaaatgagtttagggttaaatgagttatgggttaatccaactcattttgttaaatgggttgggtcaacccataactcatttaatttgataggttgagttgttaaatgggttaacccatttaaataataatttaattaattattattataaaacaataataaaaattatcattattaataattattaattcattatcatcaaacttagaatatttacagattctaccgtttacggatttacgtttttggcggaaaaattacgggtttacgtttttagcgagaaaatcacgggtttacgtttttggcgggaaaatcacaggttttcgtttttggcagaaaaatcacgggttttcgtttttagcgggaaaatcacgggtttacgtttttggcgggaaaatcacgggttttcgtttttggcggaaaaatcacgggttttcgtttttgactggaaaattacatgtttttcgtttttggcgggaaaatcacgggtttacgtttttggcgagaaaataacgggtttttgtttttggctggaaaattacatgtttttcgtttttggcgggaaaatcacaggttttcgtttttggcgggaaaatcacgggttttcatttttggcgggaaaatcacgggttttcgtttttgacggaaaaatcatggttttcatttttggcgggaacatcacgggtttacgttttttgcggaaaaatcaaggatttacgtttttggcgggaaaatcacgggtttatgttttttggtggaaaaattacgagtttactttttctcaattcatcgcttgtatatttaagaaatttggaaaaatattgattttattagattggtttagatgtgttggttaaacttaaattggcattggtttaaagattttagttggtttaattcaattttacaaaacttgataggttaattgggtaaaccattgaaaacattaaccattataactcaactcattttattcatcaaaccaattgatccaataattcatttgacccatcaactcatttgagtcaaaaaatttaactcattagtgttcaggggttaagtaaagttgagttgacccataaattttgatccattttgacacccctatatataatacgtacaattcaaaaatataaagtctagtttttttttttttcgtatatggatacttcaatagtagttttttttttaataattattacttgaatagttttagattttaaatcatttactttatcactatttgtcgaagtgtgtattttcctagctatcttcccaaaaagaattaattaataaattacgagcacaataccaattttttcgcagttctgaaaatactgtaacccaaatattcgaatctacacagtctcaaaaaacgaaaaggttcatataaaatattaattccttaacggctatatttttctccttcttccattttttttctttctcaattgatatatccaacgacaacaaaaacaaccaacaagaattagttcgtcgagttcacaaaaatggtcctagttgaggagctctctgacgtatcatcacctacaaatgaagcaaatcaagcatattcctatgatgatgatgatgatgatgatggatcattaaccccatccatggtgtttgaccagatcatgggaacttctctgatgcttccatttcacgaacatcctgtatacaaccactatagcagcactggtcaatgcgacggatgccccgaacttcgagaaaacggtctccatggctataactgcaatacttgcgggctcaccgtccacaaagaatgtgctgaatcatcaccagagattaaccatccttctcaccagagacaccctctcatgctcctaacacatggcttaccacaagaagctgaagatgacaaatgtcgtctatgtggagaaaaggttggaaaattagtttatcattgttcaatatgtgacttcagtttggatcttttttgtgctcgaaacccgctttcactagttgtttacttccggaaaggtcatgaacatacactcactctcatgccaaggctcatacgcttcacttgtaatgcatgtggtcttgaatccgatcgatctccttacatttgtgctcaatgtgattttatgatccatgaagattgtatctacttaccacgcgtcattagcatcatacgccatgaacatcgaatttctcgaacttattttcttggttctggagattggaaatgcggagtttgtagaagaagaatggatgggagatatggagcatattcttgctcgatttgtccggattatgcagttcattctagatgtgccacgaggagggatgtgtgggatggattagaacttgaggacgagccagaagatatcgaagaatgtgaagaaccgtttagagttgtgagtgatggagtaatcaatcactttagtcatcgagaacatgatctaaggcttgaagatggtcttactaatcgccatgatgaaaatattcgatgcagagcatgcgtccgtcctgtctacgctaacacattctacagttgtatgcaatgtgatgatttcattctccacgagacatgtgctaatcttcctcgaaagaagcgacatgtactacacaatcatcagcttactctataccccgatgacaacatagtcatggactttccgatgcttcgtggagtatttttatgcactgcttgtcgccgactctgtagtggtttcaggtatgaatgttgcaatatcaaattagacgtacgatgcggttccatatccgaaccatttttctacgagtgtcacccgcatcctctgttccagacttcactagatagcaaggtatgtgagacttgcaaggaagagtcagattatgttctaacttgtatggattgtgattatgttttggatttcgagtgtgctactttaccacctacggtaaggtacaaatatgatagacatcctcttaaactatgctacgatggagacaaggacatggccggtagttattggtgcgagatatgtgagaaagaaatggatcaaaatataatattctacacttgtgaaagttctggtccgactattcatatcgagtgtgtacttggagatttcaggtatgtgaagcctcgactacattttgagttcaataaaaagaaatgggaagtggctttgaatggtataaaccgaccaggatgctacaaatgtggctttcgttgcaagggaccttttgttgcagtaagtgtagactatgatattagttatgtttgttctcttttatgtttatggaaaggagaaactctcgtgtacggtagtataagagattgaattatattagactatgatccatctttttttaacataattacatcaatatcagttggtttataagagtcttaacgcatgttataaaatgtttacaaataagtcttataacattttaaacaattattagtccacaaaatacaccaaatatgatgtagcttatgattgattataaaccaattgatattgatgtaatattatgctaaaaaagaagaagaagtactgcttaaggaagataaattaaatggtgaagaaaaaatagactcattgaaatctaattgcgatgtaaatatcttaatatcaaacattttaaactcatgcctatgtaatatgtatttgaagaaaaatcaaacaagttttttgtccgtgatttttttcttctaaatagtatttttggaaacttcccattgtaaatagcggtaagaatatgtggtaattaaatgaatgagttaaagaataacactgacaaagtgtatctagcaacatacctcattacaaaggtagtcaaagttctcattccgtttaaaacggaatgcaatggtaaaaataaaataatttcatattctgtaaaagctatagccttataatttacaaattgctaccacacagttatttaacgaaaaaaatcaaagcctccagtagagttttcagcattttaagtaagtagatatttttaattaaacagccatgaaaatattaatttttttttttttcatccaattttagttagaagtttaaaatgtcaaaattaaaaacattatttatagaaatgatagaaattgatttgatgtgaacttttcgcatcagattatccgtgttgaaatattaaagataaaaacgaaatgtaacaataaaaatttgaggggtcacgagtcatggacctttcgttagtgtatttctatttacagcctacccacttgtgatcgacacatcaatgattaggaaacctcctctttatttggagtacacaataaattcataaattaattaattattgaatgtataaaaaattgcacgtgaccatttacagaaaataaattccaattaaaatcaatgtgtgaatgaaaataaaacatgtcgattgccaacggcttggttagacagacaatagcgtgttctgagtttgactgtgctaatggtatattgatgccttcttttcttgtataacatctcccaaaatacctaccaagcttattagcacaaacaaagttcacttgaagctttaagctgtctcatggactttgttttgtgagattatatgaggtccattaaaatttgccccgactttaaaatcaaagaaaagaaaaagaagaaaagaaaagaaaatcgagagtgcatagaaaaaactacaaacgcttttgatcttatttggaagttcaaaatacttttaattaactatccatgttgatcacaaagagatttctttataaaaaaacttttggcacttatatgacacaaaaatcacttcatatatatagttggtaacttatccttaaattactatatcttaaggagatcaactgttgaatctttctctaagtgatttaaagaaaataagaagataagtgaaactgatgatgtgctagtcaaattgatattttaaaacatcttcacatgaacaactatttttaataaattaggtattacagtcactcacttacaaagtatgatgttttcatttacaaaaaaaaaaaaaagttgttactcactacaatgttagtctaaaatgcacacaataatcttggtaggactctcataccataaggccctttaactaccatgcactccactggtgatttcacgtttcttttcggtttagtttattggttttagaatattagtatagtttgttgttcaaacgggaaaaaaaaagaatattggtatagtttattatttggatccacacaagactaaaatacaacaaaaatgggtacatttaaattctttttcacaagatgtttataatgatttatgggagatttataacaaaccttataaattattgatggaaaatctaaatgtgaatagctctatacagaaatttaaaataataaatgaatgcaatgagatgaaatgtaagaagcaaaaacagtttaattacacaatttaatggttaatttctattttttttttctttttctaataatatataactaaagtatcatttgacaaatgcatttaagaaaggaaattatattttagtaaataacaaaataaagattataaaagggtatagttgttcttggatatatactttaagattatgcctattttggagaaatttctctcatgaaatattttaggaagatcctttatgattatataatatcatatttatgataccatttcttaatatagtaatttatgtttattgaaaattttatcccatgcaatgtcaaaacctagtagagaattaagattgcttagcttattttttagtctataggactttacgaatacaatgtatgaaatacgaatgttagtgtagttaattaatagattagatgatcaacatcaactagttgggttgatctgaaagtaagttttggaattaaaaggatctataggtcctatatcattaattatccataaaactaataaaagtaggctaaatcaagtggaagctataatctatagacgtacataattcatatgcccgacataatatatttagtgtagtgattatcatattacattactgtctagagtttggtatcacggatacttatgtttttgtatcaaagatgtttaattctatagtttagttataacttataactgataacattgtttggagaatagtaactattcttaaagcaaattttacatgttaaactcttttgtttttgtttttttttgtcaaagttgtgtattcctatttcctgaacaaaactattatatacagactatattcgtatattatattttttgttgtcaaagttgtattttcctgtttcatactatatatatcgacttcaactccctccattgggatccgatccaaaaaataatactcatatgaacatatacacacatgacatattgacatatcttagctggatgagccagaggatcttctatgtttggtattaatataaaaagtaaaaactgcctactgtctatcccaagggaatattattgtgtccaatagtaattaccttcctttttttcaattttcacttctacttaacttgttagttgggatacacatgtctacctagacatatcttgttacagtttttacatactttattagatatggataaatttggttataaataaatcccagatttttctttcaaaacatatttactatcaatacatttttaaaatgaaaaacaaaatgtgaggcttgagtataacatatgtaaaacaggtgtaaaaaagtaaggaaacagatatagatatatagtgttacaaaaaaatataatacaaatttaatttaatttataacttttggtaaattataacgagcaagaaatttgaaactcggaatatgaagtaaattatttcgttagatcaataaaatatttttctaacgggtgttaacacacaccacaattttacgtggacgtttttgctcttaaatctcaactaaattttagatttttaatttttaggcaaagcgtttccaaatctttcttataagaaaatatacaatagaagaaacatagtacaccgttttcaactaatagttgaggaatattgagtttattcggatcacatatttttagtattgttcaaccaaaaccaacaagatagagagtcaacaagcccttccagttctttatatagtttccctactaaatccatctattaatcaatttgagaacaaactcttcaaatcctctatctccttttttgataaaaacatatttttactttgccacaactaactaatactatactttattttatttgatgaattctctcatatattagtaagaagaacatgttgtctatatctacacccgtttaaatggttaaatcaatttcgttaggttgacttattggtaaaagaatgtagggattgactttaccatatacggactttttggagagacaacagcaaacaaaacaaacatgtccttacgtatatatatatacgcacatatacatgtaaacaaaacaatatatacgtcacacgaatcatatatatatatagagtcaggctcgactaatcatcaccgactcagccactttctctctctctctctctctctctctctctctctctctctctctctctctctctctctctctctctctctctctctctctctcctcgggatcaagaaaagtgaagaagaatgagaatgacaagagatggaaaagaacatgaatacaagaaaggtttatggacagtggaagaagacaagatcctcatggattatgtccgaactcatggccagggccactggaaccgcatcgccaagaaaactggtatttatactctctctttctattatagtactctcttatttcttctggtatacttgctcttacttctctctttcttgtcctaagaaataaaaattagtactaaagattgaaacttttgatgataattagggctcaagagatgtgggaaaagctgtaggttgagatggatgaactacttaagccctaatgttaacagaggcaattttactgaccaagaagaagatctcatcatcagactccacaagctcctcggcaacaggttcttttttttctccatatattcaaagatatatatttgcttaattttcttttatacaattctaatagtattatatatgttagatcatgtgttttgttgttcggtgctgcattcacgtgaatctttaaattgtttatatgtgtacagcttgctagctatatatcacatatatctaatccataatttatatatttataatatatgttttgttgttcgatccttagttcacggtaatctctaaattgtttattattatttatttatttttggttgaaacatctctaaattgtttagttgtgatatagattacttatatttaactgatatattatattcatttattcataaaataagtgtattttattaagctactatttacaaacgtccacaaagcaaataatggttattcaaaaatagtagtaagaaacggatcgtaaatttgaatcaaaaatcttagatctgtcctttgttttttcggccattaatttgtatagctaggtttctattcaaaaaatatgctttctcgaacctaacaatgattcataattgtactcatttatggatcatctgtatatatatacacatgtctcatataaacatctacaacatacataatctggctacatgtattacgcacatgctctatataggtccatgcataagcattaactccgttttacaagatttcttgtttcaaaagtttgccacatatttatagcacattcgaaaatccatatagtgtataatacaatatttatttattataattgaagattaagagaccacaaataaaaatattaatctaacatcgtaaattcttttaatatttagatggtcgttgatagcgaaaagagttccgggaagaacagacaaccaagtaaagaattactggaacacacatctcagcaagaaacttggtctcggagatcattcaactgccgtcaaagccgcatgcggtgtagagtctccaccgtctatggcccttataaccacaacgtcctcctctcatcaagagatctccggtggaaaaaattcaactctaaggttcgacactttagttgacgaatccaaactcaaaccaaaatccaaactagtccacgcaacaccaactgacgtagaagttgcagctacggttccaaatctgttcgataccttttgggttcttgaagacgacttcgagcttagttcactcactatgatggattttactaatgggtattgcctttgaatatctttgatgattagcttctaaaaagtaattaattatcgaataatagattataatgaacaataataataatatgaatacaattaaatttttttccgaatatttgcttgtagcttttgtactttcttttgtaaaagtaaggatgatcagttgataaaaaaatcttatactagaaagttatttggttatgtccctaatgtaaccaacttaaatatcctattagtttacaagttaagtgtttatacttctacttcattcgtacattggcgttcacataagattttccgtattttgtacagaaaagaacaacttaatcaaattaaagtgataactagtgcattttcagctgtgaaaactaactcttggtttctatatctaattctggattctccaaaaaaaaggtcaatcctaacttttagtgtagtggaaaatacagactaccaatatctaatttatactgtatcatttagtttggcatctttctaataatgatttatactcgaacatttataaataaatggtatagttttaatatgtgagaaaatctaaaatgataaaaggagagtaaaatataatcttcgcttgcataaggtcggaaattttttcattttaagtcaacaaatatggtcaaccgagataatccagctgttacaagccttgattctacgtatcacccgcttgtaagatttttataaaatgaatgaggtcttgtcaggttaggctctttgtgtctcttaattatacattaattacattgactaatgttagagttctgaaatcaatgacgattaatctatcatacatattcatactttagataagaccagacctcgtacgttggaatttgaaagttagttgaagaagccaagactgttagagattattttttctggttgacttaaataaattgttccaacaaaaaagtaaaccaaatcattaaaacgtatttatgtcttaaaattaaaaccaatcacgttaacgtgacttggtagatttcgtgacagcaatggatatcttgaattctcatcttttatttatgaattgaggagcaatataatcatctcacatttattttgtaagaatttatcattttatgtcatttatttactaaataattttatattttattcatatttaggcattttaattgtttcataattttattattatcatagatgtgataaactaaaaaatagtagatatattgtcccgttattttttcttatgtatgtattttactgcacataaattaatcttctgaattttttattttttatttttttttaattttggtaaaaggtgaaattttataccatttttgtttttgacagaattacaaggaaaagtagaagcagaacaaaacaatttacagaaaattaaagaacaacattacaactctaattgcaaaggatcgccgatgagtgatcaaggccaagttaggaggagaaacaccgattccgagtccgcgaagctcggaaatttgcgttgttgccgcagtaccgaagtattggaatcctcatcctagttgccacgagcatgattattcaaggtccgtccacaaaacctcaaagatagaagtctacagcttctccgagaactaacgcaaaaacgaacaagcaaacatgaacaagcaaacatgattaagcctaatgttctgaatttgataattgaatttgaaattggccaaatatcttaattaactcttatacattatctggatacattttttgtgatcaatcaaatggttgaatttgttcattgtcttagaacatttatgttgttggatcactaattagcattacgtaaatgattcagtctcgacgagactccctttctaataaaaatctccaacctccctctttgtatggcttcatcaaacattcaatactcgtcgaaaggattttgaaaattttgtttgtaatataataaaattagtgggctttcaagagagtgataaaccaaaagcccactaatgggtttagtatcaaagttggtaaactttaaaaaagtctacacaaaaacatagaacatcgatctaattctgtctaccctacgacaagatcatagtatcaccaagacattaacctctcaaaatacttttgttatgttttgcagaaaccataaatatcctaaaacctgtcctgaaagttctcaaccaacaaaataaaaacataaaatcataatcctaagaagatctcatctctatcactttctccaacaaatttaccatctcaccttcaagtttcactttcacttcttcagtcattcctccttcgcatccatcaagtaacaatttcatctcatccagctttttcttcagatattccacctccattgtcgtctctgcaacttcagcttcagttttcttctcctctgttctctcatttggatacttgagtctgaatttcaccgtcgaattagaagtaaacggacatttctctagtgaggattcaaaggctttttctccatcagctacatccaagaaagccacatgggcagagaagttgttgtcgaccgtatcagttctctctttgtccaaagctccaaatttttcatatatttcaatcagatcttcctttttaggcaaacttgaaccaggaccaaatgtaacatatagctcagctcctgaaaattccgtctcagtttctttctttttagactttccctctctcttctttttcttcttcttctcgggtttctcagtctcattcgggacttcttcttcgtcgtgtttaggcttcttccgttttctctctttcttggttgattcaacagactctttccgggtttcttcttcttcaactgcttctgccttcttctttgattcaggattcttacgttttctctcttttttagttgactcacttggctctttctgagtttcttcttctccatctgattgcttctttgattcagacttcttacgttttctctctttctttgttgactcattagcctctttctgggtttcttctccttcacccccttccttctttgattcagacttcttacgttttcgctctttcttcattttcccatgcttgtctgtctcattctcttctttaccagttacctctatctcctctgctttctgctttgctttacccttcttatctttcttctctttccccttagttacaggcttacccatctcactcagttcttccttttctttatccgaactatcatagctccctaagaacttgtgattggctccatcatgatatgtgaagcttctatagatggtcatgaattctcttaccatgtctcttgagctactgtcttttggatattgtgtgccaagagcagctacacgaattagatcctgcatttcctttggtgtagctcccaacctcagaaagtcgacggcattactaagttccctagacagttcttcttgacctaatccattatcagatgatggttcacaaggtttatccaacgtatcttcttccacttccatgaggctatcactagcatcagtcactcgctcgtctacttggctctgacttgaaactttcgaagattcagattcgattgtactcttttttcttcctttccgtgaaaaatctgacaagaaatcaggcgagagatacttgctcttcttcctctctctctttgatgtttgtgtagcggtctcgccattttcagtactcctttcaacgactgaatcatcaaaccttacctttttccgcagcgaagctaatgaagttgaatcgatatttatttccagatctgaaatctctttttcctcagactcttctttgtctccactcccatcatcatcgccatcatccacatccattttcttcttcttcctcgaagttttgcctttgctactttctaccacttgcttgttaccaccgtcttcaattgtagctacttcactctttcttctcctccacagtgcagtagtagttacattttcaagatcaccattaacttcatcatggcgttttgttttcttcctacccgacttaacatttgactttacatctccatccgcaggttctgtctcaaacctaaccttagcagctgactccttctcaattatttcagtaatgcttttctccttccttctgtggggaagcctatgatcaggaaaaccagaacacttctctaacgatctctgaagagacgacgactcttcatgatccaaagctgctacttcttctactctagaccgtttagcacgccattgtaacccatcattaacattcttttcttcatcatcatcatcatcatcattgttcttgtcttcaagtcctggaactgattgaggttcatgatactcagtcaaaccatatcctctattagaccgataaaacgcagataccttccttttcaatatctccagctcaagcaagccactaaaactaacagtctctgcaaaactcttaacatctttaagaatctctccatgtttaccaatcaacaacgacgaaatcatttcccgtctcacatcacgcaccaaaacaccttctttaatcccagcattgttaactaaaggactatcaaactcatgcttcttctcctcagcacaatcacataccaatacacgctcaatatgtctaccaatttcttcaaccgcctcttccactgcacctagaaaactccgcgaattactcactttcgaacactctttgaaactctctgcaaacggtttcaactgcgacgcaccgcaccaagcaaatgtcccgtctccgaaacacgccacaagcaatttccctttttgctttatcttcaaagccaaatctgaagcatctgatggatcataaatctgacctggccaccatggatgattcttaatttttccccacacaaaatctcctacacagtatccatgctcttcttcttcttcttcttcttcttcttcttcttcttcttcttcatcttcgccatcttcttcttcctcttcttcttcttcttcttcttcttcttcttcttccacatcttccttcaatttgagcaaggaagaaactccattcataacacaatcttcaataactccagattcgttcaaattcttctcatttttctcgtcaacatcaacaacaacatcagactttttctcaccgttgtcggaaaccctaacaccgttctcttgaacaacaccatcatcttttagggttttctcagctgattcaatctctgcagaacaaggcttaggtcccgcatcttctccgattcccaaaacaacttcaatttccatttttcttcccgactgtagaaaaaaaaaatcacaaaacgacaaacaaatcagaaaaaaaaatcaacctaactatttacacacaaacccaacaatatctcccaaaaaaacaaattttgaaattaggttaactcttacgaaaaacctagaaaaacgaaaatataaagtaacaaattttttacctgattttgagctccgagagaaacgaaacaacaacttttcgaacagcgaccgaagaatcttcaagaaaaaacacttctttgtaagaagaacaaagacactctcagaatctcatgagaaaaatcctctcttttttttctctctggattttgatttgagagaagatgaaacgcggcgcaaaaatttcctttcggagaaatttaagggtactttcgtaattaatgagtttttttttttgcttacttatctgcttttttttgccccaggaataagacaacgtttttaatttatttccctaaatcagccgtgtcgctatcacaataaactgactagctacgagagtgtaaaatacagcttactcgctatgtgtataagaacatcagtgtctagattcttacgtggcggaaatcggatagagagtagataacacgtgtatatgaacgcgagtgggatgaaataagagagacgcgtcacatgctttcgatgattgacagctgtaatatgcttagacggctaataagcagagtaataaaagaatggagattttgaatttggtatttgaaacgacacaaatatttgccgtttctcggcccagtccttttctttttttgctcggcccaaacttattattacacaacaccagtatcttaaatttagtgcttgttgattaaagtcttttattaaaacctcaatcctaaagagtaggaatctaccaagtaaaaggaaaatcaaagatcttttctttttcattattcaactgaccaacggtattttgattttagacactgattattttttctttttcattcactgcattacttaagtggagtggtaacgaaaatcttggttatatatattgaattgaaaaatatttgagttgaacccttatattcactttttttattttattcaattaaaatttgacatttaataataataaaaaaattaatttacttataaaatctaatttgttactaaaacaaaattatttatcggtttgagttttattaaaaaaagataaatgtttagattttatgattaaactagatttagtcattgaatcaatcttcacactaattcatattcaatctttttggtcaacttatgttacaccatataagaaaatcgcttaaatacatcttttgacccagtttaaatgttttaatttttttcgttgagactatataacatgtgaaatctgttaggataacatttgatacatctaaacgtaattttcttgttgtgttaattttacacgaacaacacgttctcatgacatgattatatgtagtatcgacggcgaaccaatatgaatcaactgtataatctgtattagaactgtaataccaagtaatagtgatatatgaatcatatatttcccactacttaatcatagtttgaaagaaagctcaatgaccttgaacccaacttgtgtaaatattagtccatctccaaagcccaaggcccaaggcaacgtaacagacggatcattacagtgccaagggaattcagacacgtttaaaataattccgaattgtaagttgtgaacgacccaccatgttatcttttcatttatgattcacatggggaattcacaattctcacacgaaaaacatgtgggcaaaactaaaaagacatgcaacctaattcaacaaaatgtaatggttcatatttgtacttgcatagaatgcatatataatatgatttgaggatgggtcaaaactccaaacgaaatgatttgagcatatgttctagagattcagtcagaatatgaatgctatacaatctaaacactataaagcaacctggtcatgaggtgatctacgtactctctttggacgtgaaaaattatatcaacggtttgtctactttataacttttttatttatcagtaaatatggaaacattgattaattaagatccaagtctcttgatgtgatgagaacatatgatagctaaaccaatgcctctactttttctatctatccaaatctagattgtgcaccttaatcttttctacaatatttatacgcatatcataaaaatgatcttaatctacatgattagaaataaaggcaaaaacatatatagatgcaatagcgaacttgattgttcatatttaattaagtctcaactaagatgatgatctctaccactatcactatcacatatgtgaaattacttgtgtatatgcaaggacaacatttgatatgtattgatttagtttgatatatacatatatttgattatatatttttacaagtgtgcctcttggctcttgagaaaaagcttccttggctaaagcaaaaagtttggtaatccttaaatacatatgccgtcttactgtagtgaactcactcccttgccaaactttttgtcgtccacgaataatatccttgtcggtccgattattcttctttattatttttagtaatcagatgatttttggatcaaaaattaaccatcaaattttatttcttcatgcgaattgctaaagctcaagttaatctagacgttatagcattctgatgttttgatatatattaaccaatactttatagaccaacataatttaatttagcacaataactacacttattcacaccaatgttccctcttgtttttttctgaaaattttaatttatgctattattttctttagatcgagtatataaattgttgtttcattcatgttgtctttttttcatcctctaatataatggaaatttcttagaaagatttaaggttttgatagttcagctcaaagagttaggctaacgtcgggttccacatgttgcattgtcatgcacaaaattggatacattgggaataaaggtaacaataagtgtggaaattttataaacctagatgacacatgttctatgactataggctaatagattaacatgttatgtatgtttatgaatgttatacagcatgtgacatgtgcatttcattgatccacatgtacatgtatttccacacccgaaagagacttctatatgatttttggaaacttcaggaaaaataattacaaaatatggattaactcttttgatatccataccatagaccacttttctacagaattgatgtcaaaatattcctaaaattactctatagacatgacgtgagctacatatcagaaatagatgaccagttcaggttgtttctttagtaaggataaaagttgagttaaaatcaacttgttataagatataaatttgttgaatttggctttaaaagttaggctaacgttgggttccacatgttgcaatgtcatgcacaaaatatattgttctataatttgcacgaattctgattttcatatataattttcaaattcaataattaaaaaaaaacaaaaaatagattaaccatgatagtgtatgtatcttactggttagagctactatcattcatattagatttcaaattcgggatgttgtctccatcactttatctagttttcactttcaccatgtgcatgtaaaaaaggaaacacacacctaaaaacataatatgatgacaaaaagcagaacatatgatattcttgtacatacatcaaacggccattctttaacagtagagcactaactattttaagatatggaagaaatatggttcattcctttgttttatttatgtaaaacgtcgacttggtgctataacaataggaaatgggtgctatctagtaaatacgagttatttattaatacatctaagatctccaaccttatattaagtacctacctctaaacaatgaggcaatcccatacagtactctgtttatatagaaccctctttggaccgtaaatatatataagttttaacgaacttatttattaattaccattatatatattcatgggccaaagatcatcgacgctccaatagttttgttcggattgatcaacagataatggcatcatgatcgaaccggattcaggcacataattaccataattaagctgctgattaatattgctggcatgttgatacgacgtcgttggagaatacatatccatggtttcttgagtatcattcatgacatggctcgttgtcgcatgatggtttataaactcggagctttgtgatccaacggtcgtcgtttctccgctcttgatgatgtatttctggatcttagtcctccaaaaattctttatctcattgtcggttcttcctggtaaatgctttgcaatttttgaccacctaatcataatgaaggataatcatcacgagttgataaactatatcactttttgtttgaaaaaaaatatattatgtttttgaaggttcgatctagttgttgatgcaatgaaacagctacatctacgtcgagcaataaaaaaaggtttgcattgagactttgtaagctttggttgtagaacaacatttgccaaatgcttcgattttgtaattagttagaatccctttcgaattccataaagaagttaacattcatattaaaaaaaagaagctattattaaatacatgtgtggtttaaaaaaatttaagagccaagacccgaaagatccgtaaataaatcaaataatattcaacttcaatccaaatttcagttacaccaccatatggaatatctaactttcggtatctatcacttttatgcgtatacatttgtgttgacaaaaaacagatgtatattttggtacttgtctttgtatatggtcgtgtaaaagaattacaatcatgcacaagttgtggtagaatcggcacgaggttttttaatgttagtggtgagggaatttcgaaacgtgtttaaaactcaaacaaatggctgaaaagagttgaaaagctttgttatacccaccaatatgtttggcttcattacctaatgtcttgctttgatgtcttttcaaagatcaattctatctttagcctcaagaatatatatataaccgatgcatagtttgaaaacttagctttgcttctcttgttaaacatataacctgactatcttaaaattttatgtgtatttaggtaatcactaacctatttccccattttgcatgaagttccatgatggtgagctgttcttctggtgtgatatttccccgtcgcacatcaggtcggaggtagttcagccaccggagccggcaacttttcccggtgcgttttagtcctatattacacatataataatatataattacaattacaatcgataatgaagaaacaaaatatcaattgtgtacatgtctattaacaaaataaataaaaaaatgtgtacacgtcgataacaataaagaaaaaaacatttatgtgtgcatgcatgtattatttattggtgaaagaaataatttttttttttcattttctattattgtgtttttagctattaattaaaaacctaaaatcagtttttagtggattgccgtaacaattctaaccagagagtattaagtgttttacattgaatagttcaccggataaacttgtttatgttagatcgagagtaagctttttaaaaccctagcgattgctgtcagtatatattactaattgcttgtgggtattctgatgaacaagaccttttgtaagctatatgttccaatcaatcaaacaatcaattaaggtccgggcattaaaaaataaattcttatcggtttaccttatatatgtgtaagaatttggagatagtcttgcttccattgtttttcttgtttttcatatgaaattaaaattcctaactcatatttagatcgcttgtgtaacaaaaagctcaaaatagagagtttctatcaaacccataaaagattaatatatataaaaaaaaaaactggaaacatatagtgattaaaatataatatcttcgcatgtgaagaacaaaccctagttcatcaacacatacacacatataagcataacaaatattggagatcaattataactttttgatatatatatataagagtttgacctgcagatttggcgagagagttccaaacaccttcaccatgattggcgatataattgatgagaatcaaatcttcttccatcgtccatggcccttttctcacctctgcatctcctgatccagacccaccactactttctcttttctccatttttatgaaatgaatctaaataagtactctatataattgatagatgatgatatttttctagagagagaaatagaaagggagagttgtgaaagtgagagagagagttgatattttgaggtggtgggcaggtagctactgcttttatagagaaggtttttcaagagtttaaggcattgttaataacctttaatccaaaatcttaaatgtcttttagatactaattagcgacacatattgtcgtttttactttattttataaattttcataacacatggggagctagtgcagcttcaagacctaactatgatcatattatatatatagttctattttctttctacatgcatataatttaacatgtatgtgtaagattgtataatcattcttggattgcaatttgattcgatctgaaccaaaatacttattccaagccatattttaatatatagttcaaatggatgtgtgcagattttttaaagatctaatagataacgcttcataatgcttaatataggggaaagtatatggtttagtgtgaggttttatcctcaatcagccaacttgcacgtttctcttattatccgataaccggataaatcaactgaaatgaagaaaaattactgagaaaactaattaaagacgagttatctaaaggggaagagaaaacataacaaagctgtgtaagagaatcgaccttaatatatcctcctgtgtcttccacgtgactttggcatcaacagacttgagacttgagaataaaccctatatatctatgatctctatccgaaaggcttcgagacactcctacttaatcggatcggagtctccttcacactaagcacataaaccttcaaatctccaattacatcgttatcaaacttgtcctatatatttcccctagctagtgctctagttgtctttaaatatgagcatcccaatgctctttttttttttttaaaatggagttgggcttataagttattctatatgagaaggagaaacggttctgaaatgagaaacgtttatcacactcgtcatttagctattagaatataaaaataaaaaaataattatataatcaaacgttttttcttttttctttgagaaactcttataaaatggaagtgctctaagagattatgtgatatctaacacaattcatatatatatatttggtacgcgccaaaaaaaaatctctcaatatagttagaaaattcttactctaataactttggcatgcatggctttagttgtgattatctttttaagggtttaattacaaaaataactcataaaatgtaaaggccagttttttttttttcatgtctaaaatatcatttttactttgcttctttttccagactgctctgtttcttagcaaagctcttatcttatctcttttttcgaagatatcatttgcttattctatatctgtggtttatttgatctcaaaaaaatgagattatgacagtagatgtagttattaaaacaatgctcgttcgcaccacgaaacattttgctaatgtacatggtaacgcatcaagtgtaagagatataaaagagaagggttcttttatagtcagggaaattataatgacattccatatatttttaattcacaacagccaaactcatcgcaaataccaagatcttacacataaaatatacacaacaatcacctgtcacaccatacacttttacgagacacggaaacactcaggaattgggtaaaagctctaaccatagagtaatcattatctatcacgtgatctacgccttacacatgtcaattttctactttagggtttcggttcaatatgcatcatgcctactttgaatcttgaacgttattgttatgttttcacacaataatctcactgagtttttgacttagtgttgatggatctttttttttgttttgatggattttagtggataaagggggaacaatttggccaatgggtgtaaataactctctccccacgggctagcaggattggtgcgttactgtgacttattatttggaagaggagcacattgactaacctttcttgctgagaacagaaaaagctctcaagaatagtgtgcattttgattgacggggatgcgagtgtggacgtggactggaaacagtagtaagtgaagaaatttttgaaaggagaaatgaggattagtcttgtagactctccaacactgatcatgcatatggtcatatagctagaaattttggggagaaaaatatggtaaaattttagaaagggtcaggattaaactgcttattagtgcgcttagtagatagctagaatttcggattagttttgttggaacaaacaagagttttttttaagaggcatttactataaatttgcagaatgactttgcatagaggtgaacataatagaaagagagagagaacctttaatatgatcaggtttagatcttttaagtatcatagatgtgtgtgtgggtgtgagagtgggacttaagtccaccaactcatcctcttttactagatatatatgaattgaattggtattcagagagaatacatgttcgtagaccccattgtcgaatagctgaggccatcggctgcatagtgcttttgacagatggaacataacactgatattcatggtatgacaagttagcttctttgacacataacattcaccgaaataagcatgtatggcaatggcatgatcaaacaacaaaaaggtttctccgtccaattttgcttaatatagtttccactctcttgagagcctgatatgtattcatgtgtcatgcatggtttgatgagcagttagaaaattttcctaaattaaaataatatattgtatgtattgatttacaaaacttataccaaacccaagcatactataaactttaggtatataaaaaggtactcaattgtagtaccatttgagtaacttaaaataatactaatacaaattttaacctaactgttcatgaaaattttgaaataaaaatctaaaatatgaaagatttaaaattgttattttgtatataaaatatatctcacaaaattaatcgactattttaattaaagatatatagtagtttaaataacataaaacaacgacaataggagggttataaataaatgttctaaaatgatgtctaggaagtcgtttagtctccgcctagaatagacagtggaagttaccttacacacattgggattatgtatttttttttaataaatggatttaagttgtttcaagagatcttaagctctcttaggtggtcttaggcggttttacaatttaacggttttagtttattttccaatatttaagtacaataatttaaatttataatttttaactccatatacatgattataaacgttcatatgttatttgatatgaattaaataaactaatttttgtttatgatttactatttttatttttaatagatttttgtatattgtgtatctaaaatatcatatttataatattgtatgttggaaatgcttaaaccacctaaaattgcatatgttttgattagacgttatatgttttaagtattgtgtcagtgcttgcttcgtgcctaacgctttcttaaacacaaacaagtcaatattttatactacacaaactcattaatagatattagtgctaaacttaataaagcatatataactattcaagtccacaaaatcttttaccaaaataaacttttaaaatataaacttttttacatgtctagcacgtatccgaacatttccaaaaagatactccatcttttgaaatagttgtcgtttaacgtttttgcacataaattaagaaaacaattaaatttatagttgtcgtttaaacgtttttgcacataaattaagaaaacaattaaatttatccttaaaagacattgttgctaatattcataaagaatatctaattgtttgagtccaaaaaagatttacccaaaaaaacctttgaccattaaaaacttgcttacatgtctaatacgtgtcttaaaagttttcatatcaaagctcaaaattcctaaatttcaagattcttaacttttgttttatttacaagtaatgatgatactactttaaaatcctaatttgtaagagacaatatattgtgtttaattaaatattttcttattgcaaatgttttcttatttatataaggagttgttgaagaacatctacaataaaatctccttctaaactctcacttatttcgtactgataaacaaaaagagcatcttaaatctcttgatcggttttcgaagatgtatcaccaaaatctgatttcatcgaccccaaaccaaaattctaatcctcacgattgggatattcaaaatcctttattttccatacatccttcagctgaaataccctcaaaatatccctttatgggtatcacttcttgcccaaacaccaatgtttttgaggaatttcaatataaaataaccaacgatcaaaactttccaacgacctataacaccccattccctgtaatatctgaaggtatatcatacaatatgcatgatgttcaagagaatactatgtgtggttatactgctcacaatcaagggcttatcattggttgtcacgagccagttcttgttcatgccgtggttgagtctcagcaatttaatgtcccacagtcagaggatatcaatttagtatctcagagtgagagggtcacagaagataaggtaatgttcaaaaccgatcataagaagaaagacattattggcaaagggcaatggactcctactgaagacgagtaagttttatttttattttatttaatgaaaactattaataattcatatgttgacaaaaaaataatgactccattataaatattcttataaatattttatttttgttatttgatataattattcttattattgtggatcttgtattattaaaatgtttggggacatataaatattcgtaggttgttggtgagaatggtgaaaagtaaaggaacgaaaaactggacatcaatcgcaaaaatgttccaaggacgagtaggaaaacaatgtcgagagaggtggcataaccatcttcgaccaaacatcaaggtagatttgttttaatctttcgatttaagtatatatgtgacatgtgagaaatatttactaaatgcatctagctatatataaaatgaatgtgtgttttcagaaaaatgattggagtgaagaagaagatcaaatacttattgaagtccacaagatagttggcaacaaatggaccgaaattgctaaaagacttcctggacgaagtgaaaatattgttaaaaatcattggaatgctacaaaacgtcgactacactccgtaaggactaagagaagtgatgctttttcccctcgcaacaatgcccttgaaaattacataaggtctatcacaatcaacaacaatgcccttatgaacagagaagttgattctataactgcaaactcggaaattgatagtaccagatgtgagaatattgttgacgaggtgatgaatctgaatctgcacgctacaacgtccgtttatgttccggagcaagcagtgttgacatggggttatgattttacaaaatgttatgaacccatggatgatacatggatgctcatgaatggttggaattaatttctggtgtaggagattgctttgctaaagatgttttctcattttctcattttcattttaggtgatatactcaccttaagtttaattctatctatctatctatcatatatctatcaatctatctatctatcaatctatctatctatcaatctatctatctatcaatctatatatctatctatcttgttacatggaaaaccatttgtgtttcaagtggctttgtgttttgataacttgataactatctatctattatatttgtgtttagttattgtgcttaaatattatattggtttttatgcacacaaaaaaaactcgaagtccgctatttttgctaaatcttcttaaggaacttttttaatcttgtcacattgaaggttcttcccacacccccacaaatttgttttttcgaaatccttccaaaaggctttatactaattgaagttggacttgacttatatatgtattaggctgtttgtttgtctccaaacagttccttgtagaatatgaagatatatcacagaataagcacgattctcaagggaatattatgtgtgattatattgctcacaatcaacgattttttcaaattgtgatgatcagaatttcagtaaaaaataaactctatatgtttttcattcaaaatggaaagctttatcattcaaaaaagaaactataattgacttgtggaagataaaaccgatttgacttcgacacaaccacaatttgaaacatttcagactgttgctaaacttacgacaaaacaagttcttattactgactcaggcctttaaattcctgatgttacagttacaaatagatgtgctcttaggctcttatctctcggcttatatgcattgcaaacgcaacacaaaaattgtgtaagaacaattgattataatagtattcggttatttttcttcactaatctattctatggtcctcaaaatgtcccgattcttgattgtagcaatattcaatcttctatctacgacctatgtgcactcttcaattgattttgcctgagagcctaagactcgagtttcttctatttaccccaaaatgttaccaaaagcatagccagaagataataacatcatgtatcagaagttcaaatccgacttcgacataaccataatcttaaaaacattacagaatatttcttcaacttgacaacgaaacaagttcacatttatgactcaaacctctttattcttgatagaagcaatcacatatggatgtgctcttaagcagaagttgttgcagtctttcctgcgatcgctccagcttcagttaacagcggaaccaacttcccatctttatgcaagtttgatgttgctacaacacattgaaaatcacaaacttttgtttagaataacagattacaagtcctcactccgctaacaaacaaacaaacaaacaaaagttttgaagggaattgctctaatcatcttaccatcacagccaccgatgtgatttcctcctataaacacattaggcacggtacgttgtcctgtccattctgcgagacctgattgaatttggctaccatcacctgtattaaacaacaccatttaattattcaaaaatagcagaacaatgcttgagtctggattttatctacaactctgaataaatgcaaaaactcatatacttggatcaataactgcttagggtaatgatcatatgctttctgaaactttttgacttgtggaagataaaaccacatgatcatgaggccctatagaaaacaaagaaattttcaactatgtgttgacaaacaaatcctacgcttggaccaaaaaaatctacacatggaactccagcgaactttctacaaaacgaaacctttacttggatcaataaacaaaatccaaacctcgatacacaagtaagagaacaattcaaagtttccaaaaacatcaaaaacagagaaattttcgatgatgggttccagaacaaaacactatccttggatcaaacaaaatcctaaactcgaatcaccgtaaacaagcaatagaacaacaagtataccattccaaaaacgttatcaacacagcaaatgaaacgaattcatgatgaaaaaatcggcgaaatttactttcggtgtcgagctcaacggccttgaacttagctcccaattgttgcaaaagctccttcactctcacgcaatatggacaataagtcttgctgcaaattccagaaaaattaccaattaaataactcaaaatcatccattggtacacaaaagcgtctagatacatccatgaatcgttcatcgtataaaatttccatgatgaaacacacataatcgaatccatataaagaagccaaaaacacagattcgaagattcacaaacaaacagtaatcgagagaatcgcgggaaattttgtgcgaatagagagaagagaggaacctgaaaacaacgactgattcgctgttaacgatctccttagctttctgcatcgccatcttcgtcgagattagagaaccctagtttcgcttgttggttatcgatctgatattttgaggagaaagaaatgaaattgaagtagtaagagaagcgaatcagtcggctttataaaaacgctaaatggatgatatttgtaaaccgagtcaaaagtcaaaaagtcatcaaggttcaaaataaaacaaacgttagatttgtttaatgggctttattgggccttgtttctatcatttttcgatcgtcaggttggtgaatgtctggcacgtttaaattggaaatctttgctaattcaagaacagctgatttttgtaagcgggatttataaaaatacttttttcaattttttcacgaatttaatgattaaattatcttttatttaatgaaaacatgtaattagaaactaaaattacaaaaatttattttcacccaaaaaaatagtttccgtcaaaatttttctctccaccaaattactaggatagaatggaccattctctttaaggcaacgagatccttctaaaaatactctgcttcaagtaaatatgtattgtctctgtttctcgcgaaatctctggtgttcgtacagctcttacctcaatcatatgcttgggcactcaaccggtgattatgaaatctgattgtcaaatatcaatcaaggccatcaatttacgatcacccaatgtagagatccatatatggtattttatctgatattttcttacttgctagttctctaaacttttgtaattgtacgtttgtcccatatctccaaactgcatagctgattttctggcaaaaactattctctaaacattgtttaaatgatataagatatggattgacaaaaaataagtataaaaaaaaaaaaaaaaaaaaaaaaaaaaaagatataagtatcaaattaattaggctgtgatagaaatcaatctttcagattatatgtttcgtcatgtaagcatttttgaactttttatgtttctaaatttccacatatatatagtaatattttgagagattgacacgaataacaccaaaacaattttacttacaagatatcatatgatcatgtgttaataaaaaaacttatcatatgattttttccaatgtaaacttaaaactaaaatgaatctacgtgaacaaactttaaatcaaatatcaaatatagcaaacgtagcccggaattgaccttagtaaaaatattaatttcgatcagtctttagtcttagttgttggttttgttcattgttttttttttgtaaggccttagttatgacccaaacattgtttccatttagttcttagttaatgaaaccattttataaacatttaccacatactattaaaaaaattgaaacgaagttacaacttacaaatagtttaagacgtccatgcaaacactaaaaatcaatttgatcaattagtttttccttagtagatttatatccttaacgtgtggtgtagagttcttaagctaaatgttcgttcaagaaaaactatttgtggttgggtccattgatttgttgtactagaaaaacgaagtaatttgtgatggaatttaatgttgcaacgagacttatcagtactttggtgtggcctaaagccgtaggtctaaagaattaataaattcttggccctaattaactttttaaaacagatttaaatactattctatgttgattatgaaactgtaggatattttatattatgaaactttaatagatacacattataagtcataaataacactagaacaacaaaaaaaagaaaaagaaacaaaaaacaacttaggttgattaagtcttattgttttcaatatttgtgtctcaaacctctagacaacatttatatatttgactccaaaaatcatatgtaacgttgtattccgatcatccgatgagtacgaatcgagtcagtaattgaggcgatgattattgaatttagctgcacccaacctaaccttaccccaccttcttaacgagttagccaccgacgcataaattaggaccgcccatttattgatttctgatcaggacacttttgtatttgaaatattatgctatggtttattgattaatagttcatacacaactcgtaacaatgtttttttaaaaatagaatcttaataacaactttaagaaaaaaacaaaaaataataatctgtaaatggattttttccctgaaattttccatgatccaaaaaaaccattacaaatttcgttctcaatacaattaaatcagtatgaatgtctgaagtatgatctcacactaattttgtagtcaatactattactcttacaactgtacacgttttcacatcgccttaactccaggattctctatcatgatccatcatccatgtctctatcgtttatctgtatccattcgtttagatcacatcatcaattaattcattcaaatagatgtttttttttacttaaaagagtgattatatgcattcaaattgtgaagctctatatattacgctatagcaagaaacgaaacgtactgttttcccctattggtgaccgctctgtttttttctggatcaacgtaatctcttctttctttttatccgttggaacttaattagttaaatatttgatgctgggtcataattcgtccaatctatttcgccacaacgatgaaaactttacaaatgaaaaaaaaaaaaaaattaaccaaggtaaaattttgatattcatttcataatccacttttttttttagttaatatcttagaatgaatagtagttttgtaattaattaatcaagaattaaaaaaagttctatcaaaatctaaatatatagtcttttgtttgtaatatgttctgctttttacaaatatggacttttggtatcaatcatattcacttgttcagtattattcgaatttcttgaatcatataaaaacgaattatgtaataaaacgatataacaaatactgtggccggtcctaatgtcaattgtcatataactatatagtatatatatataaacctttctgcaaatacaatcctatatttaaataccaacatccacaagataagtaaaaacagaaaaaaaaactttaaaaaatgcgttgcctcacaaaaacaagatcgtttcattatgtcatcattttttattccttcttctttttaccgttcttgtcgtcctcctccgacgatcaaagaaccaccgtctccggtcttttctgtggcggacgtagcaaatcctccgcagatccaaactacatcccaactttcgtcgaagatatgcattcactatctctaaaactaactacacgccgtttcgcaactgaatcattaaactccactacatctatctacgctctgatccaatgccacgacgatctctcaccgtccgattgtcagctctgttacgcgattgcacgcacccgcatccctcgttgtctcccttcttcctccgcaagaatcttcctcgacggttgtttcctccgttacgaaacttacgagttttacgatgaatcagtctccgatgcgtcggatagtttttcttgtagcaacgacaccgttttggatcctcggttcgggtttcaagtttcggaaactgcggcgagagtcgcggttagaaaaggagggtttggagtcgccggagagaatggagtacacgctcttgctcagtgttgggagagtttggggaaagaagattgtagggtttgtttggagaaagctgttaaagaagtgaaacgctgcgtttcgaggagagaaggaagagctatgaatacaggatgttatcttagatactctgatcataaattctataatggtgatggacatcataaatttcatggtaagatttatcatcttattatttcatcatgttggttttgtgtcaattttggatatgtggattgaaaattttactttttatatttggaccattactcctatttttgttttggtttggactcggctatttttgtgtttctacatttttggttacttaagaatatagaaacagaagaaaaataataatcgaatctctaatttactcaaattataatccaaattcatgtttaggcttttttacgcattaaaccaaaataatgtagtgtttgttttgttggtagtgctttttaacaaaggagtcatcgttgctattgtcttgacaacgtcagcattcgtcatgctcatcctcttggcaacgtatgtcattatgacaaaagtatcaaagactaaacaaggtaaacatttaaatgcatatgtgatgataatgttgaatccatatatcgaaacattcgttttctagcttagaaattataggcatgtgattgcgactttcggtcatctcattatatccgtacccaatccaaaatatttgattagacaatatttattcgtttaaatgatgataattaatattccgattcgctatcagaaatgcgtatgcctaacttttggttgatttacctcctcacgagcagaaaaaagaaacttaggtttggtttcgagaaaattcaacaactcaaagacgaagttcaagtacgagactctagagaaggcaacagattacttcagtcacaagaaaatgctagggcaaggaggaaatggcaccgttttcttaggaatccttccaaatggtaagaacgtggctgtgaaaagattagtgtttaacacaagagactgggtagaagaattcttcaacgaagtgaatctaattagtggaatccaacataagaacctcgtcaagcttcttggttgtagcattgaaggaccggagagtctcttggtctatgagtacgtgcctaacaaaagcctcgaccaatttctctttggtaataaattctccttgagtctatctctagagcattgcattgtttcattaattgttagactatgcttttgtattgcattctatttgatgtttccgctaatagactttgatcggttctatcataaagagaaaagaccatttgaacaacttttgaaagctctagggctaaattgataagaaaaaagaacattaacaaatgtattaaaaatagagtagaatcttataagtgatttctttgtgattttcagatgagagtcaaagcaaggtcttaaactggagccagaggctaaacataatccttggaacagcggagggactggcttacctacacggtggatctcccgtgaggattattcatcgtgacatcaaaaccagtaatgttcttctagacgaccagctcaatcctaagatcgctgatttcggtttggctcgatgttttggtctggacaaaactcatcttagcaccggcatcgcaggaactctgtaagctacttaaaaacactagaacccaaatggttcgaatcactacccaattttcatgtgtcaagctcgagataaatatttgaaactgagttttgtaactttatacagaggttacatggctccagagtatgttgttagaggacagttaacggagaaagcagacgtttatagcttcggagttcttgttctcgagattgcttgtggaacaagaatcaatgctttcgtaccagagacaggtcacctcctacaaagagtaagaatccctacaaaactccgtcattgttatcaaagttttggggttgatatgaatctcaaatccaccattgtttcttctctctaggtctggaacctttatacactgaatagactggtcgaagctcttgacccatgtctaaaagatgagtttcttcaagtgcaaggcagcgaagctgaagcttgtaaagttcttcgtgtgggattgttatgcacacaagcttctccgtcgctaagaccgtcgatggaagaagtgatccgtatgctaaccgagagagattacccgattccatctccaaccagtcctcccttcttgagggttagctctctaactacagacctagagggcagtagtactatatctcatagcaccaatagtactacgacgtttaacacgatggtcaaaaccgatcaagcttcttatacttcttcagaatcttctactactcgtacaatctaatgatttttttgcctagaatatatttcaccattttttgaggtaggtgtataaaaaagtcatctgattgcatatagaattattgagtaaactaatttccctaagcggaaatacaacatgtgaattaccccggtagcagtacaaacaaagattttgtaaactgattacaatatatccttcatcaacaaaacactaaccattaaagacatcttgtagactctcatttgttctaaaatatattcaaacaaaacgtttgaaatcatacctcacacaagccaagacacattccttttggttcttgattccaaagataacaattccttcatacatcaagaaaacaattacacaatcaaaattcagttcagttaagcacacaacacactttaaactgatgtatccaaattcaaatatataaaatgtaagattaaaaccgagatacgtacacgcaaactactcatcttcgacgacaacactaatttctcccttctcgagtaaatcatagaactccttcgttcgtctttggttgttccaatgatgcattttccacagccctccaaccgcaaagccgagcgttattccatatatgatctctttaactacgcttggtcctttataaacagcctttccgatcttctgaacattagccatctaggttacctaaatattgcagttaacagaagtcagaacataatatacacaaatttttactgcagtgtcctaaaatatagcaaagctccattctcttacacaaatatactacatggcatccatttcagtattattggcctttacgttttcatagtaaactatcacatcgtttcaaagtccaaatttgcagttgtggaaaaacaaattatcaattgaaaattgtaatagttttctgtttttcttttttggatcttaaaatatatgcaaaattcagcaaaacgctaacgcaaactgatttttacaactaggttaaaaaattgttcaagatgttaaaattgtgagtttagaattgaagcaaatatagtttgttgcactgtgtataatatactaatgatattcaataaatggatatgcaaagcaagaaagatggtagcatgacacaactatacaagggacaatgattcgagaaaacgaattaattggaaaatttgtgtaaatcactagacatacctgtagattaaaaccagagatattgaaggaaaagagagaagcttcaagattctcataagactagaaagatctcacatagtataaagcaagaggcataatctagtgctacgcactttggagtgtcacctttttttttcctaacaacggtgaagattgaagattcgatgatcaacggcttgtttgcgagttcatgtgcttagtttgacaactgtaacacaagtcagcgccggtgagagccacgtgtgtggaagtatgagtttggttcaccattgatttttttttttctttccaaacttataaccggatagtagtcatggacaagatcgaaccggttcttgggttaattagagtcattagacagtttttgagttaatgaatatactgtatatatatgtattgttataggatttagtttctcgatttttctgcatttttgttgtttcatatgttgtttggacaattttatgtcttccggctctgttctccaactttttagatgaaaacttctcaaatatcaacaataagcagtacaattttgttctatggaagtaagaattgggttgcaaacctctttctggtttaataagtggtgttcactaggacagctacacagtcttttgggagaccgcggtttcattgaatttggacttcgatccacattcactataatagatgctctccgcctccaccggcgtagacaccatcgcactgcaaacctaaacaaggttgagctcgaattggatcgctttaggaacagagtcctcagctcagagaacgatgttgctgctctttggcgtggcttggaagacaagtttcgacccaaattctccgcaaaagaaacttgggctctaataaggtctccaaatcctctgcagtcgtggtctaaaggtatctgattcaagaactcaaccccgaagttctcgttttttatcaggctggccactctgaatcgcctctccaccgaagacagaatgcaagctttaaatcgaggagcatttcgaaaccccacaagcagcacatttcgaaacttagaagatcaagatatgcaccacttttatttatatgcgacagtaaaacatctggtgtagaatgtaacagagtgtaatgttaaagaaataacacaaaacacaaagagactgatctgaaagaatgtgtgagtattatccatgacttgtatctaagcagaaaaatgaggacctttacaaagacataagagagaaatgtaagcagaacaaggtacactaactatgtatgtaggttcccatgtttctcttgctctctctgtttggttaaaaacagttcaagtgtgtggctagaaatgcagagaagctaactttagtcatcggcaaagattatctaaaaaaacatcttaacataaaacatatgaatagccatcagattgtttgctgttacttagaccgaaaaagatgcatttgatactaattagccgttacaacaaaatccaaaagaagataaaccaaaaagtcataaaggttccaacacaaaaccaaaaagataaacataggcaaatgcatctctaaatagatatagactaaacatatttagccatcaaagagctcacctcatgcaaaacgtcaatcttctgcaaaacgtcaccacttttctttttcacaatatacttactcttcaaagacggattttgttaacgaaatgattcacacgagatcgtgtttcttcaagggtgtgaatcatttagttaacaaaatccgttccttgaaaagtaagaatagatgatgatgattgatgaattgaagaaaaataagagacgtgatgatgattaaatcggagaagagttctctttttttttgtaagaggagtcgaaagagaaaaagaaaacaaactagggttaatgactttgggttttaggcttatatatagctgcagattttaacaaaccggtcggtccgattatcgaaccgatccgattgccgaaattaatttcgccgatacagtttcttcgatcaccaccgataaccaaaattatcggttaatcgagtcggtttgctcggttcatgtcctcaggtctaagagggagtagtctgttcaaattttcaattgtcttttcgaatctccctttttttatttgattatttgcatgcgattaatgtaaaacttttttgaactgttaaaaacaacaaaaagtagttcacttaattaattaatacaataatgtgagaaatacgtttagtgagatagtcagaaagttggtttgatgtttaaacatttaaatataaaattattacatttttggtttgatataaattttgttaattaaattgattgtatttaaaatttgatagaaactatttatttgaatatcaattttgatagcatttcttagtttcaacaatgtggtaaattaccatgttttaaagatttaacctaataatctaaaatttataataagcttgtaaaatttttataattatgaacttttaaatttaaatccaaaactctaaaatataaacatgaattttaatccctaaaacataaattttaaccataaatttaaacaattaaataattttttttattgaaaatttaattattttttaattaccctttaattaggtaggtgcagctactttttttcttttccttctttttctctgtgaagctactcgttgattgtactaaaaagtgtaaaataatactctgtttagtcggtgcaagaaatagaaatgtaactgcttcagacgaccgttggatttctttattcatcagttttttgattaagcgttggcttatttttaacaactccacgtgcaattctcttataaacaaatggttatccaaacgcaaattccttgaccaaatctttttggtcggtttgtttattacaaaaaaagaaatagacaagatcaagggaattagatagtacgtggcataatcccccgttggtcctttgaatgttcttacttagctctggagtgacaattcaaatcctttgcataagtcacctcactaacatctctggtcacatgaacgaactcttatttacaaagcagggtctctctcatcatttttttttaaatgacaatgcatatgtggtctctgttcggtcgattacatttgaccaagtgagtgttcatctttgtaatcatgttggcattcaatcccgagtctcttccatcatcataaactatatcaaacaaactaacaatgatcaagcattattttttctctcttttttctgggtttatattgatattgaaacacaattactaaaagtattatatattaaaaagattttttgtatttatcagttaaactaaaaacctaaaatgctcatttctttagttgaaatagtgtttaccagttgcaataaaaatataaaattaaaccaaagtttcaaggttttattttttaatgagttaatctttcgagattctataaattaatatttattagtttgtagatatatttacgcaaaatacagtactatgttatttttagattttttttttattaaaacttttttaggttttgttctttgcatatttagttatgttttttttacttctttaatttctttttctccaacatattatgttaacgtagatacgaggcttaattcaatttttctttacataaatctaagcaatgacttttcatctacaaagttttttaaaatcaactataactgatcaaatacgtaaagagttatgtgaatacaaaagaaatcatatcaattgtactcaaaaggagttataattgttgattgaacagaagttatatacaaaatttagtcacacaatctgaaacagactcaagcgatcagctgaatatctatcataaatgatgaaataaaaaaaattagagattaacttcaaaaaaattcaaacttaaaaaaaaaacaaataacattataatactaaatttttttaaaaatatatgtttaagatttatgattattaatttatgatattattaggagcatatttttatatagagatttcaaaaaaaaaattatcttattatctgatcgattttggttaatttttatatttacacagaaccgataaaatttattaatttatagaatattaatttagagtttctattgtataatactaaatattggaaaatctaaacctaaatctaaggcatttccttaaattaaatataacatgaaaatagccctagtagcatttataaatccaccgagaatcggcataatttttttgtacaatgaagttagttgagttaatgaacaaatttattatgaccaaaaaatggaaataaaatatcataattggttcaatttttttaattggttcaaaattcaatatataaaaattaaaatcttaattaaatcccagaatctcataaataattttgggtccgactagtgacctataaaggaatacaaggaatgaaaagaaacataactaaaaaggaacaaacaagaaaataaaaaaatgataaaataagaatgaagaggaatgggtgtggaagaaaaatagaacaaatgttactgtaaatgataaccaaaacatagaacaaatagtaacaaaaattaataaataaataatttattttctaaattaaatattaaatataagacgaaaataatttaatttttaattaataaatgtttaatttgtttttttgtctgtttctcatcaaatttgggaaggaataattttcttgtacgattcctcaaaaaataaggaatgattaggaatagtgtggggtacacatattacaatttagaaaaaaattattgctgaatggtgaaaaaagaaaaaaaacaataaggaacgtgttgttcctacccattcttttcttaaaaaatgttcaccaattggaccctttattttctctgaagaggaatctgacgatataagccaatcatcatctaatgcctaaaacgtttcaaaacattaaccatccgaatcaattaaattttcagacaataaagttatcttttccaaatatattatggatatatatacccatcgtcacatttcttttctctaatttccatatcaaaactaaaatgaatataacaagttgagtgaggatatttttaaattaataaggaatgattttcattggtcaatccgtggaaattacattgtcggtaggtcaattaaaggcgcaattatgatgcaatatataaaaatttagaaatattaagagccatgtgactagaaccatgtatacaatattttatttcccttcgtattaaatcaccaacgaccaaatctaaaggtagcaaatcaaacagccccacaaatatatcaaaatatataaagaagtaattaaattaacaaaaacgaagaaagtataggtttcactctcttactcattccttacatgtcgaccaataattctataagtatctaatgacatttcctatctttctttcaatccataatcttatcatataatcaaattcgggaaagtttttaagtttcataaactctataaattactctctaccatcttaacctaaaaaacattctcaatcctttgtccaaaatcttgcatatcggcaaaatggcttcgccgtgtttgaccaagtccgattccggtatcaatggcgttgactttaccgaaaaattccggttagaagattccactctcttagccaatggtcaagtcgtcttaaccgatgttccggttaacgttactctcacctcttcaccttacttagtcgacaaagacggtgtaccactcgacgtctctgccggttcattcatcgggtttaacctcgacggagagcccaaaagccaccacgtggcatccatcggaaaactcaagaacattcgtttcatgagcatattccgtttcaaggtttggtggactactcattgggtcggatcaaacggacgtgacatcgagaacgagactcaaatcatcattcttgatcaatccgggtcggattctggacccggatccgggtcgggtcgtccttatgttctcttgctacctcttcttgaaggctccttccgttcatcattccaatccggagaagacgatgacgtggcggtctgtgtcgaatccgggtcgaccgaagtaaccgggtcggagtttcgtcagattgtgtatgtccatgccggggatgacccgttcaagctcgtgaaagacgccatgaaagtgattagggttcatatgaatacgttcaagcttcttgaagagaaatcgccgccgggaattgtcgataaattcgggtggtgcacttgggatgctttttacttgacggtgaatcctgacggagttcataaaggtgttaagtgtctcgtcgacggtggttgtcctccgggattggttcttatcgacgacggttggcaatcgattggacatgattccgatggtattgatgtcgaagggatgaatattaccgtcgccggtgaacaaatgccttgcaggttggtttattccggtttagactttcaattttatcgattgttagttattctgacttgttttaaacggttaagttaggttgaaccagtgaaccggtttaattttgtacattttaaccggatgctatgatacgtttgatactttgattagatgttgaaatcctcgcactgttttttttggccttccttgaaaacggtttagtttgattttaatttttagtccacatgtagtgagaaccgagatttcgtgctggctcagtttaaccaaattctataaaccggaatttctgtttgattattgaaatcctcacaccggtttaatctggttttacaggcttctgaagtttgaagagaaccacaaattcaaagactacgtttctccaaaagatcaaaacgacgtcggaatgaaagctttcgtcagagatctgaaagatgaattctccaccgttgattacatctacgtttggcacgcactttgcggttactggggaggtctccgtcctgaagctccggctctgccgccgtcgaccattatccggcccgagctctctccaggacttaaactaacaatggaagatctcgccgtcgataagatcatagagaccggaatcggatttgcctcgccggacttggcgaaagagttctacgaaggtcttcactctcatcttcaaaacgccggtattgacggcgttaaagttgatgtcatccacgtaagttttccgtctgacttaacggattgttttgtttttccgtttattcattaacttttgacacgtggcctttttaatttgcagatattggagatgttatgccagaaatatggcgggagagttgacttggccaaagcttacttcaaggcgttaacgtcgtcagtgaataagcattttaacggtaacggcgttatcgccagcatggagcattgcaatgactttatgttccttggaactgaagccatctctcttggtcgtgtcggtaagtcttttactttctgtttaaaatgaaacttaaagactattttcaaaattttcatattaaattatttatactataaactaatgattcatttggatttgttgttggaattaggtgatgacttttggtgcacggatccatcaggcgatccaaacggtacgttttggctacaaggatgtcacatggtccactgtgcatacaacagtctctggatgggaaatttcattcagcctgattgggacatgtttcagtccacacatccttgtgctgagttccatgctgcttctcgggccatttccggtgggccgatttacatcagtgattgtgtgggcaagcatgattttgatctcttgaagcgtcttgttttgcccaacggttcgattttgaggtgtgagtactatgctctcccaactcgtgaccgtctctttgaggatcctcttcatgatggcaaaaccatgctcaagatttggaacttgaacaaggtaataatgctttcttttcatgagctcttcatttactgttattggcctcttttgaaagcctaattagactgattaaggattaagcaagtagaatccattagaacctccccaatgagcttacattgattttaaatggatatagagtttggtctttagcactttatatataatcttggctgactctgaaaattgtaaaggcttttgggtttatttgtagctaatcgaaacctgtttaatggctcaaggtgttattaaatagtcttgttagagattaaacaggcctgtataaacctatatgagaggttataatggattcatatggatctaatttggggtttttattagactggagtttattgatcaattttgaaaatttaatggtgcttttgagtcctgagttgactcgtttcttggttcacaaggttcagtttgttcattacaaatttacaatcttgtttcttgacatgtttttcttgttccaacagtacactggagttattggagcattcaactgtcaaggaggaggatggtgcagagaaaccagacgtaaccaatgtttctctgaatgcgtcaacacgttaaccgccaccacaagccctaaagacgttgaatggaacagtggaagcagcccaatctccattgcaaacgttgaagagtttgctttgttcttgtctcaatccaagaagcttttgttgtctggactaaacgatgatcttgagctgactttggagcctttcaagtttgagctgatcactgtctctcctgttgtgaccattgagggtaattcagtccggtttgctccgattggactggttaacatgctaaacacaagcggtgcgatccggtctttggtgtataatgatgaatctgttgaggtcggagtttttggtgccggagagtttagggtttatgcatcgaaaaaacctgtgagctgcttaattgatggtgaagttgttgagtttggttatgaagactcaatggtgatggtgcaagtcccttggtctggtccagatggtttgtcttctattcagtatttgttttagagattttgaaggtccttatttgtttccttcttaactccgtaccgttcgttgagtttttgaaagaactccgagccgttttttatatggtttctgagagtaaacaatttatgttggtttttttttgtcaaacatttatgttggcttttttatttgaggattttctttttatcattggtagaatctttgtactgccatattttcgtatttattataaatgatctgttcttttcataatttgtgacagaattgttatcaacataaattgttttagtagtcaattttagtagtcactagtgacctttcattatgtaatctcttttaatttgtttttaaaccttcggctctctatgttgccgtgtaaattttacattcatacaaaaaaaaaaaaagcttttcaaagcatataaatagaaaagattttgatatattagttgaaatggtggaaggcatagggtgggtgccaagataacctcacctttttgagttgtacctttcagatgaaaagatgtgttacattctctaatatgaacttcaaatgatttgaaaaaaagttgtaatcagagtaatccatgcgtattcatttcaagcctattgcatgcggataagagtgaaagcatcatgcatttggtttggtaagcacatgcggcgtgatcagttctttgatgtatcatgatgaatctgttcagatcagagtttgtggtgatgccatggagtttagggtttatgcattgagaaaccctatggactcccaaattgatggtggagttgttgaatatggttgtgaagactaaaataaatggtaatggtgtaagtaaatctaagagaaacccaaagctccaaacaagaactgataatatcttttcaacaaaaggaaccttctagttgaaatcagcatacaactagcagaattttttttaatgtgatttaagtgttttacaatagcttgtattaatttcacaattaccaaacacacacatttatgagatattctgattatccaatcctttgaaatgaagcaatgtcacaaatgtattaggaaagatggagttaaaaacccgaattagcccaatagagaacacaaattgcctctaaaagcccaaaaaaattgggtttagatccacacgaatgtggagagccttaaccggatgtgttcaaagacccgaaggtcaaatcccgtctctgtcagaggagatgccaaccatctctcctttctacgaacacaatcaattgttccgtatgtaaacatatatatacttcacctaaacggaattcttaaccgatgtgggacaaatacttattccttttcttcaaaacctctcccctccactgcctctgtctctctgttttcgctcagatttatgaagaatctcgtttcaaaccttcgatttttctcctcttattcttcttcgatagttccgcgatgtagtaacatacctaaaccaattctcaatcctctctacaatttacttccccagtctcaaaaccctagtaaaatcgtggatgttatctgttcaacactcaaccacagtgattattccgtcttgttacctaaccttcgtgacgaggtgaaatcgctgattcctcatttgggttatcctgaaatctcgagggttttgcttaggtttcagtctgatgcttctcgagctattacgttctttaaatgggttaaatttgatttggggaagaggcctaatgttggtaactactgtttgttgcttcacattcttgtgtcttctaagaagtttcctttagctatgcagtttctctgtgaattgattgaattgacatctaagaaagaagaagtggatgtgttcagagttttggtttctgctactgatgaatgtaattgggatcctgttgtttttgatatgcttgtgaaaggttatctgaaattgggtttggtagaagaagggtttagggtttttagagaggtgcttgattccggttttagtgttagtgttgttacttgtaatcatctactgaatgggttgttgaagttggatttgatggaggattgttggcaagtgtatagtgtgatgtgtagagttggaatccatcccaatacgtatacgttcaacattcttactaatgtgttctgcaacgattcaaattttcgtgaagttgatgactttttggagaagatggaagaagaaggttttgagcctgatttggttacttataatacgttagtgagtagttattgtagaagaggaaggttgaaagaagcgttttatctgtataagatcatgtataggcgtcgtgttgtgcctgatttagttacttatacatcgcttatcaaaggtctttgtaaagacgggagagttagagaagctcatcagacttttcacaggatggtagacagaggaattaagcctgattgcatgtcttacaatactcttatttatgcttattgcaaagaaggaatgatgcaacaatcgaagaagctgttacatgaaatgcttgggaatagcgttgttcccgacaggtttacttgtaaggttatagttgaaggatttgtgagagaaggacggttactttctgctgttaattttgttgtcgagcttagaaggttaaaggttgatatcccatttgaagtttgcgactttctgatagtaagtttatgccaggaaggtaaaccatttgcagcaaagcatctattagatcgaattatcgaagaggaaggtcacgaggctaaaccagagacttacaataacttaattgagtctttgtcccgttgtgatgctatagaggaggcattggttctaaaaggcaaactcaaaaaccagaatcaagtacttgatgccaagacataccgagctcttataggctgcttgtgtaggattggtaggaaccgtgaagccgagtctttgatggcagaaatgtttgattctgaagtgaaaccggattcatttatatgcggggctttggtttatggatactgcaaggaattggatttcgataaagctgagagactattgagtttgtttgctatggagtttagaatctttgacccagagagttacaattcgcttgttaaggctgtttgtgaaacgggatgtggatataagaaagcgttagagcttcaagaaagaatgcaaagactcgggtttgttccaaacaggttaacttgtaagtacttgatccaagtgttggaacagccttctttgcccaatcatctgcctgagaattgaagcaacgcttgatgcgatgaaatttgtattccttaatcttggccagatgcgtaacttaaagaaaatacaaacttagaggatgagtactgcggatcgttttaagtggtggtgaagtctgtaggatctcgcacaaagggtccagtacttgcttagcatcctggaggaaaatgttgtccttataattcagtgccaagagcatttgcctcagcttttgctgctttgtttgctgttgaaagcttacctcgactccaaaacacaagtcttctctgttgatcaaacaagagccaagcaatgccgatcggtgtgttcttattgatacaggatgcatccagataacaggtttattgagttagttggaactaaaggatgcacctgaaacggttgcagattgccacaattttgtattctgtagtaattgtaagagtttgagaatgattgtctattggaccccttgtcttgtgtcttgtggtttcgttctttccatggatgtgaagttaaagtaaactttgtgtagttgcagcagtttctttgtaactctatgaaacttctccaagcaatttctttgtaactctattactttgtgctctgaaaaagtcactcttaccaaaagagggtagaatcgatattaaccaaaggaccgtgtctaaaaccaaattaaatgttacattggcaaataaatacaagttccagaaagagtctataaactaattgctaaaccgggaaaaatttctgcttctaactctttagcgttgagtttataggccgacgaatcaggttaaaaattctctctttatcaaattatgaggtttggatctgtaattttgtgagcttttaagcttgcacaccaagtgcttgctaaaatgtccaagtgagctcttttaggaattcagtgaatcaaatgaagttttaggtgacaaaagtcaaaagattttaaatgccactgcttaatgagatcaatcagctcagctattttatatagattgagatctttcattcgtgaaaatggatgcaggtgtataggaagatcattttatagtcatgagtagaatcgggaaacatccggctatcgctctgttggattccggcattacgtttaaagaagtccggcaaatccatgccaaactctatgtcgacgggacactcaaggatgaccatctcgtgggtcactttgtaaaggcagtggctttgagtgaccacaagtacttagattatgcgaatcagattcttgataggtctgaaaagcctacattgtttgctctcaattctatgattagagcacattgcaagagccctgttccagaaaaaagctttgatttttataggaggatactctcttcgggaaatgatcttaaaccggataattacactgtcaacttcttggttcaggcgtgtacggggttaaggatgcgtgagacagggcttcaagttcatggtatgactatcagacgtggttttgacaatgacccgcatgtccagactgggttgatttctttgtatgcggagcttggctgtctggattcttgtcataaggtttttaattctattccgtgcccggattttgtgtgtcggacagcgatggtcactgcctgtgcgagatgtggggatgtcgtttttgcgcggaagttgtttgaggggatgccggaaagagacccgattgcctggaacgcgatgatctctggctatgctcaggttggtgagtcaagagaagctctaaacgtgtttcacttgatgcagttggaaggtgtgaaagtcaatggggttgctatgatttctgttttatcggcttgcactcaattgggtgctttagaccaagggagatgggctcattcttacatagagagaaacaaaatcaaaatcactgtgaggcttgctactacgttggtcgacttgtatgcaaaatgtggtgacatggaaaaggctatggaagttttctggggtatggaagagaagaatgtgtatacatggagtagcgccctgaatgggttagccatgaatgggttcggggagaaatgtctcgagcttttctctcttatgaaacaagatggtgttactccaaacgctgtcacattcgtctctgttctcagaggttgtagtgtggttggttttgtagatgaagggcaaagacattttgattcgatgaggaatgagttcgggatagaacctcagctcgagcactatggctgcttggttgatttgtatgctcgtgcaggccgcttagaagacgcagtaagtatcatccagcaaatgcccatgaagcctcatgctgctgtttggagttctctgctccacgcatccagaatgtacaagaaccttgagcttggcgtgcttgcatctaaaaaaatgctcgagctagagaccgcaaatcacggagcttatgtcctcttatcaaacatatatgcagattcaaacgattgggacaatgttagtcacgttagacagtcaatgaaatctaaaggagtcagaaagcaaccagggtgcagtgtaatggaggtcaatggagaagtccatgaattctttgtaggagacaaatctcacccaaagtatacacaaatcgacgcggtttggaaggatatctcgagaaggctgagactcgctggttataaggcggacacaaccccggttatgttcgatatagatgaagaagagaaagaggatgcattgtgtttgcatagcgaaaaggcagcgattgcatttggtataatgagtttgaaagaagatgttccgattcggatcgtgaagaaccttcgggtttgtggagattgtcatcaggtttctatgatgatctccaagatttttaacagagagatcattgtcagagacagaaacaggttccaccatttcaaagatggtcactgttcttgtaatggcttttggtgagaacctagctatgtaaccattttttaatttcacctagttagtgatttgacgatttcagaggtaaaacatgattatgataagaaatttaaaatgtgatatttattgtttatccaatagtaattttttttttgaagccagtaattaattggcgttaatagtaaaaatggtaattactaattggagaaggcttttaagtttggtttgaggagagaaagataataacaatgagagatgatcaaagcaaatgtgtattcatgttcaaagttcagatttttatatcgtcggagatttttgagccaatctagttttgttcatagtttagatgcaaatgtttcatcacttatagctgctgtaaagtcttgtgtctccattgaactgtgtcgtttgcttcattgtaaagtagtgaagagtgtgagttaccgccatggatttattggggaccagcttgttggttgttacttgagattgggtcatgatgtttgtgcagagaagctgttcgatgaaatgcctgagagagatttagtctcttggaactctttaatatctgggtattcagggagaggttatttggggaaatgttttgaggtgttgtctaggatgatgatatctgaggtgggttttagacctaatgaagttacgtttttgtcgatgatctcggcttgtgtttacgggggaagtaaggaagaaggacgttgtattcatgggttggtgatgaaatttggtgtacttgaggaagttaaagttgtgaatgcttttatcaattggtatggaaagactggagatttgacttcatcctgcaaattgtttgaggatttgagtataaagaatttggtttcttggaatacgatgattgtgattcacttgcagaacggtttagctgaaaaaggtctggcttactttaacatgagcagaagggttgggcacgagcctgatcaagccacttttctggctgttctccgtagctgtgaagacatgggtgtagtgagattggcgcaaggaattcatgggctaatcatgtttggtgggttcagtggaaacaagtgtataacgacagcgttattagacttgtattcgaaacttgggaggttggaggattcgtctacggtttttcatgagattacttctccagatagtatggcgtggactgcaatgcttgctgcttatgccactcatgggtttggaagagatgcaatcaagcattttgagctcatggttcactatggtattagtcctgatcatgtaaccttcactcacttgttaaatgcttgtagtcattctggtcttgtagaagaagggaagcattatttcgaaacaatgtcgaaaagatacaggattgacccgaggttagatcactattcatgtatggttgatctactgggtcgatccgggcttctccaagatgcttatggattgatcaaagaaatgccaatggagcctagttctggtgtttggggagctttgcttggtgcttgtagggtttacaaagatacacaactcggaacaaaagccgcagagagattgttcgaattagagcctcgtgatggtagaaactatgtaatgctctcaaacatctattcagcttctggtctatggaaagatgcttcaagaataaggaatctgatgaaacagaaaggtcttgtaagagcttcagggtgtagctacattgaacatggtaacaaaattcataagtttgttgttggagattggtctcatcctgaatcagagaagatacaaaagaagctgaaagagattaggaagaagatgaagagtgaaatgggatataaatcaaaaacagagtttgtattacatgatgttggtgaagatgttaaagaggaaatgatcaatcaacatagtgagaagattgcgatggcgtttgggcttttggtggttagtccaatggagccaattatcataaggaagaatcttagaatttgtggggattgtcatgaaacagcaaaagcaatatctttgatcgagaaaaggagaatcattattagagattctaagaggtttcatcatttcttagacggatcatgctcttgtagcgattattggtagtatctcaatttctcatcctcacaagtgtcaattttactctttcaagtgtgtgtgtgtataatatgaaaaaattgcatacacatataaacctccaatagaactgtaaagttttgcactgtttcattttctctatatagacaaaaaaaaaactagaaacctaaagaactgtgagtatcaaatagctaaacatgtccacctaatttaaatgttcccatgatttatcaacttatcatattattacattcaaatattaccacaacacttgcgatctttcatgcttacaaaaacataaaacacatacacggttcaacaaaaagccaaacaaaaaaaacacataacatcatattgaaaatgcagaaaaaacgacataatagtgaaaacacatatctaccgttcatactgaaaactcatcatgcagccgtcgtcctcccctgagtctcatgacccttagtggtagtgtcatgtggcttagaaatatcatattgtttaacatcttgggccttgttctgcacatgctggcccatttctttgcccttttgtcctgcgtagccaaccgcatcagccattctcctcttagcatactccaattgctcaggcacagttctccttgtcccacgaagatagttcatgacccatgagattgagctaagcccggttagaccgaacatccccgaggctaaaaagcctgtcattgcaagcccgatagttagagccgctgggactataaccgggctgaagaggagaaatagtggtaaagcaaccattaagccgatcaccgaaccagctagaagtaatccagccaaggcaagtagcgaaccgacgacagggactccaatcaacagggacaataccttttttttaaatgatacaagttaacaatcgttagattcaaatcaatatatatgcatgcaaatttaaccaaaaggtgtatacatataattgtaatggttgggacatttagaccgacattgcaaaaaaacatttctattcaattaacaaccagaataagactaaccatattttgatcggacacaaaaaaaaaaaaagcctaggagatcaaaaattatgttcgattaacaatcataagcatgagatcaagaaaaggtacaatcacaaaaccatatcaatctgaccatttttgtgatgttttgaaggtcatatttaactcgcaataacaaaaagaagatcaagaagaagttttatgcatgtaaccatataaatcgaacagtgtcaaaattattcataatttatttgaacatatatttcaagattccatgaacatagactccattgatccgtaaagaatcatttcttaactttgtatgtataaagattaagagaatgtataaatataaagacaaagacattacttgggtactagatgggccactttcaggcatcatgctcttgtaaccgccaccaccgtaaccacggtcaccttcatactgaccttgacctcggccgccttcatagggcgactgaaattgaaagtgtctatcagtacggtcgacacggtgtgtatccgccattgtaagctaatgagaaattgtttttacctattttctttgtaataaaactagaaaagtttggagaaggtttatttaaagaagaagttggagagatgagaagaggacacataagacggtgagatgttagagtagtagaggtgtggctttgcatgatttccaagtttcaacttttttcttcttttagtttttattttattttatttcatttcatgagattttaaaagatgttttcgctttctccgctgacacgaatttaaagcaagacaaaagaaaactatcctatgcatgtatacttgagtccgaagtctaaaaggatctccaatacaaatttgaaaatacataattcatcaaaagagtttcatttttggttatgtgactaacgaatccaaaatatgtaatctagacaatagcttttgaattatccatgttaaattataaaagaagatgggaaatcgaagataggacgatgtagttttgcaccacatttggatttcaaaatttcgatttcgaacttttagtatcaaattaagaaaatgattccgtaaataaagttttgtgccaatccaatccccattactatatattagttcacaaagatgatgtagtcatgtagagacatcaactaaacactaacggtgcggcagattctattctagcatccaaactcagattcatttcctaatcaaaacttctttcaactcggagtattacaatcactttcgtataccgaaaggaacgttcttattgcatatcaaaacaatcatccctagctagaagtagcaattcgtattcgtttggactcggctcacggctaacgtactattaaccttgtatgtggtttcacacacatgcttgatgtaaatccacttttgttccgcagttgattcactatacttcgggttattaaaaagacttgatttctaattttaaagattcccatgagtttttttataagttttagccaaaatcgatcgcataatattgaaaatcacttttagatatgtcattttatatgatattgttataacttcaacacgcttaaatgttaaatactcttaaaatagattacatgtcaaaatcgtaatcgcatatgttgtatgtagtctattatcataataaaattagatcaaatatttctagtgacaatgtaacaaatgaagaaaaaataatgaatcatggtgtttccttaacaagtcaaagtcttgaatttaaatcacaatgtaatgttttttttgtctgtcaattcacaattaaaaaaagaaaattataacaaatcatgattatcttttgaattttttggtgtgtaatacatggattttacaaattatagggttggctttacaaattatatttagagaaattattgatccgaagaccaaattctcttgtacaaaaacataattttgtagttctctatcaatataagtttaaagtacacatatagatagtaagctgggaaattgttgttgattaattaaccatatgaagaaaatactatgtcactcacttaaaatagtacaccactgtaacataacttatatagttcttgtataatagatagatagagatatacaccaaaacggtgtaaattaaaatttgcttaatttaaaaagaaatagatagatagatatctcacacgatagtgagaaaatatcatattatcaaagaaatttccttcactggaaattaatcccaccaacgcagcagctctagatagtcctccagtgattcacaaacctccagagtatagttttcttttggcatcggaatataaggtgatattgtagaagcatcggtcaatggtttggtggtctgcgttatagcctctggactcaaattcatctccccatataacatatcttcagagtcatcatgataattctcaatgtttgtcggttcaccatcagattcatcatcgttgttgattgtgatactccttatgtagttttcaaggatgttattgccgacacggttgacagttcgaccacttttattttgcacccgacgctttgtggtattccaatggttcttaacattgttatagctcctccccggaagttgctctgagatctggatccatttggcaccaattactttgtgtacttcaattagtatttgatcttcttcttcactccaagtagttttctgaaatcacatatacgtaaatcattctcttattattgtatgtatatgacacttttattgatggaagcaagatacaaactataaagatgcacgttttaataacccctcgtaataactatgagaaaacaaaatttgccaatgtattttgtatccatgatgagattatttgtaagtatcacatgtaactcctaaatataaatttttaaaattgttgtgattaaatcgttagccacactactattcaactatatgaatttcaatctatactctatacatgtgtgcgtgaacattgtaagaacgtagttgctttcacacacatataagctgtgatgatcatttatattaaattatgaaaataagaatataggcagatgaaagaaaagaacaccttaacgttaggacgagcatggttatgccacctctctctgcattgttttggtgttcgtccttcaaaatgttttgcgacctttgtccattttttgggttcaagtgccaccatctctttcaattttctatatacattacaatatattttcacatcctcaaaaaataaaataaaaggcatacaataaaaaaaagttatatgagaattcccaaggaggaaattgaataatagtttttaaatttatttgagaataaaaaaaaaatgaagacttacatgtcctcagattctgtccatctttttttggtgatgtcacttttcttcaaatatttgcttgtgctcgcctcctttttattctcataagtttttttcatcttatcatcttcaagttgattcatgatttcgttggttgtatttttgataccttctagcactggcacatcaaataattgaggttcacccattaccttatcaagagttggctcataacccttattagtcagttcttcattgtgtacaatctcattccctatagtgtattcctgcaaatcatgaaaattttcgaatatacccttagggtttgcaaaaattgggggattatcgatcatatggatttttccgttgttgactatgttattcatagattgctcaagagtatcaatatttgagtaggatttgatactcatgaatgggtagtttgatggaatttcataggaggaagagttgtaaaccaaatggttttgattagtatccaaattctgattttgagaatcataatttgggatcaaaggtataagattttggtggtgctgattagagatatcagtcagatctggtgaaaaagaccatccagtacgagaagattgacctaaattgtcattgaaaaagttaagattattttttggtatatgcgatgcatcatcattaacaggacatcgatgagcatcgtttaagatgaaattttcatcggagatcaatgagaattccatttaaacaccaacttgaattgaaatgatgattctaaaatggaaaactgattaaatctcgatatgaatctaagaagtacaaagatcgagtgcagaaatccgtaaaacaaatattgaaacccaaagatgggcggaaagttatagaaaatcttagaaagaacgatactcagataagacgataagaagtgagtggttataaaaaagtgtacttcaaataattaaataaaacaaaaaaggtaaaaatctatttaaaaggtaacaaatgtattaatgaattttgtagaaattgagtggcaaagactttgacttgtcaaatatttttacaagtcattaattttaacaaatcattgttttcacgttttatagataataaaagtgagttaaatataaaaccatgggccaaaaaaccaaaaaagtacacactataattagttagataattggatgtaattaaagatagtactttagatattgttctaattttaagattttgagatgaggagttatacaatatcaacttgaggataaaatagacatttatattcttaaattgtaataaataattatgaaattataatgatttatgagagcgtttgtgtttaaaagagaaaatttgacatattacaacacgtgtcatacatgtcatgaatttatttctgttagataaaatttattttattttcttgagcactgaagatagttttttaataatatatttaggttgagtccattaatacttgaatttaagtactcaattgtttagactcaactagttctcaattcaccatccatagaaaactcgtttattttaacatttttcctatgaaaaaatgccaaccatattatgttttttaattattaaaatagtataatttctcgttaaacattttgataaagtaacgttcgtattttcagaaataacatattttatattcctttaaaaaacaaagattatagtaaagaacattaaattaactaataactactctacttttccatagaatactaaattcctacgctttctattaatctttagtgtttttaccgctaaagatatcactatatcactttgtcaaaaaatctcaattttccatacatacaaaaagattatgtttagaagtcatcaaatccataatttggttcacttaaatacaagttggtgattatttgattttgttcgatttaatgtcattttggtttcattttgttttctaaaatcagttcagtgttggttaaaataatataaaatacttctaaataataattcaaccataattatataaaagcaagaaaaaaaattctgaaattaaatttcaaattattctaggcatgttctccaatgtggctgcatccgtcttgttggttcaagatgagtgctcttctgttaggtcctctatctaaacatcttcaactccatttcgtggatcgatcacccaatccttcccagctgatccgtattttagtggtccttgtcgccgacgagaagtttagtctagtttctccatggtttgtgtagctattgagatgttaactctcatgctttcagcctccttttcgctgtctctatttgagctgctcatgtctccacactacctatgaagtccgatctctacgactttggtgtgagctaccccctcagacctccagatccgccccctcaggccccaagttgaccattcgttccaatttgtgggagttttctccggtgttatgacctatggtccttccttttctaccacctcacctagcagcatctcctccattcacccttgtttggataatgatctttgtgtcttccacttgcctccttgcgatctattattgttgtgtgcagttcatggtactaaatctttcctctagcgcatatgtgcaattaactggatacttctctggtttatctttgtttgcatttcaggctagtctactttgtttctaatctagaatcacctttgttagtttattttctgtccaaatttggcagagtttgttcaccgaatacttctttagaatcttcgtgtctagggttaagaaaaatcaaacttttgcctagatccatcaaaatttgctcaccctatacatctccagcgtctccatgcatatgtctacggttgatccttcttgggtgcatcatcagagatcctttcatggtgcaacgaccacctccgcctcactgttgaatgaatgggagagaatgagtattattttcgtccttcatctatggtggagaaatatctctgattttgaaaacaaattagaaccgaagagactttgcacaagttttaaacagttttggacactaacgattatatgctaacaaaatatataattagtaaattttaagttttgaatataatttacgaatattttttaatccatgaaaaactttaaagaaaatatcttatgttgacttgacactttatgagtctaattaaaaatgtacatacaagtaacatcataagtaatttgattccagaacatcaagaaccaggtttcaggtttcacactttcgcccatcatgaaaagtggacaaaaatcaaatattttatttggcatgttttgctttgattctttttgaatgaatgttattcatcctaaaacatattttgtataataaatgtaaccttatacttttttccgccaatgtaaccttatgctaaaagttcagaacgtttataaataaaaagacaccaaagacaaacagtagggccttcaagcaccaaagacaaacactagggccttcaccaaaccaaattcttaagacatcctcgaatttggttgtggtttccttttgacttgaaagtctgttctagagttcggacgatacgctcaatgaaagaagacatgagtgaaggagacaagttttgttccccatgtctacgtctaggtttatttctttcggaccatatggaatgcacacaaacttggaacacataccgtacgaggtagtaaactgacttttatgttaaagatggtttatgtaattatgttactttaattgttaaatagtttttacgtttccatgaattggatcaaacgtaatcaagtaaaaaaaaaaacctatacttataatccttccttgtttcatttgatttccttgcctttaaaccacaatattatttcttttgagtttcattgatggtgtctcaattgtaaattggggtttagggacattatacagatggttgtaaattcctggaactgactgagaaaaaataaacttatgggcctggaggagatagttgttgggccacttcttaatatatattggcccacgaaaacacaattaactcttcgtttcaaatttacaaactaaacttcgtgctatctaatacttttaaaacggcacgtaatttagttttcaaaacatagaacgacacagggttattgtcggagttgcttcttcagagagaaacattagagaggggtgttcatcttccacatctcaaggagacacccaaaaagaaaaaccaaacctttgaagaacgaaaagggttattaaaaaagcaacaaactttgagagtaacaaaggtaagtttttatctgtaattctaagagttatatcattttggttttgtatgatttttttgaatttgtgaatttgatccgttgatttaattctgaattttctacgattagttcactgttatgttttgtgaattataactgttttattgactaatcacgactttgaatccaattctattgaagggctataagaaaaactgaaattaatttatagaaacttgaaaattttggggacttttcatgttttgttaagtaagaaatcttcttttttagctaaattagtttcttctaaatagaaagttttcgaatttagaaaaaggttggggttttttcattgactcttgtctgtgttacagaaaaagtagttatcatggcggcattggaggagctaaagaagaagctgtctccattgtttgatgctgagaagggtttttcttcatcttcatctttggatccaaacgattcatatttagtaagattcctgtgattttcgttgttaagaagttttgttatgtttctggtttgtttacttttatcttctttttgtttgtttgtgaagttatctgatggtgggactgtgaatttacttagtagatcatatggagtttataattttaacgagctcgggttacaaaaatgtacatcttctcatgtggatgagtctgaaagttccgagacgacgtatcaatgtgcttctcacgaaatgcgggtttttggagctataggaagcggagctagcagcgttgttcaacgagctattcatatccctaatcatagaattttagcgttgaagaagattaatatctttgaaagggtaatgttaatctcttttgctagtttaaagagaaaaatgtgactccatttagtatgtgtttttgaatatgtactgattttggtgagcaggagaaaaggcagcaattgcttacagagatacggacattgtgtgaagctccttgtcatgaaggacttgtggattttcacggagcgttttatagtccagactcgggacaaatcagcatagctcttgaatatatgaatggaggatctcttgctgatattttaaaagtaacaaagaagatacctgagccggttctttcatcattgttccacaaacttttgcaagtaaagatacttaactctctctataatgtgcaacatatatatgcgttatgttttaagtgtatataaattcattcttagtgatgtgatttcattttaagggattgagctacttgcatggagtgagacatcttgttcatagagacattaaacctgctaatttgcttataaatctcaaaggggaaccgaagataaccgattttggcataagtgctggccttgagaattcaatggctatggttagtgattgtatctcagtctttcactccttattaatccagtaatccttttttgatgagtttttaacttgtattatctgaaaatgatggttgcaaagtgtgctacttttgttggaactgtcacctacatgtcaccagagaggataaggaatgacagttattcttatccagctgatatatggagccttggtctcgctctttttgaatgcggcactggagagtttccgtatatagctaatgaagggcctgttaatcttatgttgcaggttaatcaacttgtccccaaatcctttcttccgatatattatttatatttacactaattactgttatgtgaatgaagatattggatgatccttcaccaacaccaccaaaacaagaattctcaccagagttctgttccttcattgatgcttgcctccagaaggatccagatgctcgaccaacagctgaccaggttggtaaaactgaaatgtcatacatttaccagtctagtactttactgaaataagtcatttttagagcaaattgtggttaaaagtttggtgcttctcttagtattcgtctgtttgttagaagttcgatgcatttctttgtatttatttgttttaatacaagtctggttaagaattggattctttctgttgaatttattagataattcctataaagctttgctttgattcaagtctgatggtgtttcctctgctacttgaacagctcttgtcacacccttttattacaaaacacgagaaggaaagagtagatttggcgacttttgttcaaagcatctttgatccaactcagagattgaaagatttagctgatgtaagtatatgatgatcttatcagacttttcttagttcgaaaataccaaattaaagttaacattaatgatcttattggatttttgttcagatgctcaccatacattattactccctctttgatggatttgatgatctttggcaccacgcaaaatcgctctacactgaaacttcagttttcagtttctctgggaaacataacacaggatcaactgaaatcttctcagcattatcagacattcgtaacacattaacaggagatttaccgagtgagaaacttgttcatgtcgttgagaagcttcattgcaaaccttgcggcagtggtggagtcataattcgtgctgttggatcgtttattgttggaaatcagtttctgatctgtggtgatggagtccaagcagaagggcttccgagtttcaaagatcttggcttcgatgtcgcaagtagacgtgttggccgatttcaagaacagtttgttgttgaatctggtgatcttattggaaagtattttcttgctaagcaagagctttatattacaaacttagattagataaacacacatgagaaaacgtttgttctctactgtactataatgtaactatgaacttgtttaattactaacatatgtaattgtatttgtttaaggttcataaaaagtgccggagagaattagccaatgatcaggtaaaaacaaataaccaaaccaatttattgaacatgtgaaaaaccccacaaacaaatctgtaatattcacatattacaaaccaataaaaaaaataacaaaccaataaaaaaccttttatagacactgattgtgtttttcttgtttcttcacttatgtaggtgatgaaggctttgttgtgtgagaagatttgccagtgagtactttcttgaccttagaaattgaatgctttacctttgaaccaacaccagagagaatgccgtgagatttcttatgagtcttgacaatgcttactgtatctttagcttcaaccatcactattgaatctggacttgttttatcatctttatgttcatgatcttcatcatcattctcatcttcctctgttttaggctctttttggatgtggtcagatagtgatttccttgccggttctttcaatgttggttcagtttcttttactactgaaaacaaatctttggtgttctcagattcttcatcttttttctgtagttcttcttcaatctttgaattctccaggcttggaacttcattggttatttcccttttctgttggtttggaacttcatattctggctgcaaaaaatgaaaataagcttttgttttcaggacttgtgactttgaaagaatttgtgtccattacttatggaaaaagcaggataatgataccaaaccaaagtatattgtacctctggtttgtcttgtgttttgctgacggaagacaagctttcaatatcccgaatttcgggttgtgttttgtctatcgcatcatcagtttccttcacattgttgaaactttcttgatttatttccttctgcaaaaacatggtttctatgatttagatattaaacgagtatgaaaacaaaagaaacactgaataatgttcaggttcatacctcttcttctctgatctcttccttgacaatatttgtttgcttaccctcctcttgctctatctcttttgcagcttcgtgatcaatattttcagatgtgttgttcttctgcgttgccaatatcacattaaaaatttcggtcagcaacaaatgataattagtaaaaccacagcatctaagttaacgaaatcacctatgtttctttgctttaaatattacctcttctacggaaacttcatgtttgattgcatcttccatctctgccttgacatgttcaacctctctcttctcctctattgagctagtttcttccttttgtgctgcaactgaatcatggccatcaccttttatttcatcatcaggaacttgcactttaacatatgtaccaatatcttcttggacatcggtgagatcattcaacttgtgttcttgttctgatatctctttctctattgcagcagcctcaaaatcttccttgggctgatcttgcacttgcacgttcgtaatcaaagcatcaacagtttcctcttttttatcttcttgtgccttgttgaattcaaatgatgtttcttccacctgattgggagattgatgagactgaatgagttcacttagattctgtactggaagatctcggtcagcaaagttcgtcactgcttccgtgttactgttctcttgaatatcatctagtacttttgaggatggaaccttaagttcctcgcctattgcttctttagggacagtttcatcagcactaacctcgtcgctctgatcctttggtgcttgttctgttggaaaatccctatcatcattgctctttatatcatcaacagggtcttcatgctcagcttcactagctttcttgatgactcccactggatctgaaatttgcttctctgatgcaactacctcattcatctcttcttcattctccagtgcattgtgaggtacttcctctttttccccatcccgcgaaacaaaatcattaccaacttcaagctcacgcgcatctttgttatcctttttcacttctgatgaaacaatttcctgttcctcatcatccttctttttgtctttgatatcaacaatttgatcttcttctttaacagtttcatgagtctcgtccttctgctccttcttagatgtttcaaaatctttgagatgctctacttggagacttatcttctctgatgttgaaccattgaaatcttgttgtggctcacgttcttcttgcttttcatcagaaatcacatgctcttgctcctcagcagacaatggagaagatgaaatcagaatttcctctctaggtaacacttgtgcaatctccctagtttcctcttgtacctttacctcttctttatgttcctcttgcaaattgatttcttctattggaagagatttccctgcaagaccgctttcttccttgattttttcagcttctccacttttatctccgtgtaatctttttgcttctaagatatcagaaacaaaatctttttcatttgattcaaccacatcatcacctttcttttcttcttgatctgcaggctcttttatcatgcttacttccgatgatgcagaatcattgattgctctctcagtctccaatgtagtttggagttgtgtcaagattccaacaactggaagagttgagtaagtctcatctccatgctctgcctcctctgtaggataatcattttctaacccagccacttcaacatccgttttctttgtactttcatcctcaacctgatcatctgatttttctgctccttcggcttgtgattcttttggttttgtttctcctaccttctcttctgtttctgcagaaacatgtcgttcctcttgtgtgttagctgcataatcgccttcttgtggagtcactggttcgtcttccccagaagcaagcatggaaactggagcttcaatgaatgattcttttggaacggtttccgtagaaaagatatcttcagcttgtaccttgtgtgtttcctttgtttcttcttcaagaatttcctcaacttgctttggagtttggtcatccttatctgaaactaaggatggagtctgatctgcttgtgaagttccaattggaagagtctgatcaatagtagtttctgttgctttggcagtctcaggaatttcttggctcttctcgtcctttgtctcctctaactttggagcttcatggttcacaaactcttcttcatggtccaaagccactgttctctctgtttcattaatttcttcatttcctttctttgcctctgcaatcagagtctcactatcattctcctccaagattattggtgcggttggagtctcgacatgtgcatcccttatttcatcttcatgctcttttggttttgtttctcctacactctcttctgtttccacagaaatagatcgttcctcttgtatgtcatttgtttctctaacgtcatctgcacaattatcttcttgaagagccactttatcatcttccctagaagccaacatggaaactagagcttcatcagatgattctcttggaataatttcggtagggaggatttctccagcctgtaacttgtgttcttcctttgtttctgacactaactgagaggacagagtattatctgcatcggatgtttcaactggaagattccgttcactcgtagcttctacatcgtgtgcttcctttggttcttcctcatgaatctcctcaaccttcttaggactctggtcatcttgttctgacactaattcagatgatagagtattatctgtatgtgatgtttcgatgggaagagtctgatcactagtagcttcaatttcttcgatggtctcagaaatttcttggctcttgtcttcttttgactcctctggctttggaacttcaagtgtcccagactcttcttgttgcatgcatacatcttctgatgtctttgaagtctgagtttcattatcatttttctctgataacattggcgaggttgaagaatcgacatgttcatccggtttatcatcttcagcttcacttgattttgtttctcctttttctgttgaagtaactttttcctgctcatccaatggcaatgcaactgatggaatatgaatttcatcgacatcctctttctgatcaacggatggaagactcagatgtgttgtttcagcaatgtcaagacctctctccctcatatctcctattggttctgcatccttcactttttcatcgtctgtcttctcggaaacagtctcatgttctttctcctcggaagatgatggcaatgagctatgcgcttcaactatttcacctgtttcaaaacttttctggatcttgtctgctacttgttcttccccaatcttttcggcttcaacaacggtctcatattctggtccctctgaaagtgatgcagacgaaacttgtataacttcattagatatttcttcaacaggactctgctggtcattagaaacttcttccttcgttggttcatgcttgtctacttgctcttcctgcaactttgtttcgttttcttgctcatttgccaggcataattcttcttgctggggttgttctccgagctccctactttctagtactgaaactgcctcatcttttgtgtctaatccataagaaccttcctctcgaccttcttgatgcaatgttacttcttcttttggtttatcttcgatcttctcatctatggttttgcttgtttcctcttcagaaggagtatcaagagattgcttcaccactgattctacatccagaagagtttggttgtgtgtggtctcatctaatccagcaccttcaacaacagatggaatttcttcaaatttatctccgttttctgtcttcgagactagagatatatcaggttcattttcttgatacttctctgattctccagattgtacatcaagcatattcacatccttctcctcactgctttcgccttgaacagtctccttagattttacctcaacagattcttcgcttccctggctttcatcttttatctctgagctacaaggttcggtatgttcaccaaattcctctgcttgagcatcggaagttcccacctgttgattgaaagaatcaatatttttgatgcagagaatcaaaagactttataggcagaaccaacatagtcaaaacttgtaaattttaagcttttcatagtgttcattgtgtcttagttctaaccatatcatcaattccacacacataaagtgccaacgcaagataaaatcaatatctatggagatcatatctttacctcattagaaaaaatgacagtctttactgtttctgcttctttttgttctttgtccactttcaggtccagactggtttcactatgcattgcctctggttcactaatattggtctccaaagtctttaagatcgcagcttcttcgactgttgaagtatctaccgcctcagctttaagggtctcacattgtggtatgtctctctccaatacatgttcatgttcctctgtatcctttgagctttgatctacctcttccttaagttctagtgaggtttcagattcaatgtcctctccttgaattgttggtgtttcgattaccgtaggaccttcttgcacctgctcagaaaaaagattaatcagtgttaataaagttttcttagtaatatttttctcagatttgaggaattaagacaaaccttttctattttttcggttatgtccgcttccctttctgtgtctacagtcacttcacgtgagatttgctctgcatcatctaagttttgtgttgcttctactggttctgcatttttctcctgatgattatctcctttcaagctttcagattcatgagctgtagtttcttcattattaacgatcttagcgtcttggacaactgtctttacagtctctagttcctctttctctatcgcatccaacctcggttctgcatctgtcttcatctctgcctcttcttcttcttttctcacttcaagaagaacactttttgtagtttccacatcatctagtgattcaccatttgttgcagtttcttcttctgcagcttctacgctatgcaacgcatacgtttcattcacaatgttctcactgttcgtcgatatttccttttcttgttcctctttggagcatgcctctttgacttgttcctctggctgattctgattgatagagcatatttcagtcaaagaaggtccaatatctcttgcctgctccactctagtctcatgaatttttgttgcatcgtcctcattttttatttggagcatcggtacttcctccttcgctttttcgtctactatttcctcagcaacagtcacatgatcttgctcctcagaagaaaatagcaatgaactaggagattcaactgtttgcacagtctcaagacttttttggatcttctctgctgcttgttcttcttcattctcttttatgttttcaatattttcggcttcaacaacagtctcaccttccagttcctttgaaggtgatgcagataaaacttctatgacttcatcagatttaacttcttcatttgttggttcatgcttctctaactttgtttccttttcttgctcatttggttgggatgattcttcttgcagaggagtcagatcagtcacactcctttcttcctgggctatttctccaagctcaatactgtctgttttttcttcgattttctcatcaacggttttgcttgattcctctaatacttcagaaggagactcaagtgttggcttctgcagaggagtcggatcaatcacactcctttcttcctgaggttgttcttcaagttcaatactctcaggtactgaaactgtctcttcttttgtctctaatccataggaaccgtccacttgaccttcttgatagagtgttacttcttcttctggtttttcttcgattttctcatctacggttttgcttgtttcctcagatacttcagagggagactcaagttttggcttctgcatctgctccactgatttaacatccagaagagaaaccggctttgcaactagaatttcctctgtttcattggttatgttttgatcaatttgctctgcctctgccccattagagtctaagcctatcggttcctccataatttgagtaccatcaacttgatctacatttatcttctcatcattcagctcctctttatctacatttaacacaagatctgatggacttttttcagatttctcatagcttcctgtattggagactagaactgtctcgggttcgttgccttgatacttctctgattctgtagatggaactttaagtacatcatgcttgtcctcagtgttttcgtcttgaacagtctcctgagatttgacctcaacagattcttcttttccatggctctcatctttaatctccgagctacaaggttccgtatgttcaccaaattgttcttcttgaacagcagaagatcttacctgttgattgaaaaagaaatacaacagaatcagaatcttgtaaagttaaacttgagctagctccacagttacaaaactagttttagacttaaccattgtaatatactcatgcatgccattcattattaacttcaaaatttgcaggtttttattacttaatatcatcatcagtatcacacacacacaaagaagcacaaaaatgagagaaacaatatctatgcagatcgtatccttacctcatcagacgaaaagacggtcttgaatgtctctgcttcctctgtttctttatcctctttcaggtccagacttggttgtgtgtcttcttttgtctcaacagcctcagattctatggtctcacactgttgtacgtctctctctaatacatgttcatgttcctctgtctcatttgagatatgatctacctcttccttaggttctagtgaagcttttgattcactaggacgttcttgaatctgcacagtgaaggataaatagtattaataaagtttcctgaaaaatgctttactagggaatgggatctttagctttaaagaattaagaaaaaacctcttctgtttttggggctatgtcctcttcctttgctctgtctacagtcacttcacgtgagatttgctctgtaccatctgagtttttgactgcttccactggttctgcattctccttcaagctttcagattcatggactgaagtttcttcattattaacaatctcaggctcttctataactatctttacgttctctgtttccgctttctctatcgcattcagactcggttcttcatctatttttatctcttccttgtcttcttctttttctgcttcaagaagaactctttctgtagtttcaatttcatgtactgattcaccatctactgcggtttctatttctggacctgtctccttagctttgacctcaatagattcgtctcttccatgtctatcatctttgatctccgagctacaaggttcggtatgttcaccaaatacttctgcttgaacatcagaagatctcacctgttgattgaaaggaacaaggttcaaggaatgcaaaaatttaaaaacgggcacatgaggtgaaagaattttccattatcagaatcagaaacttgtaaagcaaacttgagttaactctatatgacaaaagtagttttggcctaaatcattaactagtaatttcaagatttcaggttttcatctatatcttagttttatcttcatcatgacaaagaatcaacacatgagaaaatcaaaacatctggagattgtatccttacctcatcagatgaaatgatggtctttaccgtctctgaatcttcttgctctttatcgtctttcagatctttactcggttctgtgttttcctttgtctcttgaccgtcttcttctccacctatggcactatgtgcctctgattcattaatattggtcttcaagatctcagcttcttggactgaaaaagtctctgcagtcttagcttccgttacaagtgtctcactttgtggtactggtacgtctctcactaacacatgttcttgttcctcagtatcctttgtgattttatccatctcttcctcatggtctaatgaagcctttgattcaatgtcctctccttgtattgtcggtgattccattacactaggactttcttgcacctgcaaagtaaagaatcaaattgtgtcaacaaggtagtctgaaacatgttttgctcaaatataatctttagcttcgagaaactaagacaagacctcttctatgttttggattatgtcctcttccttttctttgtctacagtcacttcacgtgagctttgctctgctgcgtctgagtttttggttgcttctaccgattctgcatactcctcttgatgattatcttccttcaagattttagattcatgagctgtagtttcttcagtattcacgatcttagcatcttctacaactgtcttataaaacggttctgcttctctttttatagtttcaacatcatgtagtggttcaccatctgtcgcggtttgatcttctgaaactgtttcattcacagtgttgtcaccgttcctcgagatttcttctactgaaaccgttgcattgtgctcagcctctgttccatttacagaggtctcaacagttcttgaatctgtttcttctcttacttcatcagtctttatcggtatctcttcacatacctgcaatagagtaccatttcttagttcatttgataggagcaacataaattgaaaaacataccgagttcaagctcttctctatatcgtattcatcgactttaacaggtgtggtatcagtcaataccttagagatgttaccaatatcctcttcttgttctagtgagtgttttgcttctgtttgatcttcttctattaccggcttttcgacactaacctgcgtaaaccaaaaaagtcattaaattatactctctatctcagtacatctctattgcttaaacttcaaggaacttaaacaaatacctcttctggctttccggtagtatcctcttctttcttattctctaaagtcacatcacttaagattatcttctcatcttcttttttttcgttgaggctttgaggttcacgaacgacaatagattcttgatcatctttaacgatcttactgt

SEQ ID NO: 801 - DNA, 30578 bp, Arabidopsis thaliana
catctagaaccgagatagtctttgtcgcttctccattttcgcgttttaattcttcggtttctttatcccctgatcgtataaaacagtattgagtacaaatttccatgcttttaaagaatctgaaacattttgaatgtgtggcagtttcttgctccattacctgaaccatttacaacctctgcaacatctgcttctcccgtaataatattgtttccacgatcggcgccacttgtgatctcatcatcaagaacagtactcaggtttaccttttgtacttccatggatgatttttcaagtattacttctgcaggaactcccccaacatcagtctgtatataagaaacatgttagtatctcaaaacgttaatttcatcgatccgattcagagccttaacccgaaagcttgaaccaaaactatgatcccaacatgttagtatctcaaaacgttaatttcatcactatacagttcaaagttatttggattggaacctatctactgtcatatgcaagtcttagacataccagttattgaaagatattggataaaaaaagaggttctaatttacagaatctgtagctagagactagagagtaaaacagattacagattacagattcatgatatctagttatcaagatctgtatcataattttttttttaaattgtaaatcataagactacaaaaaggaaagaaggtagaaacagaaacatactttttcatgtcaaaaaaaaaaaaatataatctcaaagaaggagaggatatactatgtatctatgtagcataataatcagcatcatgatcatacctttgtagagactggttcttggatggtgacaactccagtttccatctttcatgcagggaagaaatgatttggaggtttagggtttgaacagttgttttctctgcaagaaacctactgtgagtacaaattctgaatcacccagataattagagacagacctgtatgatgatcacttggcatataaaaaaaagtcagtgagaagacagatagatgatgtatagtgacaaaacttggcacatttgttcaattgggttggctgagttggcttttagattaatcttttgtgggccttttgaattgatcattccacatgcaattggtaggatcctcaatttccagctttattattcccttaaaggcaatcaccaaaatagaactaaatcaaaaataatatttccaaactttttttttgaatcatagttacttagcactgtgttttaggacaaaatacaaaaataatcatttatggataaaatggccatgaatgctttgcagtttttagtaggtttatagttttagtttttggtgtaggttttagttttaacaaaatcttgaatggtgatttgtttagtcatctattttaatttgtttgtttctggttttgtgtttaaaaactaaaaaaacgttacgtataaatgttggtttgtggaaaccccttgcgctattagttgaccaatggttcattaatgtttctacaccaaaaagtttgggtttcgagtttcagatattgtgatttattagcagattttcgtatatgtaatagactaatagttgtcataatttgtaataaataataaatctaagacgacaaaaaaaaaaaaaaaaagtttgttagaaaacccataaatttttggtttttgagaaatttagttataatagtttccccacttatgttagtattttcatggttaactaattaatcatatattctttaatttcttctaagatcatttggatctagtataagtatgtgcatatacaaattcgtttttgttttttctacaaattaaaaatttgaatagtttaaaccatttaaatctatatttataacgaaatctatttttcgttgagtggaaattagatacatgtaccaaaaattctgtaagtatgtaatatgtggtatgtttctattttaccaaggtttttttaatttaaaatcaagattttagcatttagatcgaatcggattagtgacaagattatcgaatttactgattctgcctttgaatacgaaaatattattttaaataaaatctactaatattagtacatatttgttttcttaacagtaaagaaacaacaaaataaatagttaagaaaaagtataattatcctgtaattagtagaaacgcaatcaattcaaatttagacgtttaaaggataaaatattttgtgattgacccgtccgcactttccatttttttcaccatcaaattccgcaggaatatattctagatggaaattatatttgggggtaattatcatgttttctttaacagaaattataagttagctaaatataaattaaatcacatcatcatcatcatcatcatcatcatcatcattgatcacaacgttagtggaatcttatgcaaatgttaataagacattttccatttcaatttcaaaaaagctggccgccattacaaggaccgacccatcacccccaacttgtataatatatgctctctattttaatgatatatgctctctactaaaaattactcatcaattctttcacgggccatacaaaattttaacatgtacctaatttttaaaactataatttgccgacaaaagaactgattattaaagctattaaaacgccgtcagacaaaaaaacaaacaattaagctattaaaaccagtaatgttattaagaaaattgaaaacaacaagtctacaactgatacaaacatttaaaaccggtcatgttgttaagacaactgaaaactacaacgcccgatcgacgatagggatatgcttcattatttttgcatttttccattttgaaactttctattagaaaaaaaaaaacttttattctaatttaaaacaaatgttttcgaaattgaattggttggtttagtatttcacggtttaatttaatttaaccagctaagccgaattttgaatatatcatatttctgaaactaatatttccaattcaagtatatgaaatagatagttattttaacttttcaagaaattcaaatttaaattacaaatagaaataataattgtagcttctgtttagaagaggaattaaagtataattaattgaaagaaaaagtaaatttgtagtgcatataatttaatttttgatactaatgaaagtgttacaaatacaattatcacaaaagactaacctagatttaaaaagtttcaaatcacagtgagatattgaatcataattcaaacagaagtgaaagtaaaaaaaactctatcataccttcttatagtatatactatttactatatgtaaactaaattcaaaaattggaagtaagattttttttttttatcatacatacaacatttttgtgtctcattctttaatatttattttaagaaataaatgttcttcattttttcaatgtcaaaacaacatgttcttgcacgtgttataagatttttaagatacataactgaatcagccggtgctgaaaattgaatcggcttttttatccagaacttctggttttgcggcttttttaatttctacaaaaaatacttttttctagtgataaactagaatggaatatctggatcattttggattggtgcgatcagacaaattcggttcagtctaaagaatgttgctttaaagcaatgttctgtttatttttgtcattttgtgtttgtttggtcagtgcacagtaattattttaataaaagtaatgacaccacatttatatttttgttttggcaaattggcaacacacctagattagttgttagtttattttcctttttaacaatcaaactgattcaaaatttgcggctggtccagcccaaaaacaaatattggtgtaccaatccttcctttctagtttgtataatggttaatcatcttattaattgacattcatatatgttctatttctcgtcactatatatatcttataaaagtaaaagaaataatataatcttaataaaaatttcgtccaataaatctttttttttttgcaccctaaaagtattaatttattttatttttggataaatgtaagaagaaaacaaatcattgaaacttagttttgcatagaaaatgtggatggaaacacacatatgcaacattgatttatgttgagatttaatctcgattgtaatcaattatgaatcatctatatgtggttcttaattatgcttaattacttattcagagtttcgaattccactttttctagagttgtgatagtaacgggcagataaaaatattattgaaaacttaaccatttacaaaatgcatctctagtaatattttatactactgaaatataatctgcatatgaacatcaatgttggtctactttgttttttttttccacaagttggtccttcttggtctactttgttttgtggcgtatataagtaacatatatgctatgactaaacactgaatgaaaatgtatgcaaattgataaaaaaaaggaggctcctatcaaaccgaccaaaccgaaaataattgtccttacgtcgccgtccagaacaatattatcgaagataaatccaattttgcttttgcgcccaatattaaatttaaggtaatgataacaattcggattgggttcataaaagcaagttataatatacaatgaaatatacttttggtgtgatgtatcttaccttttcgtatgaactgattgcgtgaacgattgcatcacttatttagcctaataatttttctaaaagagaatgatccgatccagattggtttagatatgatcaaaattgcaaggaggttcgttagaagttcaccagaactgttatttacttgcaaggaggtggcccgagcgttacaaacgcgatataaagattaatcaatatggataagagtgactataagctcatactcttagaataactttgaaaatgtgtcgcatgataatcgtttgactaggtttacgttttctttatacactatttttgaataattattcatttaaatgcatttcatgtataatattctctttgtttatttttgtttgactgtttaggaaaaacacacatattaaggtaagcatattaaagttgattttaaatgtattattttgtgtgttttacaatttcatataactttaaaccaatgatattcaatcatttttattaaagttaacacttcatcaaaaataacaaataaatgttgcataaaaaaccttaaaaaatcaatttcttaaaacaaatttatttcctagaaaatcaaataaaaaggaacagagagaatagtaatttatagatgactaattgataaataatttttcatacaatgtaaataaagaaatagtataaaacatgttaaatatttatatagatatattttctaaacattcatgtatcacggaacgaaaattggtcgagagtaagatacacaagtcaagataaagatgtgaagtgtaaaattttcacatgaagaagaagggattgttgtccagtttgccattttttggatttttttctaaaaatgataattttactaaacttttacaattttgccatttttaacatttaagatatacgtatttacgattttttttttaaacacgtattttataccaaatactaaaccaaaaaaaaacccgactaattttatcataatgggtaaaacacaagttaaatcacttttttatacctgaaaaatgataaaattttaaaaactatttaaagatggcaaaatctataaatgccataagaagaatagcaaaattcgtaattaattcgaaaaacaatcgaaaccttacaaatcatcgtaattaaacacatgttagagtcatttttgtattaaaagaaaccctcatatatcagaacaaccgaattggatacaagattacatgataaatgatcgagaattggcgagttatgtataagatatgtcaaaggtcttgctggacattcgggttcgatggcaatttgaacactttcgataagtaactaatagaattggccaaagaggtcttataaggctggttgactaagagggtcccatgcatttctttcacactaaaatagataagggtcggctcttttgtaggtccaatataatatgcgttactttcaatttcaaattttagttaaaaaacatttcaaattgttcttcttcatattttacattaattttcataacgttttgaatgcgaataaatctaatgcttatgtgacacaatgtcagccctagctagtcccgaccttcctcaacttgtctctatcaccattcatgtctctcaaaggtccattcatcctatcgcctaataattgaatattgattacttttattacataaagaaatatagaatataatatatcaaagttaactataaaattgtaaattgtaaaatgtaaaccttaactaaaagatgtatttgattacatcatcttttttttgtctaaaagaaattgggatggaccttttatctatttgtatctcttcgtctcatggtccggaataataactaaaatttacctaaaatttcaaatttcttggtatcataaaataactacaatgcaacattgacttatacttcatatcgcacgtatcggatttaagatttctagggttccaatcttcatgttcgactctagaaccagagggagagcaatccatcatgctgataatcacccgccaatctctcttatccttatctttctaatgactagaattagctgcatatatattgtttgtttgatattgacattgtatttgtacacataatggcttctatgtatatataagtgcatgcatgaatccgtgatgatggcacaccttaattacgaacataactttaaactgtattaatgatcgattagttatagatatataatatattgttgtttgcctccatggttagctagtttttgacatggcttgatatgctactgatgttttctaacgttgctgtttattgaattgtatatatcatatagtttaataatgttgatgaataagccgtgagtgatataaattccaaactcattttccacaagattcacactagattttgttttcggcagattccatgattgttgataatcttatcaaccaaaattagagagaaggcagatgaatatttaaagtgatggggaaaattcagtgtgtcaaaaccgacgtcgttttgatgaccaacaaactgacgaactgaagttaaaccgagttaatttcagtttgaacctaaacccagagaaaaccataaaaaaatgtaaattaacgataaccgattagaaccaaagagggtaaataaaccaaaccgatgttctcttcttcggttcttctcttacctaaagaaagaaacctcgcgggaaagtaaactgggggcaaaatcgggaatcactaaaaggatataaaggcgggaaaaagagccgttgcgaaccaaaactctcaaactatggcgccaaacaaaagacggtggttgcgactctgcccgtaaaatttctcgggcacctaaatttttattctttttaaatttccaattttatccctttttttcttcatcttcttcgcaaagcttttttctcctgaatattattttgactatttaaaccctctctttatctcaatttcctctcatttgttttttctcattcttctcaacaacaaaaaaaattcttcctttcagaccaaaaaatttgaccaaccacaaatttttaatctttttccccactttcattttattccgattcctcttcttctaattggaacaagtctctgtttttatctctctgttttctttttgggtttactctgttttttcatttatcttggttttgagttagttaaagagagatgggtttttcgaagaaatctcaattcgaaggaggtttagaatccgacgggaagaaatgggttatcgccggaatttcgattcgggcttcgttgaaaccagtcaagacgaaactcagagcgccgccggagatagtgaccgaagttgaagaagattgctacaacgaagaggaagagtgttcgacgacaccgacagcgaaggaaacgaagataccggagttattggaatgtccaccagcaccgagaaaacgacggccggcgttaaaatgtcggagtaacgtcgttagagagttttttacgcctccttctgatttagagacggtgtttctacgtcgccgttagtgagatttgagttttttttaatatagttctctagttatatattagttacaggccatgaaaactttggttattagacttagagttaaaaatatatgataatgaatctaattatgataatgcgtatcttccaaattagccttgttcatcacatttggtttcattaatattttggttatacatatatcaacaaataatcagtccagattttataaaaacactaatttgatgtagaaaattttatactcagagccttggattaagcctacggagactaaaggagaagtgacgcgagcaaatcttaccagttagctcaactacctaaatataataataaaattaccaataatttgtgacaagtccacacggcaagcttttgactctccactatactcgttttttttgggcaaatccactatacacgtttataggttttttttttgttgttggtaaaactcgtttataggttaataacttaaactatgtatttgcataattattgtttcctttatctaatgttctagatgtgggccaatatagtttttattaacaaataatatggtgggatctaatacaaaaatctttaatttcaaataaaaagaggtaaatcatactatttggaaagagaagaaatcaacaattttataatgcacacatgtaatgttttttatatgctttaaaaggattctgaagaatttcaatgcatgacttttttttaaggaggcctctacttctaaagccatcccaacaaatatgatactttcttttttcaggttaaagagctttttgcgtgcacaattgcacactcactaagtcattagtatctttaattcattgaccactactttgtattgtaacaaattaattaaataaactcataagacattatgattagtaattactcatgctacgcaccaatagtactatttgcagattaaatgtgttgcatgcaagtaagtcactaattctcagttgtgttcttgtggattgagtcatgaaaaggacaaaatagggttcagagaatagcggtgcgatgggagaatccaatgtgggacttaaggccttgtttggttcctttacgagacaacgaccaatctcgtgtttttttcctcttttttttgaaatgccaaatacaagagaaatatttgaatagaaggagactatgacgattgacgagtttggatcattcttgtgaacgagtttatttcactgtcatgactttaggaactataatacatttcttttcaggaaaaaattatattgcctgccgaatgtactagcaattcaaaatgagaatccaagtttgaggattaggttcacctttcacaagtctgtaaatttgttctagttagcaattccaaaacaatagcttttagtgtcccaactgatgatagccgaatcttccattttaggagactttaaaagattaaattctaagctgaaagtgcggatgaagtaatataaattgcaaggaagaaaagacacaagaattttgttaacgagattcggtttttcctactttccgggagaagtttagattcaatttcagtagaataataaaacaaattacaacaaatttgcaaacgcgtaaaataagcacaaatctcttgatttaccgctctcttttaaaacgtgaaaccttaaagataatttttactcttaattaaattccttcaaaatctagatttaatcaggataacacctaaccctgaactaaactatccttaaatctagacttcaaagcaaaaccacttgatcacacaagcacaaacccgcaaaactaagttgcacacaatcttacagaaagttctcaaagatttcttctttatatctcagctctcttgcttcttcaaaacgtctccagcttctccgtatatatccaaaacgattttttaatcattataggaaaagatttccaaattccataagaaaaaataaatttttatttacattttccttttttctcattgaatttcacgttcatcaagtcttccaaatccttctaagtcattttcctcttttgattcatcatctaaacatattccaaaaatatattttcaaattttctagtaaccgacactcacacaaaaacattcgcatcctgaattacttcttaaatcatttagcaactccatcaaacaaaaatttgtatactattaaactcattcaacgactccatcaacaacaaatgcatcttcataagaatctttcaaaatgtgtaatttcactttaaaatgcatgttttgattattcattggatccgtacagatataaggataaacaaagaatttagtacgtaggagtcgaaatgaataacttattaatagagatattattgttacttcttgactaaaaggattttttttaaaagaaaataataatttaaatgacggatatcgtattgaattgattttttattaattcatcttttttgtttcttatttcatcttccatcatttaagaaaacacaaacatttttcagaactaacgactcaagaatcaataagatcatgttatatatcagtgtccaaatcttatataataacacatacaatcaattccaaatttatataatatgtaaaagataatgattgaacaagatatttagaatccaagaagtgactgattattctgattatccaagaagataagataattattaatttgtaaattatagtttaaacgaatccaagaagtgacactaattaaaggtaaacaataaatttgcaaggatcaagattacgtgacaatttcacgatgcctaagtcagtttctcaaaggtaatgatgaactcgaactggccgtcttctaactagttcatctaattaactagtattttagatactttcgtattgtctattgtgtgtgtgataagatgtgcatacatattaatagttttggttttatcattcttttgtactgtcgaagttttggttctcttttatttggatagagacatacatttgtgacttgttctttgtctatatagatatgatagtagctatcttcaacaatgcatgtgcttctctaggggaccaatcgaataaattctagttatcatataaataaaaaatttctcatagactctatatgtgtagacaaactatgattcctaaattgaatgaaaataaccaataattatagaaatacaagtaatcggaatcctgatattggatagtagaattgagttggatgacgaagaaataaactcttaactgaccggattcattagcgcatgttgcgttgccaccttcgcaagagttttgagcagtgagttcaactccatctcaccataaaaagtctagtagttaaccaaaaaaaaaaaatcttaactgaaaaaccaaatagactttaattattgaaaaaagagttgaaagctaaaaattaaaccataattactaattagtcatccaaagaagacaagatgtacttggtcatgaatatattataagaggaagtaatatttagagcatgtctatatgtgtcatgtctgaacttcggtttaggtttctccactaaatattttacaaaatactcatttatatgcgcagtcatcaggttttgggaatacatgtaaactgcaaaaagaaaaacggacgttaacgaaataatgcaattatagtcaaccgtccctctaccgaaaatatacctcaattttaacaaagaaagaagatatacctcaatgtttgaaatatgtgtaatgtataagtaagatctataagatacactaattgagatgatcgacattggtagctattacgtaattataagtaagaatacttcccaggggatgataatgggagaacgggctacatttgtactataagattcttttcacatataaataactcctagtataatagtacaagtgaaagaaaaaaacgaatccaatgcaagtgtgaagttaaggtattttgaattttgttacgcatgcatgaggtttttttccacagtgtcttaggttaagaaaataaaagaaggacactggacacgtacacatgggccgccaaaaaggtatcctatgcccgaaactatatgtatagagatgtaagaaatttaaatttaaattgattttaatgatggccttatttctcaaagaatgtgtatttttttccgtacgagtcttgattttgtcttaaaacgctaatatgaaagtaaatgactgttttgcccacatccttcttcgctttaacgcggttttgacttcttctgcccgtcttgcccggttaattatggcggggaaaatggaagagagaaaaaaaaattgaattaattagaagagaaacaaaaaaggtaagattcttggcgggagagcgtaagcccgggaaaagcgggattgtagtggcggctgttttgtgtaatgtatgtgtgggagtttgggtccacatcatcgtcaacaacacgtgtctgtctgaattgactcactccaacataaataacacgtcagcatatgggcccacttgggtttttaatcgtttcatggatattgagacgtagccattcgtcacatatgacgccacaaatcttattaagtaagagtatattttgacgacaaaaacttacgaaattatactaaacacaaaaaaaaagctcaatacaaaattatgtcgacgacgtaaaaaattctcaccaaattatactaattatgtttgaatttgagagacaaaaataaagtatgcttcaatttgaaaagtgcagtttagttttgtcgcccttttaacatgtcacaaaaatgacattctggtttttttttccttaaataatgaagatgtcaaagattaaaattttctttatttatagcgatcgtacaatttctctacaaattattctttcgtcaaaattaactgtatataaattttcaaattttcttagacttcttattcataaaaagttaaaaacagtagccattttatatattttttcctgagaaaagtgtatcaattgaagcccataagaattcaaaatggttttaacttagacttatctttctttacgataagaagcccaatattaacataaagcccaaatttgagtaactattgattattattttttaacgtttcaagaataccacttgcctttgtcaaggcaataggacaataggaccattatcaagcatttgggtgaaaagactcacatattttttttttttgtagaagtcgattttataaccagtttctgtataaatcatatggtatgcttatacatgataaacaaataataaaaccacatattggtcaataaaatttcgtaaaacggtttacaaatattataaaaacaaacgacaattatttttcctttgcatattccataatagtttacaattgttcagaagaaataaacacaataacttaacaccgaaaatgtacatcattgtgtttccatcttattcatgttatctacacttacccatatatacttcacagttattcaaacactaatccatctaactaattaccaaacaagagaatcaaacacaacagtttcaataaacttactcgaagccaatttcaatatagcttctgtgatctgattctcttcaaccacaagcttcttcaaacattgtgtcttcatcacaaacccctccacatcatcaggctcaatcaaccgacaacctaaaatgtctaaagtcttcaacttcacacagtttttgttcaaagcaaccaacactgcacctgtcaaatgcttacaatctctcaaaacaacctcaaccaaaccattgcaagaagctaacatcgaaacaacctctttatcgaataaccactcgttccgagtcaaatctagcttccttaacctccccaaatgctgtcctattgtcgccaacaaaccacgctctcgttcaatcgcgttgcagctaagcaaagaaagctcttcaagactcgaactaaagcttaaagccaatgcctttagactaaaaccagtcacaaagatacagcttgtaagcctaagagtcgacaaacacttgaaattcgcagcgagagagactaaatgatcatcggtcaaatccatcggtagacgtaaatcgagtctttccaaagtatcataacatctagcattgctcataaactgaaccaacccatctttgcttccaccatcatgaatcaacagagactttaaagattcacaaatctctgatactttaagcagaaccacatcaacaatactcctacatgttcttaactcaatctcttcaagattcttcaaacacaaaccgatttcttctccaatacttccacaagatctcagactcagtttctttaactttctgcaacttttccataaccaagtaacatcattatcatcaggttggattccaaataaagaaaccgattccaaacctaactctacaacttccgggttaggtttagactttggatagaaatcgaaagctggagaactcgttgagcaaacatggattgataattctttaagagatgaaaacagagcaatccaagtgaaacctgagttttgtggtttccataattcgatagagagagaagtgagagataaagaagtagagagaggaaccaaagaagatgaagaaactggattgatcaagaaacagaggtttctgagattgaagcagcaagaagatatgattgagattagctcgtcgctgaaaatggtttcagctttcagatgctcctcatccgaacgacttggggtagttcctatggttacgccgcgatagatagagagggaagagagacaaggatggttgttgaggatagagggcaaaagggtaattacagaggtgtcgtgaggactgaattgtaaggacatggaagtctttgatgctctgtagagacgaagccatcgttttgagacaagaggaaccgattcgaaagaaggtaacgaagatgatgaggaagaagaagaagaagaagacgatggcagtcttgtaaatatctcgcagagaatctcatcgaataaaatttcttccatttttttggagaaatcgaaagacgatgaaagaaggattttgctgagacttttttctttggggtttcgacgatttgtgttcttggtggctttgacacttgtgttgtttgattcttgagtcacgcaagagacggacccaaaaaagaattgataagttgagttgtgtctgtcgtatgaatattcttacattcaatagcattaatttaaatatatttagtaaactaacgtttatgagataacaaaaaaaaaagatttatataacgtaaagttttctattttaacggagtacaagttaaataaggttaccaagatttagggcagtttcgtgtttttaggagatttttttaaatgaaattattttatatattagcatttaattagggttttcttgaacgatgtcacttaattgaataatcagtagtaattgaaaatctcttatcaaaacaaccaatgtagtacagtattaagttattcaatcagcaaagcaattcttctttaatttttagttgacatcataaggaatcgaataatataatttctccaccccaataaagtaactacaaaaagggaacctatcggtctaatcaactgagaagaaccaacctttcgtttatggcaaaactatgtttatattttgaagaaattaattaatctgttttcttcacttttacaaaattaggtgagagaggtgaaataagggagttaagtgcttttgctaaggttttataaggaaggattaagttgtcattaaagataaaattaataaatgaaattaatattttacaaaactatatgtttatattttgatgaaatcaataatctatttttttcagttttacaaaattaggtgaagaggggtgaaataaggagttaagtgtttgtgctaaagcctaagattaaattgttgctaaagataaaatttctatggatttttgattcgattaaaagatttttaaagatatcttatacttgttcaccaatttttttcttatattttctaacctaaaacaagaccaatttctaaaatcaatataaatacactctcaccaagcaccaaactatttttacttttatcacaagcaaacaaaacttaccacccgaaatgactgcttcatttgcttacttgagagacattcgtccttacaagacggcttggggagttcatgtcaatttgcttcactcttgacatgagcaaatatacctgacgagacacttgagttggtagttggtatcagagccgtgccaatgagttttaagaacataggcaaaataaaagtttatatttcaaattattttattagaaatatatcataaaaaatatcttttagtgtttatttatttttataataaataaaaacgaattataagtaattgcataattttttagagtacaaatcaaacaagtgtgaattatttagtgaatggtaagaatataacaaaacttggtatataaatgggatattcaataaaaaatgtatttttcaaattttaaacatatactataaagtataaataaaaataaatttgatattatttaacatgccccctctccataagaaaaagaagaagaaatgaaagaagattggaatcaatcagaagagagaaaagtagaggaagaattatatatatgaaagaagactaactctcttccacaacttgacacattagcacatgagagtttgccacctagacttcataaaataagtaatacataattagtaattaattcaacataacaattaaaatagaaaaatataattaatgagaacttgaaccatcactctttctacattttttaattcaatatatcctctttaattttgagatccacttaagtggctaaagtgatgataaaatccaaagatttacacatattcctggcctaaaaattagacgattattatgaaagaaactaaatgaatatgcagattaaatatatctaagcttttcaagatttatgctaagaaaacaagtaatttgaaagatatttgaggagctatctttataactaatacgtaagatataagattatgacaagaatttaactaaactttccaagaacatcaagttgaatatgcttagattaaatatgcagagacatgattaataaagacatgttatatttttagtgtaagaaataaattttctaaaatttcaccgtctcacaatctatacatataattaaaaaagcaaggatatataaattcaaaaaaaaaactaaaaatctaaaacaacaataaaaaacaactcaagcacattcttttttcagatgaactaatatagttgggcttttcaaaaacaattacaaatcatatttatgtttcaaaacctatgcatttaactttactttatatgaacatgcattatataaaacaatttataaatagtaatacgtaaacccgcacgtagtgcgggtactcatctagttattattaatacagtttttgttcaatccgattcaaaccgatttaacccaatttcaatggcgtcaataaaaacatactcacgacgcactctagagctatagagagagagaaagagaaagagagaaattttggtagagagataggaagacaaggcttttcgggtgtgcaaaaagaagaagatttgtctgtatttatatatttatactctttgtaagaattattacataattggttattttcttttttctctttttcaatattaaaaagctttttatttttgcgtatgtaagagaaaatccgtacagtataaatacaaacacaaaatgcacaaaatttatgaagaaattaacttgattttgatatgagttatgtaaaaatttggaaatttgaatatcgtaggcgaatgtttcattttctttcaagtaggcacggttctgcatagtatttagtaaccataaggtttgtaataaaattagagaaaataagaaaaatcataacagaagatgctcgagaggtattgaaaatatatatggtgttgagtatgtgataacaatttacaaatgtcttgtgtattacaaaagtctatgacctctcaattacctataattttttgttcacgatatatgatcaagtaaatatccctaaagagcaaattcttgctgcttaaacaacataaaaaccataaaaaccgttgatgtgtgacttctaattgtacttagttatcttgtaccatcaacttttttgtaatacttttgtcaccaatcgcagtttctaattgcacataggtaaagtcttatgctggattttaaaaaatttaaaactctagggaccaagcttttaaagactcgaaaaaatcccaaaagctttctttctctcccgagcacctgaaaaatcaaaaccgcatcggcgcgtgaacaacactctcctcaggaaatgctaaaacgacagcgaatcttccctcgccaccaataaatttctgccacgtaaccgtcgtttccctcgattttcttcccctttccataaacccctctaaaaacccttcttttagggtttcaatctcatccatctacaacctctagctcttcgatttcacgtcactcttcactcaataaaaaagctactgcttcaaagctggctacttcttcaatttactctcattcgtttgcgttgatgtagcaaaacaaaaaccaaaatggttcccgtctcgttctgcttcttctttctccttctcttgctctctgctggagagagttcatcgcaattagtttctggtccacacatcaccgatgttaacatactcttacctcccaagatgaagaatccggttgagtatcgccttcaaggaagtgatggctgcttcaaatggtacacatttacccaaactcatctctcttataagtagctgtattacccaaatctgagttttgttgttgtaatttgtaggtcatgggatcatcatgatattctatcagtcacacctgagtttaattcgagcagtcattgttcgaccagcgcgcgtctcagatcgatttctccgtatagtggtagaaaggagactgcagtttatgccactgatatacagactgggatggtgattcgctgcaaggtctttattgacaacttctcacggattcagatttttcataattctatcaagcttgatcttgatggtctttccatgcttagagtccgcgcttttgataatgaaggttagtgtcgtcacaagtcaataaagtaatgtttttgcttcagtttgtgctgtgattttagaaatgtgctgaaatctatttgcagataacgagttctcctcactggtgggtctacaattcatttggaagctaatgcctgagagtggtggatcaacacatcatcttgctcatgtgcctttgaaggaatctccgttgactgactgtggaggactgtgtggctacttagatatccagaaaaagcttgaagatagtgtatgtatatctattgttgagtgtgaattactgaatctaaaaaattgatggatgagagatctaatgttgacatggtaaatgcagggtgtatttgcagatttgtttgttgtgaagggaactaaaattggacatgagaaggtttcagttcatctgcttgaggctcctctgacccatatagctgatgaaattgtattaacggttgcagaagccatgtctcttgaacctcgctcacctgtctatgtcctgatgggagcttcttttggttacacgttaaaggtcatgcgtggaaatgttcctcaaggtttgtctgcatcttcgagattaacttgttatttagcaatgtttgagttattcgattttcatgtgtgtttaaagctgatgatttttgacacatatattaaatgaaaacaatgtatagagctaccttggtacatttatcatattaaactggcaggcttatacgctttatgatatttcagtggtgttgattcataatttgaaaatacttgtaactgtagctcgagtgtgacatgctatgttatgttgcttttcattctcgttcttgattggtctattgtttattttatttgcagccgtggatctaccatcaccacatcatagatggtctgtgttaaactcttctgttgctcaagtggattctttgataggtctgactaaagcgttaagcttgggggtaacaacagttgttgttgaggatacccgggtcgctggccacattcaaggatcatctattaatgttgtcactccagatactcttatcttgtacatatcaccttggtcaatgtcaggggatcttattacagaatccaaaccttttccatcatctatgcattggtatgtggtgtctggtcgtcaatatctaattcaaatgaagattttctctggaagacctgatgcacatgaaatctatataactgaggtacttttctttttcttttacctgttttgcatgcccacatgtagtttgcatcagtttctttgtgtgacaatattaccttgcctctgtattttctaactataggacgtggtgcatagtttatttatctttaggctgccaatcaatcgtccataagcttgtctttggtcatgagtctctttatactgagtatgtgttctattttggggaggaaactgctggtggctacacagtattcaaatctttaaaactgaagaaaagcctgatgatgtgtcttttgtggctgtttttctttctttctcactgctgttcatttgtttgcatttaagtttcttcctttaccgagttatgtccagaggatttattgtagatgatattgcatgtatgttcaacataataatttcctttgtgttgattgcagacggatgacataaaactgtatggaaaagattcagattattggaaaatcgtctcactgccagatgaactttcctctgaatatggtcagcgaaattctagaattttgaacgcaatctcaccaggattaggagagctgacatctacattgacttacttcagtgggcatcaagagtcaaaagaggtgagaaaattatatatctttggaaaaccttttgtctctttccatttgttggtactgcaagagtaacaactttgtctctagcaggttctcaaggttgtccaagaaattagggtttgtgaaaaagtgcagttcacattgaacagtgaagatgacacacctaaggttctactcccatggacccctgctgtttatcaggagatggagctaattgtgacaggaggttagttcccaatctatggttctcgtgacctattcttttttagtttgaaaaccatggtgacttgatgattgttcctcactgtaggttgtgcaaaagcatcgagtgactacaagtggtttacttcagatataagcattttgtcggtgtcagcttatggaattatccaggcaaagaggcccggtatagccactgtgaaggtggtgtcgactttcgattcacaaaattttgatgaggtacattggctttattgcatattatccatcagttgatgcttcgacaaatagagaaaatatatattttaaatgctcaaactcgtttgtgacttatcatgctatggccctactgaaaatcgtggggcttcaactgattattgtgttttccataggttattgttgaagtttccattccatcctctatggttatgttgcaaaacttcccagtagagacagttgttggatcacacctgaaagctgctgtcacaatgaaggctttaaatggttataactggaaactgtttttttttttacatcttctgtttatatatcatctctactttttggatttgctttattttctctaatattgctaacttggagatcttatatatatatatcaggtgcaacgttctctagatgtgatgcttttaattcattgataaagtggaagacggggagtgagtcttttgttattgttaatgcaacatctgagatgatgatgttggacgaactaagaagcatggactccagccctccttgttcacgggcttctatatatactgcatctactggccgcacagtattacaagcaactctggcaaaagagttccattattttgataagtctttgagtgaatcaatagatttgaaagcaactttaactatcggggcctatctgccactttctgtcagacaagatagtgacgggaatcatcatggtggatattggtttgataaggcacaagaggaaactgattttggtgttagtaagctatatcttgtacctggtacatatgttgacgttatgcttctgggtggacctgaaaggtgggatgacaatgttgagttcaccgagactgtgaagacattatatgaagatgaggaggatcttacaagcagagttaacgtccatcatgaggttgaccgccgtgctaacatgtatagaatttcatgccagaagcttggctcctatgtaagttgcaggcattctatgcgattattttatatatgttggtattactttttatatctaaagtgaaatgacactgtcacctcttccctgcttgtgctcatccagaaactggtcttcttgcgtgggaatctgctgggtatagaccatcctgtacctgcagttgcagaagctttattgtctgttcattgcagcttaccatcctctgttgtgctcattgttgatgaacctggtatgttgaatatttccaattccataggttggatctttcaggagttcctctagaggttatttaccttagtggttaaggtatgccatgatttgctcatgacatgaggtatacatgtcattttgcagttaacaagcttgatgtgattagagctgctagtcaagctgacagggcaccaggacgacttcgtgtaactcctgtgactgtggcaaatgggcaaataattcgtgtggctgctgttggtattagcgagtttggagaagctttttcaaactcctcaactctttctctcaggtgggaattgaccagttgcaacaatttggcatactgggacgatgattataactcaaaaatgacaaagtctggctgggagagatttctggctctacgcaatgaatcaggattggtaaatatattaaccaattccctcctcattatttcattcttccgacgttaaattatttatcgttttctatataccatatactgttttgacagtgcactgttcgagccaccgtttctggtattgattattctttcaaaagccaatactcaactctgcttccacaaggttctgaaagtactctcactgatgctgtacgcttacaggtatgcatcttggtatactaatagtaatagcttgattcattactcccacatttccttatcatctacgcttaaggatcaaattagactttccttcagttaactgaattaccttgttactatttcagatacaactgtagttgtttcttatttctgtaaatcggttgaatatgcagttggtttccacactaagagtcacaccagagttcaacctggtctttttcaatcctaatgccaaggtaaatcctactcattagcaagcgtttcacttaaaaaattggtaaacaatagattgatagtttgatgtatacttggaagcatggatgggttgcaatgagtatttgcatttccccgtttttttttttttttttttttgtgtctctggttctacatgatttgagagcaccataactaggtctgtagtactaattcaatagttttccacccgaaggtaaacttgtcaatgactggagggagctgtttgtgggaagcagttgtgaataattctcgtgtagcagaagttattcgacccccatctggcctgcaatgctcgcaaatgatgctatctccaaaagggttggggactacaatcgtgacagtatacgacattggagtttctcctccactttcagctcttgcgttggtaagtttgtgctctaaacatgataatttgattccggagacttgtgggattttattgatttgttaatgtacgatgaacatgactatgacttctaacaggagtatattttggggacagttctgtggagatcagtgtgtgggttgtcactcttgattctaatctaatctaatctttcatgcaattcttattatgcagataaaagttgcagatgtggactggataaagattgcatctggggatgagataagtataatggtatgtctagcaggcttatccctttctttagtattgtatagttccctccccgtgtgtttttggttccacatttccttctgtggtctctattgtggtattctcatgcctaatttgaatgtggcaggaaggaagtacacactccattgatctcttgactggcattgacgatggaatgacctttgattcttcccaggtttaagacggatttcttgtagatacatgttcttgtttttcttggtctaacatgttttgaaattattcgttgtctatcaagttacagcctacaccaatgtaatatatcggattttttaatataaaaatgatcaatagaatgtaccacaaagtatcttaattactaattttcttattagctgatcatacaagttcttgatttctgaactttcgatcaatgcagtactcacttatggacattatggtgcatattgaggatgatctcgtggagcatgtcactgttgatgaggattcactttctgttggtgaacacgtggcaacttcctcttttaaaattgctgctagacgactgggaatcacaaccctatatgtgagtttacttcttgactttttcgttgctgttattattttgctctagagctaggacatttaggtagatctgaagcaaatttgattttaataggtcagcgcaagacaacaatcaggaggtaaagtgctaagccaaactattaaagtcgaagtttattccccaccaagacttcacccacaaggaatatttcttgttcctggtgcttcctatgtggtatgatagaaataaatatctttctcttttaatctcggatcactctctagttcacataacgattgttcttctctgatcagcatattttttttttcttcttatagctcactattgaaggaggcccgaccatgaatgtttctgttgactacaccactgtggataacgaagttgcaaagatcgaaaaatcaggacgcctatatgcaacatctcccggcaacacggtaggggcaaaatgcttcgaatctaccttgtcttttcaatacttaaatccaataaagcagaacaaaatttagctatgaaatcatttccagctaggctttatggaaagatgtagactcaaaagatatgacattttgaccttgtttctttggtgatcagacaatctatgcaacaatttacgggagtgaaggtgctgtaatttgtcaggcaattggaaatgccgaagtaggacttcctgctactgcaatgctggtagctcaaagtgacactgtggccgttggccatgaaatgcctgtatccccatcatttcctgaggtgagaatcataagccagaaataaatcactttttaattaattcatttggaattatcgcttgcaaaaatctgattcttggttacgttatcagggtgaccttttatctttttatgagctctgcagcgcttacaaatggactattgaagatgaaaaggtccaattctgtgttcacccttacagtataaatagtaatctattttttcgacttctatgtttatgactgaaagctctattttttcttgttaaggtgttaattttcattgcatcatccatcaatgtggaagagaatgctggctttgttaatgtcgtccaaggaaggtaacttaaggttatcgcatgtgctcttgcatttgtactctataaatttaataagatgcaaaccattgtccaattatggttattaaatatttccaggtcggctagttaaaagttatccttatagagaagttagatttcactagtctaaaatatccttacaaggcatcatcatgctcagcatcatttagcttttcaaagtaggctcagctagtgattagcttgacgttaaacattgctgggacagttttactcaagcttaggaaaaaatgacacagtttattagtaataacttgagcttagtattcttgtattctgttcagctaaggtttatgtagattagtaaactttgacgacacacaaacatattcacttaagctaagacaacttaggaaattctaacgagcagcttatcttttctcttacagatcagctggcaaaaccagagttacaattgccttctcatgtgatttcgtgtctcctggcttgtactctgaatctagaacatatgaagcgtcaatgattttatctgttgtgcctgatctccctctttcgcttggggctcctatgacttgggttcttccgcctttttatacatcatctggtctattaccttcatcttcagagccacagaagcatagagatggacaaagtcacagaggcaatatagtctactccatattgaaagactgcagctctcgggctgattttgaacgagataccatatcaattaatggcgggagtgtcaaaacaactgatagcaacaatgttgcatgtattcaagccaaagaccgcacaagtggaaggattgagattgctgcttgcgtgagagttgcagaggtattttgaatgtggaagtctgtatattaactatcttttagtttgtagatcgttgtctgctctagtttatagccaatcgattagttaatctagtaatttcttgcttcatttatcttctgttagtctactttgttggtaacatagaattctgtcaggttgctcaaataagaatgaagagtgaggggatccctttccacgtgatagatcttgctgttggcggtgaacttgaacttccaataaattactatgacactttaggtaactctctcatacttttatgtggatgcttcaatttttggtgtattttttttttttttctttctaatcttttttttttttttttgaaaaggaatcccttttctcgaagcacatggtgttactacatacaatgtcgaaaccaatcatcgtgatgttgtatttattaagactgtcaatgaccaaccaagtgcctacattaaggtgcgttaatccttattatcaattgatacatgttgtgcttatactacatacgtagtcaaaatagtttattcaattcggttaggatttttgacgtacaatctctatcttctgtatataatgaagggaataaaacatggcaaagctctcattcgggtttccattggtgataatctcaggaaatcagattacgttctggtaaggactaatatcatgaatttagatacctaactttataaaaggtctttgtaaacaaataacttaatgtcgtttaggtatgcatacatctgttatgattttcgcaattggctatatcacaggtgtttccttttgtcaggtttcagttggggcgcatatctttcctcaaaacccggtcattcacactggaaatttgttaaatttcagcataacaggtaaaatgtcatatcaaatctatatgataaaggcattttaatgcccgttctgttaaaaatacatatttcttgcaaaatctgagacactgcaatgtgatttaggggctgataatgaagtcactggtcaatggtttacatcaaacagaagtgtcatatccgtcaatgtggcatctggccaagctaaagcgatcagccaaggctcaactcacggtaatatcaatttatcttttcgtgctttttctggtgcatcagttggattctaaaggatcctctaagaggtattctttatcttgcttctgatatttgtcaaatctgcacagttacatttaaaggtcatggtttgaaactgcaaacaaaagtcacagtgctatttggaaacaccatatatgtcgactctccaggagaaacactgacaaatgtccacgtccctgcagaaggatataagtttccagtgaaattcaggtctgtaatcccttaatgttgcattgtaaaatcatatatgcaacaagttagtcactgatgatgatataactgcaacagggagaacaagtttgcagtcactgaacatggaaacaaggccacgtttaactgccaagtagaccctccgtttatagggtattgatgcttagttcaactatatttttttgcagtgaatttagtgtgtatgtatataaatgctcgttcttgacttgactcttatttatttgcattgaagatacacaaagccatggatggatctcgatacgggcaacacttattgtcttttcttcccatactcaccagagcatcttgttcactccatgtctataacaaaagacatgaaacctcatgtgtcattctccgttgatgcttcacttaaagaagctcgacgtgtttcgggatctgcatctgcacttcttataggagggttttctgtaacagggccagataaggttttctgaaagaatcgttaagcaaagcctatattttcagaatatgtgctttatgtgagtttgacttggaaatgtcttgcagctgaatataaacccggattcaaacacgaccatcatttcattagtggggaacaccggtaaattccattatccattgttagttcgttttctttttcttatgaagaaatgcaaaggatacttaatattactcattgcagatgttcaaattcactgccgcaacaaaggtaggttatcaatcagcttgattaaaagagacgattttggtatcgcagggcatgcacaatacaaggtgatttctcccttaaaccttatctataagttcggtaatctaatccaaaataagaaaagatcaacaatttagtaagctgtctatatttatcaacctttttcaggtaaatgtgttaagatcagagcaattcacagatagaatcatcatcactctacctgctactggtgagctaattcttcttacaccggttatagagtaggctcttattcttcaacttaccatgtgatgaaatgttttctacaggccaaattgtagaaatcgatgtctgctatgacacaggagagtcactagtagcttcgtctaaagatggttactctgttttgttgaagatactatggggcgttttggtgttggttgtatcagtgatcatcttgatgaaagtgatagatcgacaagtgcccacaggagctactggaacggcaacatacagtggaaatgcagcacagggaacaccagaaagaagaagcggcacagttatataccatgaggaatctccaagaacaccatcaccatttatggagtatgtgaagagaacagtggatgaaactccctactacagaagagaaggaagaagaaggtttaatcctcaaaacactatgtagaaatttagattttgatgatgatgattttgttgtgagttgtaaaactaccgaacctaaagccagcaatgtttatatcatttgtgcattgtcatcaaaggatccgtaatttgcgctgataatgaatctttaggtttttgaattaagggattattagataaagagtttgaaatgtgagtcagagaagatcaaagccgaggtttccaaaaagaagccatgctacgtttgtatatatattaagccattcaaagtataattgatgacaaagttataaacttatagaatatgcaatgaaaacctaagacgttatgcatgctccgattgtacgcattgtggtcttataatttatgatttattaagcaagcacttgttttctatattttttttggtgaatagcacttgttttctatttgtcttgggatgaaaagacatctgtacacaagcatcagtttactctctactccaatcccaaattaactttgaacttggcaaacgatatttcacaatcacatgtgttgcttgtaaaaaagacaaacaatgaatgaatgaatttagatacgagagtgcagtggaaatataatgttggatgttggatgtgatacaagttctcccaagtttgccatagaggccatccttcttccttattcattctctcacagtctcactttttcttcgagtttcctcagcttgtaacaaaaatgtgtatggcctgttgtgatgaatatcgttctgatttctttatgcgctaccttaaccaaatgaggttctctttgcaattgcagaaataaatatgccaagttcgagtgaaaatactaattgattggtgaattaaattggtacctctaatatcaaaagaatattgatatatttgaaataagtgtcttttgtaaatatgatgtcattcagtacgcaaaggactattatctttctcttttaagagctattccttactttttagtctcaaatataatttttactagtggattacaaattttctagaagatgacggtttttcaaagataccgttatcttttatcgctgtttctcgctgtttgatgagaaaccgtcgtcttctagaaaatttgtaatccattagtgaaaattttcttttaaatcaatccttctttgttttttttggtctcaaggcagaatgttgaatgttcccttctctttgattaccttgtgtctttcttttatctcaaggcagaatgttcccttctcttttttttttttcgtattttttttcttttatcttgagag

SEQ ID NO: 802 - DNA, 85992 bp, Arabidopsis thaliana
taattttccatttttgtccttaaaattactgcaaacaattcaacggctaaaattaagcctatagcgaaaccgatattaaccgtacttgtttctaaatcaaagacacaacacaagtgctacgcgaagtacaataagtgtcgctcctttctcttctccaagggttttagggcttttaggcggctgccgcttctttttcatcttcttcttcgttctccgaaggtttagggtttcgattttcccatcatggatccttatggaacggaaacagttatcgaagacgaaatccacgatcctaaaccatccgaagatattgaagacgatgacgacaaatctcagcctcactctggtggcggcgtcgatagtgctgggtatgtttcctcactttcttccgaaaagattctagattcaggaattagggtttgggtcttttctctatttcgataaaggaagaagctttatgtttcgattctcctaggttttctaaattactcatctttttcgcttagctctgtgaaatttatgtctttgctatagaaatttgagagagaaagtataaagattggaacttgttactctaagagtggagaaggataagattagtgctcttctctggtttgttaatacttagtggttagtgtacttatacgatgttttgtggaatttgtagaaagatatttgttggaggtttagccagggagacaacttcaggttagcacttgagtctggttgctacattgtaagaggttagcgatctcattattgtgtaaagttcaatacttttttaactctggcttttgatttgcttatgcagctgaattcctcaagcattttgggaaatatggagagatcactgattctgtgattatgaaggataggaaaactggacagcctcggggatttgggtttgtcacatatgctgattcctctgtggtcgacaaagttatccaagacaatcacattataattggcaagcaggttagattgatatgtgcttcacacctttagtgtgttagttgtgttgtgccttgcagcgcgataacattcaactttgggtttgctctacaggttgaaattaagcggacgataccaagaggatccatgagctctaacgatttcaaaaccaagaagatatttgttggtggaattccttcatctgtggatgatggtaaacactcttccataatatgattttcttctttcagaatcatgtttttatttactaagtttctcatctggtgattggtgtttgtatagatgaattcaaggagttctttatgcaatttggagagctgaaggaacatcagattatgcgtgatcactcaactggaagatcacgtggctttgggtttgttacatatgaaagtgaagatatggttgatcatctcttggcgaaagggaacagaattgagctttcagggactcaggtaactagccgctcttacaaatattgttgagattcttagactttgtagctataatcagaacactgacatctgccctgtatttgtataggtagagataaagaaggcagagcctaaaaaaccaaactcggttacaaccccatcgaagcggttcggtgactctcgctctaactttggtggaggttatggagatggttatggtggcggacacggtggaggatatggtggtccaggtggtccttacaagtcaggtggcggttatggaggtggccggtctggtggttatggagggtacggaggagaattcggtgggtatggcggtggtggatatggtggtggtgtgggaccttatagaggagaaccagctcttggatattctggtcgttatggaggaggaggcggtggttacaatagaggtggatacagtatgggagggggcggtgggtacggtggtggaccaggtgatatgtatggtgggtcatacggtgaaccaggaggtggttatggtggacctagtggcagttatggaggcgggtatggtagtagcggaataggtgggtatggtggtggaatgggtggtgctggtggcggaggctatagaggaggtggtggctatgatatgggtggagttggagggggaggcgcaggaggatatggtgctggtggtggcggaaacggtggaggatcattttatggaggaggaggaggtagaggtggatatggaggcgggggcagcggacggtaccatccttatggaaggtagagagttcgatgaaagcttgaatcttcttcttacttgttgtgtcatgcttagcatcatgtatggttatcaagattgatagctagtcattgtattttgagagatgaggcttttagggctttgattcccctgagtagtttaaatcaatacattttttagattataattatctcggcgtaacaatgccagattattttttactctcatgtgacatctttagagttagcttgtagcaacgcttttgaggttttggctcaaatcttattagaagaagactcttgtttgtaccattgcatatttttcatcataagcctctgtatgtgtccgaaggtttgattgtcttgttcttctccctgaagtgagagccacaaatagacttaaaaaatatcttgtggtcaatcatctgtttctctattctctgtttcgtgttccacttcacgattgagagaacactttcctaagtttatcaagaacatttcttttcaatttctcgattctttctggctcattctctcatctctgtttcatatctaaattattgattgagaattcgacttgtggaaatggcaacagttgcatcaaatctcgcttgtatcggaaaagtaacgatgtctagagctagttcaatggcaagtccttttttttatcatgctcgccaaagaaatggtataaagagtggatttggaatggattttgcaggtaggatggaggttgcagataaattgcagaaagaaagagaaaggaagagatcagagtcattatccttacaaagtcattgaaatcactcctcctcctaaatctctcggcattcgttgccttcctcatgtgagtctcaaatctttctcaatgctcaactacacttcataagcatttcattacagattccaagtgagaatgagaagcttttttgatttgcagaaccttcaatgtggagagaacgtgatgatcgaagggcaaacgtacacaatctctgctgtgactcaccggtatcagctccggaaaggcaaatacgagccgagtgagaggcggctcgatgttctctctgctgctagatacgttttaaacctttacttcgacaatttgctccaaaactcctgacaacttttatttagctaaaaagtttggtctagaggattttcattgtatccatgaatgcttgtgaatttgttaagcaatgatttgtacttctcttaatcattccacattatatcactgatataccacaaattcgtggtcttacattttgaaaatgttaatacattacttttgacaattcctttaacattcacgaaggattcatgttttagcacaaaaacttgaaaactaaatgatataaagtagcttaatgatttaaccattcaacaacaccccaaagttctttttaaaggaaacaacgacttcgctaaactaccaggttaaggaaatgtatatagctaagaactcaagccaaatgcgtaaattcttcatcttacgcctcatggtttagcttctataataaacaaacattttgagtcatcctcaggcaattagcttgcaaagaaaatgatataatacgtctaattgctcccataattttacaatttagttgaccaacgtagcttgatttaactaaaacaactgtctgtcaccaaacaaaccaagacggacgagtagatttgtatgtaatctctatacgaatccgtttgtgaacttcatttgcgtcaccgccttgtcacattcgtgtggacgcctcacgacgtgtttgcataatgttattgaaacagaaatattgcactcttcctccattttttgattacttccatttcctcaaaagtcaaagctctctttcttctctctcgagatttgctaacttgtcaatggcggatgttgagaatctgaactctgttccggcgtcggaagacacagagtatggatttaaacggccggagatgtacagcacaaacatagccaattccataacttcctacgctcgtcatgtttttgttctttacaaaactcctgaagcttggctctctcacgtcgaagaagaaggtttacctcaacgtttcgctacgttgcttaaagatcgcaaatctgatcttcttgttcaggtttatactaaaacgtttgacattttcttacgttgtatctctttctgatgaagattctcattagtcattacgttgactttttttgttgttgttgttgtagacgaagctcaatgtatgtgaaggtggtggatctgacggtgatgttttgatttttcccgatatgatcagatacaagtgagtgtgcttaagttttgtttttgttagcttaagatttttggaaaaaaaatagttgactagaataggattttgactcttagctagatttatagtgtgtaaattgttgtataagctagttttagaaactttagaagttagattatagatcttagtatatttctcagatctatgagatccaaatttgcattttgtgattttgtttaaactattattcgtgttggtattgacaataggggggttaaggatacggatgtggaaggtttctttgaagatgttcttgtgaatgggaagccatggagttctgggatacaagaagagatatctggaacatttgtatttgtgtgtactcatgctagtcgtgacaagagatgtggtgtttgtggaccagtgatcttggagaggtttaagcaagagattggttctcgaggactgtcggaccagattacactgaaacgttgttctcatgttggacagcacaagtatgctggtaatttgatcatcttctgtcctgattcagctggaaagattactggcaattggtaagtaaatggttggatcatatgaaaatgttagtagtttatggtattgtcaaataaccgtgttggtttaaatgtaggtatggctatgtaacacctgatgatgtacctgaattgcttgatcaacatattgcaaaaggagaaatcatacaaaggatttggaggttaggtttctagctagtctacatatatgtctctgtgataaatgtgtagataagttatggtgatagataacgtttacttggacttaaataagtgacttttgtttcagggggcaaatgggtctacctggaggtgaagctgagaaagtgcatgaacagaaagttataccaaatggtcacggtgtagtgaaagaggagagcaaaggattcacaggaggatgttgtcagggatcaaacggtgtttcgtgttgccaagacgaaactccaaagccagagccaatcaagaaagaagtaaaaaagtgtaccatatggttccagcctcttgacaaagaagagctttacattggagctgctgtggttggagccattgcaactatagccatggctttcacctttttcaagaggtcaggttaagaacctaaccttacttacttaccaatagaagtttttccttggagattgccatgagacaatagaaaaagaaaacctccattgattcgaccacaaaacagaagcgaagaattatgtttttgtctttgattttaccattaaagaaacatataaactttttggtttctgtgagcgtttttttgccttgctatcttctcacattatgtgtttttgttgtaatggccataacttctgtgattggtctaaactctctcactttggtgcattaacaaaactttgatttggtttggtttggcttatgtttaaaagtggttcttgttgatatagtgtaactcaattcatgtctatgttactttaccgttgacaagtgatccgtggaatcgtagaatgatgatgttttgtagaaccattctcgtccttataaccggactcactatgcataataaagacagcctcgtactctcaccaacaaccttcgttcgataagggacaataatgctgacgatcaatgtatggcaaagatcatcttatcatataaagaaaaaaatgagtacactcttaagttcttccctaaagggggattgagaaccaagtaaaaatgaatacaatgtgatgcaaaatcgtattccttgttgtgttcatctcaatatcctttgccgattctctcttgattccattgctacttcacttaggcaggaaaggttataactttgctgatgctagctcacttccatcaactcttttaatctcatcaagacactgtgaaaatcagatgtccagtagtaattagagattatcctcgcgcttaccaggcaccaagaaacttccataacaaaaacaaatgcaaaaaaatgtatacctctcttctagggacgttatttgctctttgacaactgaaagaatgatcgcctcatctgacttcgcctgcgatgaagcttgctttttttcactcactgcaacacacaagggtaatttcagtaagaaaatgactcgggaaaatgaggcgatgtcttcaggatcatatagcttgtttaccaaagaaaaaatgctttaaagttagaggtgcaaacttaggatgtctcaattagttcatgacttcatgtagacattaacacaggcaaaatgaatttgtacaagataaaaaacgcttttatcctcaccttctactttttcttgaagcctggattcacctccaagatatgaacgttcatccgtttctaagtttagacgttgacggtctgcaaatttctctagcaagcggccgattaggttatgtgcaaccaagcttgtctcatcagaaatttcttggattgctaggtactggtttttatttcttcttcgtggcttctgctcaccatgatcatcagactttatgttttcaacagaaaacaatgaccgagagctaaactgattatctacttccatctcaatatccctctcaaccttgactcgggttttgctcatagctatgtcatgtctatcactgataactattgatttattggacgtgggagtgacatagagagatctaggatagactcttgtaatactctctggcaggtctcttacaaccaccctattgacagaagagctgaaatcatgctggtttgtttcatgtgtagaatcagtcgggtccaaaaccaagcattctgcaccactttcttcatgatccgaatcagaggactccattgcatcgtcttgagtgtctttgacttcaagctttatgtttcggcatctactctcttctttattacctaatttctcgttatcaaataaattacaattctcatcatcatcatcatcatcatcatcatcatcatcattatcatcactgtcttctagatcctccatataagcatcaccgaagtcctgatcgagttcataatttggaatacattggcaaaatatttgcttcacttgagcactcacatttaatatacactctgtctcctcctcaattgcttcccttggacataccttatgctctacattccccgtcctgctgttgaccaatgaaagagcttccattaaagactttggaatggtgtccagatcactgcactcaaacagatattcaatcaacgtttttctgaccgctgatcttaagctgtcattagaaacttcagcttctgggtctaaacaaagatgcaatcttttcagctcacgaaacctaaccttacggagtaaccatactgccttcactatctcgttctgcaggttctttgtttctggtgagaaccgaaaaaaatctgtggcagcagcagttttgtagccaggacttagcttaagtgataaatctactactgacaacgctttagccaattgctcctgcagtttatcccctgcagaaagttctgagagcatcttctcgctagcttgcctcacttggttaatcagatcacttcgacgctgaccacgtctactatttttcaattgaggtatcattcttgaacctttaagtttccttttcattgcacgtagggtctgagtagacaaactatctagctcattaagtaccttcattgcagcatcacgatgggaatgaagagtaggtgttctccccaaattcatcctgcaatcttcccggaaatttgcgggatcactaagaacttgatggagctgattaataatctcttctttaccaataccttctttattctttccgaagtctctcctgaccgaatctctgataatctctttcattttcaatcgagtcttgtcaaaggaagtagagcctcctgtgagtatcattgcaataagataaagacctttattcgtcaaagaatcaagctttctaacaagttcaagatcgcagaactttaactccttctgttgaacatcattgcatactacttgttgattcttgcaaaatccaaatgcctcttctacacgcgactttatcgtctcgtagaatatctagaaacacaaaagagatctcattgaagaaaactctcaacatttatctaaagagaacgtaagtaagagagacatacatcatcttccctaagcaaagattcagggacgaatctgtttcacaacgaaaacaaagaagaagagttcatagtcatataatcaatcagctaaaccaaatggaaactaagtaatgaactcactcagtctttcccggagtatggtccttggtggagtcagacatatcacaacccaaaagccacctacaaggtttgaaagtcacagacaaaacaaaagtctgaaactttttttggagaaatattaaaggttgaaactttcacaaagccctaataagcagagagattgattcgaactcaaagcaatcgtttcctatatctaagttacaattatagtccaaattcacacacacacccatataaaaccaaaaggagagaagtggaagaagaagaaaccttcttttgagacgaatttgctcatcttgatccttaatctgtgaaagtatcgaaccaaaatcagtcttgaagaaaactgaattattatccattgccatcttcttcaaggaattggaatcgactctcctttgaattgatatcgattttggtctgtttagtttgtcttgttcacttgttctcgtaacttaaaccgggttcgaagaatttttattaaatttttgagtaaaccggcttattaggtcaatacaaaaaagcccaatggacttttaagtttatggcccaaaatataacaaacgtatccgttctacttctgaaactaacctaaaacgcagagtgtgttgaagacgacggagacggcgacggcgagaagcaatgacgactgaggaaaataaaacaagcagaaataggaagaggaagagacagagaaaccctaaaccttctaaagaagaacctatcgagacgacaccgaagaatcaaaacgagaaaaagaatcaaagagataccaaaaaccaacaacatggaggttcttcagctccatcgaaacgacctaaaccttccaatttcctcgatgcggttcgttcgttatctctctctttctatcgagtacatttgattgaagtttatggagattttgatcaattcatacgaaaaatcgcagcttagagagagattatctggtgggcaatttaggatgctcaatgagaaactctacacttgctcgtaagttctaatttcattctttccgatgatcttccttcagttttcacagtgcttaattcaaaaatctctgctttctcagtggaaaagaagctttagactactttaaagaagatccacaaatgtttgatatggtaaacatacattaactcgagaacaagaacttatgttgttgattcttttagttgaattgtaaaattgattctgttttgttattagtatcatacagggtatcaacaacaaatgtcaaattggcctgagcttcctgttaactccattattaattggctattgtctaatagctcttctttagttgtggctgattttggctgtggtgagaatttcttatcctgtattgctatatcttactttttgcctgctgaaattgtatcactctatcgacactaatattgtctcaggtgatgcaaggattgctaaaagtgtgaagaacaaagttttctcctttgatcttgtctcaaagaacccctctgttattgcctgcgatatgtcaaatgtacgttgaatctttactccattcatgttaatttcatgatttctttgttccctcagacttaactggtatttttggggtttactttgtagacttcacttgagtcttcatcagtggatgttgcagttttctgtctttcattaatgggaacaaactattctagttatatcaaagaagcacatcgagttcttcgtccaaggtacagctttgtttacttgccaatctcttcttgttcatgggattttgtcatgattctgaataatacttcctatggttttattgtattccacagtggtatgcttcttatagcggaagtaaagagcaggtttgatccaaacaatggaggagcagacccaaaagactttgtgaaagccgtttgtgatcttggatttacttcggttttaaaggtgcaatcttttcttcttctttttttcatttccactataagaaagaaactcatttggttctttgagcaggacttctccaataagatgttcatcttattccatttcaagaaaaaggttagtgaaacatacttcctttcaggtttgttattagtctcgtagcttagatctacactttgtttagcaataatccttcttttaatcgtgtggttatataggagcagatgaattcaaatcagaagataataaagtggcctgagttaaaagcttgtttatacaaacgtcgatgatgagtttacaatggaagattactcagaatactatttttgttctccactgttgtatcatttaggcacattgattgtcctcaaaatctcataaatttgcaccctataaacttttgtaagagaaaagcaatcacaaagatttttcaagtgtttagatacagattttcagatttttgtcaacatagtgttcaggtaaagtgagatttaggccgtgaatcatgaatggtgtggtgacgcattcccctaccctctgcaactgcattttttaagttttaactagtcattcaagtttctaccaaaatttaagttcaaagtgtaaagtaattataacaagtatagcctaattcgaattacaaagatcacaacacaccctcatttgtaaccatgaatcccttacggctttacctttcactattctaaaagatcgctcgtaatcatcttgttgttacacaatacaacattcagtctctcactttctattctggcctctgggaaaccaaaaccacattgattgaaaatctctaaacttttgcaaaacacttctttcatttatggagagatgcataagcaaaaaaatcccttacctctacaaagttagaccaaatgttaagttagaccaaatgtttttcttgttttgttacagatgatatgatctcacttcacttataaaagtacaaaaaggactgatcttgtagtaaaaaggttcacctttctcaccccaccgacattattaatttcttttgtttttgttttctggtccacgatctttaaattcatgcacatttttttgtccttttgtcaattaataaaaacagtgttgttcgttaaagattgataaaagattttgtttccttcttcctactatcgtcttgtttattaaaaaaaaaaagacaaatatttttgtttcactgctcctatcttcacattccaggagacttcctttcaaaattttcttaattataattattcacaagtttgactttttctgttcaaatttggtttaagtcggaattgtaaatcgatttacagttctataaattttgccgaccaaaaaaggcaaaacaaaacagagaaagagaaggataaagagacatgagatttcctgtcactttacttacgcggacatagcaaacatctttttgatcattcagagttttttttgtcctattaccacttcaaatccaaaaacaaaagtttataaatttatttccctcaaagtaccacttaatcatcgactttttgaccatttctccatctgggttttattatcttcagttctttgtgtcacaactccagtttctttttgtattttgttgtttttttcacaaattgagattgttgtttcctataaggttttgttttattctatttatggaagtctcttgatttcgcttttataacctcaaaaagcatctttcttgatagcaccaagtatgatttgatcatcaaaagggtttggatttgacaggtctctattttaggtttgtttttggttagaagttaaaaccaaaataaaatcttaacttttggaaatgggatctgttactgggttttactcaaatgaagtgtttgaattagatcctaaatgggttgttgatcctcaacatctctttgttggtcccaagattggtgaaggtgctcatgccaaaatctatgaaggaaagtaagtttatttctttatcagattaatttcatcaaaagttttactctgtatatggttctgaatccattattgtttccctttttctcggcgattgatctgtttggactggttctggtcttcttgagcttgtgtcttaatctttgcatgtgtgaaaaattgaaacttttttgcttcaatatatctagtcatttgcatatcactatatcagtttcagtttaatggttgttgttcaatgagttcagaataaaaagaattactatgtttgtatcaaaaatttcagagaaatcttttctctagaaatttcagagcattagtgtgaatctgtggagcgaattcaatcataaagatagttttcatagatgttatagtttgatgaagattgaagagtattgagaatgatgtaaaatgtggtttcttgtttaggtataagaacaaaacagttgctattaagattgttaaaagaggagaatctcccgaagagattgcgaaaagagagagcagatttgcaagagaggtctctatgttgtctagagttcaacacaaaaatttggtcaaggttctgcttctttgcatttatctaatctccagtacatattgctacataatttggttagagacaaacaccaaaacgttttgatttggtatgttttgtagttcattggagcttgcaaagaaccaatcatggttatagtcaccgagcttttactcggtggtacattgcgtaaataccttgttagcttgcgtccagggagtttggacatacgtgtagctgttggatatgcccttgacattgctcgggcgatggaatgcttacactctcatggagtcatccatcgcgatctcaaaccaggtaattgtttacaataaatcacacttcaagacattatgagttaacaataatgttcttatatcttcttggattgcagagagcttgatcttaactgcggattacaagactgttaaactagcagattttggtttagctagagaagaatcattaaccgagatgatgaccgcagaaactggtacatatcgttggatggctcccgaggtacttaatggaatcttgcattttctgtgttctgcatttttcttttgcttctaagaacttgcttaatcacaaattacggttaaacagctttacagtacggtcacgttgaggcatggtgagaaaaaacactataaccataaggtagatgcatacagcttcgccattgtcttgtgggagcttatccacaacaaattaccttttgaaggcatgtcaaatctccaagccgcttacgctgctgcattcaaggtttcattcttgattttcaagtgtttcaaccatttggttctccaaccggacaatgtttttctgattgttgtctgctttataatatttcgggttagaacgtgaggccaagcgcagacgatttaccaaaggatttagcaatgattgtaacatcttgctggaaagaggatccaaacgatcgaccaaacttcacagagattattcaaatgcttctacgttgcctctccacaatctcatcaactgagcttgttcctccggccattaaacgtgttttctcgtcggaaaacacggtcttgccaccagaatcgccgggaacttgctcattgatgactgttagagacaaagatcagattcctaccgatgcaaactcggcgcagaatgaagttagaggaagcttcttcttcttctgctgctaatatttgatttattggttataaagtgaaacatgagagaatgtggtttgatatatcatatgtaatgtattaatttgaatgataatagcttagagttattgttatgagtttaacgtttttcctaaaaatgttcttaacttaaaatacccaaaaaaaaagaagcaaaaaatcgccgttgccggggatcgaacccgggtcacccgcgtgacaggcgggaatacttaccactatactacaacgactttgttgctaaacaagacagttgtgtcaaattaaatatatctaattacatatgctttgaaatattgttcaagaaattgtatcttctccatttccatctttgacactagtatatttagaaacacaatctccaaatgatagatttcatcttcatttttttgggttttcaaactcttaaatctttaagtaaatcgaagttgataagctataaccaattcaagatccttaagtaatcaaacacaatgttttcaagaccagttctgtaaccattcctttttcaatttaaagaaaaaagctcaaaaagagaggatatcattcttttaaccataatgcaatgatttaggcatttcatgaccatctaaatttgctaggaaaaaaatacaaactaaaaacatgaactcaaacgatataagcctactaattaagaatcatagttacacttttaatatagtggttgactactctcataattatggagatcagtggaatatatttacatctttaacgtatttcatataaagtcgttcttcgtgatatatatatatatatatatatatatatatatatatatatataaataaaattatccatggtgaatgtggcacaaacatgttcggcttataccaaatttacattaaaaaaaaaatttggtataagctaaactaaaaaatagactcatatttaaaaactcgttttcagcataaacgaccaaaaacagtcgcttaaacctacacttaagcctccacaaataagcatatacgattgatatgttaatgttactatactgtgatttatcttaggcatgtcaatcacactacctcaccccaaatccaaaatccttaaaactcgcgtatattttttcttactttttctcaatgtttcttcgaaaaagaataacaaacttataaatttataacatttcttataaaatttcaaactacattatattatagagccaacatttgaatcaacttcaatgcattttaaatattttctagtatatgactatatgtagatttgtttatggtgcagtcatctaaaactattcgttgtatttccagttaacaccagaaaaaaaaagaaacttaaattcgttcatcatcttacagtaggatggtattaagaaaaaaatacacaaagttaagacttcaaacccaaaaaatattttaaacatgttgtaaacttgtaataagttttacaatttaaaaacattttccctttatgggcttttattatccaataaatgccaaagcagcttcttcttcttcgtcccaaacgatgtcgtattcttcttgacctacgaatcacatttccttttttaccccaaaaaaaccctgaaatctttttatttaaagaaaaaaatctgagaactgaaaaatctaacctttttttttgttggatttaccagctgcagagatcaaaaacttcgtgattcattcgaacaatctaattttaccagctgcagagatcaaaaacttcgtgattcattcgaacaatctaattcagatttattattgggtctggttatctttttcttaccatattttttgtttcctcgttaagacgattgtttggtaatgtcgtcaccagacattgtcggaattttggaaaacacgaaggaacttgatcggttaaggaaagaccaagaagaagttttggttgagatcaataagatgcataaaaagcttcaagcttgtaagtgtttctatttaaacttaatttctcagaacaattttagtaatttatttttctgttctaacaaatttgtgatgatctgagactaaatttttgtttgttggggatatgtttgtgtttgattagttattaattattatcagtgaaagttttgattttggatcatgaagtaattaaagaaaattaatctagattagtgattaatttagatactgctaaattaagctttgttgtaatgttgatgcagctcctgagatagttgagaagcctggtgatatttcattagcaaagcttaagaatttgtacattcaagcgaaagagctctcagaaaatgaagtaacgtaagccatttcttctttatacttgttacaatggtgaatgaatgaaaaaaagttagagactttgaatggattgtggactaatgttaccaccaaatgacctttctgatgttttggctttgtgtttaatgcgcagcgtatcgaacattttgcttactcagttggatttgctgcttccatatggaccaacagggcagcaaagaagaaagttaggcggtacacacaagttactttaattgaactgtaatgttattctctggcaaagacttatgcttgtaatgttaatcacataagtggtggcagaaggtaatgatcagaagaggaagaggatgaaagttgattcagatgtaataagactttctccttccatgagaaatcaaatcgaagcatatgcaagtcttaagggtgaacaggtaatctttcttataatgcacctgctttcgatattgcgatcagttccattctcacaatgtctgatttatgcaggttgctgcaagagttactgcagagagtgctgataaggatgaatggtttgtggttaaagttattcacttcgatagagaaacaaaagagtaagccttcgaacctttcttctgtatgatgttatgcctaatttttgaatatcacacaaatgcatatctgatagtttagtagctgaaacttatttgttgctgccaacacacacaaaagagttgtgcttgttaagtgcaaaggcttcatctatgaatctaaatatgtttaaaactttttatccagagttgaagtacttgatgaagaaccaggagatgatgaagaaggaagcggtcagaggtaaaacacatatgaaaacttttgagttgtgaattgtggcgttgggaagtatactgagatttattcttttggaatctttaggacctataagttgccaatgttatgcattttaccattcccaaagcgaaacgatccttcgaacacccaagagtttccaccgggtaaacacgtcttagctgtatatcccgggacaacagcactctacaaagcaactgtagtaagtaccccacgaaaggttagtttttttgtcacaaccatatgcatctatctttataacttgtctttttgtctgaaaaccactaacctcgagctattgaacatggatgtcaattcctccaacatcagaggaagtctgacgagtaagttcgtcaaccttttatgtttgctttatactgaaaatggggtcttttcatctatatcatataacaagactatttgtctgattaggtatttgcttgaattcgacgatgatgaggaagatggagcattgcctcaaagaacagtacctttccacaaagtggtagctttaccagaaggtcatcgccagtgaaagaaaacaaccccggtatccatgattacatcagtctctttgtaaataaaccgaaaagcgagaaatgatcgaagaattcagtatgcatggcaaaaacgcgcttagattgagatagaatcatcacgtttgtgtgtgcaatttaagttaaagctgtaacctttgtgtcaaaggagatgatgaaatgagaaaacaaaaagagaagcctttgtttctttcactttgagaatgtagaaaaacaaaaagggatctctgttccagtgagtagattttgactcaaaccgtctttgaattacaaaaaaaattaacctcgatctcgtctcttgaagcccttgtgttctgcttccaagtatctctctgttagactcaagagacacaactacttatctctagcagtcaaccgaacaatctccaattagaccaaaccgaaccaatccgaatgattcaattgaatgaaccattaacacatgttcgaaccaaaccgatactcatcagccttgaattcgaatctcccggtagagaaaatttctaccgattagattgaaccgattttgaatataaaatattacattaaaattcaatagttttactaacaatatacaaaaatcacatttaaatatatttcagataaatatgataattaattattttatttcattattttgttttcaatatcctaaaccaaaccaaatcgaactgaaaaatggaatgtagaggtttatctttgataaccggaaggcagatttgataaccggaaggcagatttataaactaaaaaggaagttcccttattgagaagcgtcacattaaccaaaaatcatagtaatgcatggtaagtaagaaaacaaaaattggtatgaatgttaagtatggtaagtaaaattaatgaagggaaattaagtatatataggaatggaaacaaaaacatatctctctctctataagaatgcctaatgaagtaaatggtatctcgacaattctctcataagtcataatgtcgttcttgtcagttcgtagccggataaatttagtccgattactacgaaccaacagaattttcaccggaatttgaagcgattttgcttctttatttcgcttttttcctccttcttcttctgttgctcctgagaaaacgattgactcggtggctactgagtcggtgttaaactcggtggtgaagatcaacactttttctagcaagcctaacatttgttatccttggcaaaataagccacaaaaaaaatccaaaggctcaggtatatatatagaatgtgcatgcaattgtatatatattacgtaccagccttgtattggtgcatgcaattagtatattacgtatagcaagccttgttttggtgtgtataaggctatgatactcatgtggtagctattcacatattggtatgttaattactttgattttagggtttgtgattccggggaagatgattattacaaacgctcatgtggtggctaatcacatattggtgctagtcataaagcgtggctcaccaaagaagtacaaagcagaagttaaagctattgggcgtgaatgtgatttggctattttggtgatcgaaagcaaagagttttgggaagatatgaatcctttggagcttggagacatgccctttttgcaagaatcagtaaatgttattggctatccaacaggtaatttgacaagtttattatgtttttgattggtagattatgttatatataataattcagttttccagtttgtgttttgagacgatttttacttcatttaagttggaaaactctctcggttttagagaaaattaatacattcttagcaaaatattcaatggcaggtggtgagaatatctccgttacaaaaggtgttgtgtctagaatagaatcaatggattatgctcacggtgccattaatctaccggcaatacaaacagatgcagcaatgaaccctggcaatagtggtggtccggtttgcataggaaacaaagttgttggtgtagcatttcaaacccttggacattctaataacatagggtaagtttttggatgatattgttctctctttttttttagtgattatagtcaaaagtttaactgaaaagtttgtgcatgtgggtgggcttcaccaaacaggtgcttaatcccagctccagtggttaaacattttataaccggtgttgaaaaaaccggtcaatacgttggcttctgctcgctaaatctatcataccaacatatggatgcacaaactcgtagtcattttaagatgaattctgagatgacagggatccttatatacaatattaatcaacattcggatgctctcaatattcttaaaaaatatgacgttattctttcaatcgatggcgttgctatagaaaatgatggtacaggtaatacacacacacatatatatatatatatatatatacttaatttgctccatatgtgttgatgttattactgagttcatattaacttgttggagttattataccaaacagagaaaggacaaggttggatgatttggtttctttgaagcaattaggtgaaacaatcttacttaaaattttaagagagggaaaaatgcatgagttcaatattactctgaggccagtaagtcatattaattattgtgaatcaataaatcattgggatcacattttgttagtctaaattaacggatgattatttgaactaatttgtggtcatctactctatgaaggtgcaacggctagttccagcaggtcaaattgacaacaacccaagttattacatattcgctggttttgtctttgtgcctctccgtaaacaacattttaaaggttccaacggtgaacaaattgtagtgatttctgaggtttgtgccttttcttttctaatataaatatgcccaaaaaggttggtgaaatgatcatctatttttacttcttattgttagaaaggaattgggataaggtgaaataaatatgtgctaatagctaaatctaaaaattagcaatgttatcttcgtcgtttatagtataaacgttagaatttttgtttcttattgtaggtattagctgatgtgatcaatgtagaatactacatgtacaagcatttgaaggtaatcaacaaaggatcaatagttatgaagtttattaaaatgactctatttcggtgcaataatatttttgtgatggaaacaggtgaacagcgtcaacaaagtgaaggtggagaatctaaagcatttgtgtgaactcatagagaaatgttgcaccaaggatttgaggctagaattaggagatggtcgagtaataatcttggattatcagtttgcgaaaagttccacttctttgattttggaacgtcatagagtaccatgggccatgtccaaagatctcatgactgatcaatcgaccacttgttcgagtacgagattatattaatagtataaattgaatttaaggttccctaaacatttgaccaaaaaaaaaaaaaaaggttccctaaacatttaccgcttcggtttagaaccagaaaatttgtaatgtgttactaatcagacctaaaatgtctattggttgcgttcggttaaatttattcggtaaagctatcgtttacaccaaaacaaaattattgaatacaattcggttcggttcaattttgttgtccacgaataatagagagagtctatgcttccttaagcttaagtgaatcggtgacgatgatgaaggagaaggcgaaagaagggaagagtctgtttgggtctccgacgttcgttgatcttggaaacggacggctcagatgcgtcgagactggtcacgaggttttagcgggagacgtagaatcatacgctcgtaacaaacggtgtcgtttaggactcatcaatcacgctttgtctctaggaaagcctcctctcaacatgttctcgcaatgcccactttctcggttagtcaaataagtttctcaaatttttgtgtgtttctgggaaaatcagatttttttagttgggggttaggtttataagagtgtaagattgaatcatccacaaattctactaatctcacgattcaagctttaattttggagggttatgatgtttctctctgttttgattattttgtgaaacttcgattgttttctgagcaagaaaggatgaaactttcactgttttgagagctaaaagttgtgactttggatttctctagagtttcagattgtattagctcaagtttcgtttagatccttgcttcatagtttctgctactagtaaaaagctggttaattttgttttttctttagaccactgaggagcattggttgttaatttcagtcagtgtggaatacattgaaaatggttataaaagttataatctttcttctgattttgagccttttggctttgttcgcagcatcgaaaatggtttaaagttgtaagctttcttctggttttgccagtattgaaaatggttacaagttataagctttctccctgcttttggctatgttctcagctcgaaacttgtgtgcaagctaactggagatactgtgaacaagaacgaggaacatatctggaaacacgtgaatgggaaaagatttcttcacaaattaggtctataaaaattgtttctcccatgatatcagattcattgaaatcgtgtaatgaatcttagttagtatgtcttggcttataatgttttgatgttgataaatttgatagagcaagtggaaagaggagctggatcaagcggaaggactgaggaaacacaagtaaacaatccaagacacaataaggaagattctggttctgaggaatccgacttttggatgcctaagtcaagttctgattcagagttagatgaagagactgatgaagaaaactgtaaaggttgctctcttttgttttttggttctactgtcatctcatatcgaaactttaattagatttgcatctgatttgggtacaggttctcattgtgatgacaaagaatctgaagagctctcagaaaggtacattactatatttgctcttctctttttttacaatcatccttttgattgtgtctcataataactcaatttggtctcttctacagaacaaagagaatgtcactagagattggaccaagtagctttgcttctaggaagaaaaagagtaagaatgatgagttgtcttaagatgttgtggacaaaaaaagaaagagcacaattttgtttgtaagaaagagctcttttgaaaattatgtgagagctaaatttcaaaaccgaatcatccataatcattaatcacaagttcaagccaaatttaaagacgaaatggaggcaactacgattcgattttagtcgttcatattgaacaaagtagaaaatgtaaacatgactgtcatgtgaggtagaacaatggtttcactcttagtatctgtctctcacacgagattcattcctccatagcttcaccagccacttctacaatttcgactcgctccaataatggtgtaattttggtgagtagaacctctgttttcacagagaaacaaaaacagtaagaagaagaggaagatcgaattaaaccaagtttaacacttcaataatcatgactgataccagagacgagtaagtgttgcaacaagtagattcttaccggttttcttggtgaatgaatagcctttgctgctaacataggttcttgggtttggttccatgtaattcctcaagtattccttgtgcccctgtcccaaaatcatctcaaacaatcagtttcaaatcgaagatataggtaatccagagtactggttttgtagcgaatcactttggtttagcttaatatctgtcagtcatgaagcaaacgaatttctagatacttcagttatctattaaaagcagaggaagatggagtatgacaaaccttagtgatcacacagatatccacattgctaccactaccaaggtcgttgaatataccagagcatatggcttcagcaaccaacttgattccttcatctctctggaagatttgagtcaatcatcaaacaaacagccaagaagagatctaaacaacataaagataaatgtctctgctttacttacagttagaccttctttatactttgcttcaaacactgacatggcagcaagggaaccagaacccattgtagcaaatggtagagtgtcagtagaaccgtgtgggtatatctgcattttgaccagaacattagagatggaatacaaaatgaaagaacctgaaaaaggctttctacagctgagaattttgatcaggaatttgaaactcaccgtgtgaagatgaggcccggtaatatcaactccaccaagcacaagagcagctgagacatggccttggtagctgaatgatacttgagaagttaaattatgtatgcctattagtaaagataacaattttctgagcatggtgaagcaaaaatacctgaaaagatgttttttgagaagggtcaatgcagtaacgactcgagaatctcggccagtctggtatctatgcaaccgcagctgtgagctgaccatatctgaacagtgaaatagcaatcaaaataacttaagcattgggttttgatcgagttaacagaagttccgagaaattcaactttgatctagggtagcagtaaagaaatttggaagttaagaaaattaccagttactgcttcagtgtcagcagcggttcctgcaccacaacagtaaatgtttggtgccatgtagtgaatcttctcacagttcttatcagccacaataggcccttcagttgcccgtgtatcagccccaagtattacaccatcctatacaaaacagataaatgaaatcagtaatcatctaaaagagaatgtcacatcataatcacatgtttcataaaatgttgtagaatatagaggtaaatagaccataaaaacatcaacgtgatgtcatatggtcaagggttgagaaagcaacaacacctcagactttcatgttatcttatctaaagctatcaggtgcccaattcactgataagcagccatccacaaacacaagttcaatcacatttgcatcttagcccacaattcttaaatcttaggtcactatgttcacttccatagttccataacttgcaaacaaccaaaatagagcactcactatccaacaataacactatgctaaccattcaaaagctataaaagaaaacccaaaacccattacattgtagagaatgtgagatagaaacaaagaccttaaatatcaatccaacgatagtcgttccagtcttgagaaacgacggcgctttaagacccttctgtgtcagcatatcattccttttgcacagatcgaagctaaacccaccttttggcggtatatcgacggaagactgcgacattttccgattcaccactctacaaaatgaggaaaaatcaaatcatcacccaaacaaaaaaaaacgagtaacgaagtgaaatttgaatcttgagaagcaaaattcgagaaccaaagctagctagctgatgatacgaaaccagaagaacagagtgtagaaactaataatcacatactaacaacagattttttgaaaactcctgaaataaaatcaactcaaaaagttgggatcgagatcgctcaaggataggtaaaatcgtgttcgaatcaccaaaatcgagaagatagaatccagggagacgacagtatgaagaataaaagtgaaaaatctaagcttatagaagagtgatgttacctttacttgaaggttttgctgagaggaaggaagctcgaatcggagaagaagaagaaagcaagcaactttagcagagagttttcttcttcctcaattaaactatttttgaggctctattataaatgggcctatctttactttaatgggcttaacttctgtcaaaatgagcccatttgttaactccctaatgattatgtgacttctaattgtgtgtgtgtttttcttgacatcatcacttctaattgtgtgtttgcatttgcaaggtctggatttgtttgttttttattcagttttgagatcaatttgattttacgaacaaataacattgacagaaatataaaataaaatgtaattaatactatattgataatatagatataattaaatcttaaactttagattttattttaccatccgttattaacacatcgataacactaacacaaactactttaaataaccccaaatctcacaatttcaatactttattcccaatatttttaatctataagtaggggtgatccaatacttatatatttttcctatagtaatataaaatggattatggaacttgaaacatagtatgcaaaggtaacatggttacaaaaacgaaagcagcaataatcgttcaaaaaaaaaaactgataattcttttatttcagataacaatttcaaagaaaaaaacaacaacaacaacaacatgaaaagtttgcaggagcaacaacaacataaatcaagaaaaagcaacaaaaagaagaaaaacagacacaagtaaagagaatttgaagaatcccaacttcttcgaattagatgcaattgagagctgccttattcgcctttttcgaaatcaaagcactttgcatcgccaaatgcatctcaatctgcatcctctccacttctctttgagcctctaacattgcagctaactccgaattcatcgagtttttacttccttctcctttttgatcttctttctttgcctcttcctctttcttacatgagtgtaaatgcgtagcgtaatcacattccttgcaataatacgaccagagattatccggtacaatgtcttcacaaacatcgcatttggaaactaaaccgggttggttataaggagaaccgtaaagaagagtaagtggatgtgggtgatcttcacgcttcactgtttcaggcattgaaacacatccgacatgtacatcgtactgacagattgaacagttgtacgtgaaacttgatccgtattcgccgcaagcattacacgtgtacgttgactttggggaatagattaaagtcaaagtgtggggttggtgagatttgtggttggtttcacgtggaagttcaaaacatgacttgtgcaagaagtaatcacaatctgatgactttgtgcatttgaaagctgcaccaaccagatcgagatcacaaccggagcagatgatttcgtctttggcttcgcatttgtgaccgcgcaatggatggttgtgactcgggtgcctcaccgattgtcgtgaagacattgttttattcaatgttcttgatttagtattgagaggcgttttgtttgtgtttgtgtttgtgattgtaattagcttaggatttcaatctatttatagcgttaatggagaagacttagtgatattgagtcttggttttgaatttgactatcaaaccaagttgtagtttatagtgattaactatataattgggagaacaatgtcacgctttaagttatatatatatataatatattatatattaagtatataacaaaatggttcatttgggattcgaagtcaagaaatgcatttcaaagtcaagagatgcattatgcatggaattagtttgcgatcttgttcacgcatctgagttttttttaaatgttataactataattagctaattaacctgttgaaattcaagataaatcaaaataaatattgttctatcattagcaagttggggataaatacattaacgttgacatagtgacggatgtaaaagtcaaactaatcacaatgctttgactctaattaattaaggctgatatccaccgtctactccttcgtttcgtttcgtttcgtttcgtttcatacaataatgttttttggaatgcatacatactatattgtaaaatgattgaattacacttttttataagaaatgataaaaaatgataaaagaattggtggagatacaaaaataagagatgctcgaaataataatagaattgtgaaaacaaaaacaacaacgcattaaaataatatgattgttttattaaaatcataaatatatatatatataaaaaaacaaaatataaattaacatattttagttagtttatatctttgtaatcgattcgattatgttacgctcacaatcacaagtttgaaaatcttcgtgtgggatgaatcataatggatcctgtaatagaaatgtcataataaacagattacggaatccttgattattgatatggtttccttagtcaaaaaaattagaatcactggggaacagtaatggaattcaatcatgcaaaaataacttgtcaatttatgttaatattatgtaagagatcctcatgattcgaattgtgattcattcatgtagcagtttcaccgatgatcttatgtgttataaattagattaatattcagacaaggtcacactcacacattgacattacatacgatcaaactcggtttcttacggtaccatgtcgcggtttggagaaaacaatggcaagggcattaagcccctgccaagaacaattcgagttcgcatgtttgacaactcggaattaatcagaaggttaaagaggacgacacttatcggaaagattatgaatcctgacgttcagagtgttggatcactagttttgatgatgcctagaatctggaaactagagggtcaagtggttgggagggacttgggattgggaacgttcaggttagatttcgagagagaggaagatattcttgaggtgatgaaaacggagactttcaattataatcattggatgctttctattgtaaggtgggaaccgattatacacaaggactacccatcggccatcacattttgggtccgaatcgtgggtgttcctcgggatttctgaactgatcaggatttccggagaatagggaatgagctaggaactgttcaaaccttttcggctactgtgcttcttgttttagtcttcgccatgatgaagaatcttgcccacacagcgacttgcacaatcatgtttcgacacatgacgagtgattcgagtcaatcgaactaagatggttcacatttgggattcaaagtcaagagattcatgcaactattttccgaactcatccaggcatctgagtttttacttttataatgtatgtcgtaatatcgaattatcattatcaagttgaagagtgtgaatctaatattaagcacaatgcttgactcttaaggccaatagataactaaaaatgacgatttaacaaagtactcaaatcaaaactcttacactacaaaataaccctaaagattctatttgcggaatttggaagtaaatattccaaaattacttaaaactcagtctcacatactactagcatatgtcttaactactctcaagtcttcaacagtcaattctctaatgagaaaatcagtttttagatctttaatgactgataaagaacaaacctttgatgaaaaagtacaacatttgtttggtaatttgtgaaaaacctaactcatacgcaggagtcattatcaacataacttttggcattattcctgattaaggattcttatttgtagatcataaaacctaactcatacgcaggagtcattaaaatgtagaaaacccaaatttgtaaagaactaaacctctagttacacaaacttcatcttgcagtttctttgttaatccacaaaagtcaaaaaaaaaaaaattatcttctttttcatttcctataatccatgtactgaaccaaaaccggtcggatctttctagtcaaaattgtaagataatccgagtaaacaatgggtaccaggttttctccttgtcatttcctaatatactcacaatctgggacaaggagttgagtatatatgtacctggactactcagctagcgagtttccttgcgctctggactgcgacaacaaaataatgcaatctccaaagcagtactttgtcctggaacagacatttgttttgaattgtgttataattttccatatgaacgagattggaccataaatttatgtcaagaagcccacctcctcctccatgttgatgacgaaaacatcatcaggcatttctttccccaaagctacatagtggtttttgatgattccagcaacacgttcaagattttttgcaggtagttccttaattgatttctgaagatctcgcttctctccacggctcataggtctgttgatagacttaacaaacaaacacatgagtaataattgaaagtagattgtatatctatatatatatatatagagagagagagagagaggagagacaagaaattgtacattatacctgcaagtggttaccacattgtcaagtagcttctcaaggtgctgctgtctctcgttcaactagtcaaagcagagagaaaagaataccattatatgttttgggatctcgaaatgtgaacagaagaagaaagttccttagagagtattactctggcaagtagatcacttgaatgtttgcccactatttccttaacaagactaggatcagacttcataagtaatcgtaaatcatcttccacctaaggaaacaaatgtgagtaacaaaaatgattccataaacatctatcagacacagaatgcatgaaccacatcatctcacctctttacacctaggatcctcaggaatcacagactcagcattggttggtaaggttgaccgttttttattactcaactgagacatcagatacattgaatcaacacgagactgcatctgcaaacaaattgcatagctaatattaatgtctcttatagctacgcgtcatgataccaattatgattttcaagtataactcagtgtacctcatcaacttctggaatggaattcaacacacactgccttaacaaggcattcaacttctcctgtttgacatccgacaactcagctcctataatctcagcagaagacttcttagcatccacatggttatgatgaggtatcttctcttcttgagacaagagctcttctacttgagctctgtagtagccaaaaaagtctggtccagttctattgctctccaatgaaggagtcatttcttccgcagctcttttactcatcgctgattcaggaatataacaaaagcaaatctcagcaccagatagagaactcagacacaattgtcgataaatgttgaacaatacttcactatacctacattatctttgcgtataatcaaaacattagcacacaaatcttcacctaaaacccaatttcttagatcaacaacatcagttcatcaaattctatgccctgagggtaaatagaatcccagagaaagcctcatgcaccaagattttgaccataacaccgcattcaattttgatgtgggacactatacatccatcaatttcacaagcatcgatgaaacaatttcacagtgaggttcagatacacaaaagaaatcgaatctaccacgaaaacaaaggagaaagatagaaatcgtttagtatataagcatcgacatatgtaaattagggttaggtacaagaaaacgagacgagccacgagacgagcgatttcaaaaccaacattgtcaaaaagatcttgttctataaatagagaagtaaaggaaaggagcgagaaggacgctcaccgactatgaaatcggagaagtcgccggagattagaatcgcaccaccgggtaaaaaggaacagttaacactgcgatgaagtagaggaaacaacgattctaacggaacgggaatcgtcatcttctagaattttgatgatctttatcatacctacgaatttagactgcttgccgttttgatggctagcaataaatgaatgtatgccgtttctttaagtagacacgcactgacgcacttcacactcacacgtggtccatttaggccgttatatgcagtacatgtttttttttttttttttcatttttggtttagtcacagtacatttatgttatacccattttgatatttgtttactttatttcaaaatacatagtttgcattattcattttgtttcacatcacataaatttaatgtatagaatttatttttaattagttgcattaaaaaataatgtggaagaaagccattgttttacagaatccattctaaattaagtcctcaaaaaaactcaatatgtaatcaggtttctaattcagaatatttcaaatagtatgtgtaaaacatgtaaaagatatttccactgttttgtattttaattttgtaagttttctttatttggtaattgattgttaatatatagtaaaatgattaattagatacttcatttgaataattcaacttttaaatagatgaatacaatattgaatatacaacatgagttcgatccaaacccaccatatattaacaatcaattacccaataaacagttgaatagaaaaaaagagaaaagaaaaagtaacatctaccatatatatcattaaatcagattaatttttctctcttcgcttgtaatacgatattatttattgacaggaaagtgaatgttgaattggaatgtggaagcaaatttctcgtatgtgttttgtcaacatgttcgaaaaacttatgtgcatatggtgactacagaaaggggaggacgtgtttctctgcacatggttaacggtgacgaagctcatgctttagctgaagtggtggctccaaagctttgagatgtaggtcgtgatcatatgaaaataaatcgtgaaaaatgtattattgtgatgtaagattcttaaattcattttttttttcttttttgtcatcagattttatttacacctcaaaagagtcaattctgaggaaaattgtttacataagtgatataaagcggttcaatacgaatttttcgtgtcaatttgtgcctttacatttgcagttcgagaaattaaagataaagaaaatcttatgaattcttccttatcggtcttgaattcctccaaataagttgaaaacgctggccattcggttggggaaaacaccatcttcaccaggtctgaacagtctgtaaaaaatgctacttcttggttgtcggcaccaatcatacacttcatcgcccagaagtaaagctgttacttctgttaaattcggtttaattatgtgttaatcggatttaatcggttttaatgatctatataattatatataggttgcggtaattatttctctttaaattcttttactagtttttggcctgaattcagattgcttaagatatacttatctaacattgttaatatgaaaactaatgaatgtactcattccttgttaggtaacactttcatatatttgtatcttttgttttcgtggtgtggtaggagaataagcaacaacatttttgctagacatattcaagatttcatagaatattgaacaaaaatggttaaaagatgtaagtctacttcattcattctcacttattttattttttccccagaaaataaaaaatacatcataaattatttaacgtatttaatgaatgcgatcagcaatatcaattaagctttgaactagcggtaatagaaaatatctctttaggttgaacccgacctatgcaaatttggtggaactggtgaaaacagtggaaacatcttaaaccatccgaaattaaaagaatatagtattacaataattaatgatgaactataatattaaagaattaaaaaaaaaggtaaacaaaaaaatgaaaataagaaaaaaataaacaaaacataagcaaaacgtaattaaaaaaatagcaaacaaatgaagaaaaataattataagttcaaattcaagatcttaaaaaaaaatagatgattaattaattttaaggaatttaaattttaaaattttagatttattattttaggtttagtttttagggtttaaggattatttttttagggtttactatttagttttgaaggtttaaagttcaatacagtattaaacttgtggtattttcagaaaaaaaaacacacaaattttttaaggtattattggaacaaaaactcattaaaatggtatttatgagaatggccctgtcattaatgataacaattgttttgaaatttaattaaatcgtattatttgatcaatcgtatttttgggacaaacgtggtttacctcttctctctccttctgaagtcgccatctgaaaactcttttctcccaccgacgccggcctcacgccgtgtggtcggaaatttcttttgatgcccaagaagaagaagaagcccctccgtgggctggtccctggtacttctaagttcggtgccgtcttagcgcgtgcttcagctcccctcgccgtcaaaggtcgttcttcttttcctccgacctctcctctgcccctggttgtctctccagcgattcctgcctcagatccgtcgcctcttagtgcagatctgtcccagattgttgcctcgttagtcgtgcaaagctcagttacgccttgtccctctgaaattgctcgcccctctgatgatatctccgcctccggtgttgagacgtcagtttcctcagctgttaacaagttgttgacggttgtcacaaatgcccaatcgactgtcgtttcgacggacttggccatatcctctcaggagaagctcgtgactgaggtagtcaccgctcctgcccctcctctcccgtgtgttgtggaagtagaagcaccgactccgggtagaattgtgagtgctactgtggagcaggtttctgttccagcaactgaaccaaaatcccctagatccgattcttgggttgatttagtgaaggggtcttcaaagaaactctctaaaaaaggttcaggcttcacttttccctctggagagctttgtatcgaaatcccaaacgctgtgattgagagaaataaaaagtcttgggatagctttattctggggcaattttactctgatcctccctctcagggaacccttcacaacattgttaatggtatttggagcagataatatagggacatttcagtatcaaaaatggaaggcaatgcctttctcttccgaatcccaaactctttcactaggagtagggttttgaatcagaggttatggcaaatcgaaggccaaacaatgtttgttgctaattgggagcctggtgtcgttccagttaagccagaactctcctctgcccctatttggcttgagctaaggaatgttcctttccagttttttaatgaggatggtcttgagcgcattgcgggactggttggagatcccaaattcttgcatccctccactgcaaataaaacgaatcttgatgtggcaaaagtctttacgataatcgatccgaagaaaccattacctgaggcagtcaacgtccgtttccaatccggtgacatatgtagggttttggtttccagcccatggatgcctccaatttgttctcattgtaaggagattggccacactctgaaacactgtaaggctgctcctatcacttgcaccgcttgctcctccacagctcatgtctatgatggctgcccaaagttgagtgtgtctggtattaagaagcgccgaagcaggagggttaggagatccaaatcccctgcccttgttccattcattgattcggaaaaagaaaaggctaaaggtttatctagcaaagaatggcaggttaaagtccctcctagagtctctatggtgtcttctcctactggtgttggtgatgctgggagtgtcgaggagtttctctctgttggcaggcctctaggagtgggaaaggatcggtttcaaggtgaatcaagcaatagtgccctggttagtgctttgtctgataatagtatggctgttgggcgtgagcaacctgttctttcagaaggggacgttgaagaggattcgtctgatgttttgtcgactgattcagaagaggagagatttatcagggtgctgtctaagaggcagcagaagatccaaagaggcaagagcctcaaatcatctcattaatatgtgtacaccaattttttgttggaatgtccgtggttttaacattcctagtcatcgtagcggctttaaaaaatggtttaaggtcaataggcctatttttggaggcgtcatagagacgcacgtgaagcaaccaaaggacaagaagtttattaatgctctgctgcctggttggttttttgatgagaactatggtttctcagatttaaggaagatatgggtgttatgggacccatctgttgaggttgttattgttgccaaatcgttgcagatgatcacttgcgaggttcttctccctaattctcgcacttggattgttatctctgtggtatatgcggccaacgaagatgataagagaaaagagttatggagagagatcactgctttgggagcttctccggtcacttttaatagaccttggatcatgctaggagattttaatcaggttcttcatcctcatgagcactctaggcatgtttcactcaatgtggataggaggataagagacttcagagaatgtttgttggatgctgaactgtctgatcttgtttacaagggcagctctttcacttggtggaataaaagtagaactagaccagttgcaaagaagatagatcgcatcttagtaaatgagagctggtccaacttattcccatcctcttttggtttgtttggtccgccagatttttcagatcatgcatcttgtggtgttgtgctggaattagacccgatcaaagcgaagcggcccttcaagttctttaactttttgttgaaaaacccggagtttttaaatttggtgtgggatgtttggtactcgactaatgtggtgggatcgtctatgttccgggtgtcaaagaagcttaaggctctgaagaaaccaatcaaagactttagcaggctgaattattcaaactttgaaaaaagaactgaggaggctcatgagactcttttgagttttcaaaatcttactcttgataatccctccctggaaaatgctgctcatgaattagaggctcaacgtaaatggcagatccttgccactgctgaagagagcttttttcgtcaacgttcctgagtgacttggtttgcggagggtgatggcaacacacgttattttcacagaatggctgattcgaggaaatctgttaacactatcactactttagtggatgattcagggacccaaattgactcgcaacaaggcatcgctgaccactgtgctctttattttgaaaatctcttgagtgatgatatcgacccttattcgttggagcaagatgacatgaatttgctgcttacttacagatgtcccggttctcaggtggctgatttggaagccatgttctctgatgaagatatcaaggctgctttctttggtctccctagtaacaaagcttgtggcccggatggctttccggttgagttctttaaggcagcttggagttgcattggtgctgaggtcaccgctgttgtgagagaattttttatttcgggtaacttgcttaagcaatggaatgcaactaccatttttctcattcccaagtttcctaatgcctcttgtacttcagattttagacctatctcttgcatgaataccctgtacaaagtcattgccaggcttctcacagatcgtcttcagaagctgctctcttgtgttatctctccttctcaatcagcttttctccctggaaggctcctcgctgagaatgtcttgcttgccactgagatggttcacggatacaattggaggaacatctctccgagaggtatgttaaaggtggatcttcgaaaagcttttgattcggtgcgttgggaatttatcattgcagctttgcttgctcttggggtccctactaagttcattaattggattcaccaatgcatttccacaccaactttcactgtctctgtaaatggttgttgtggtggttttttcaagagtgctaaagggctgagacagggtgaccctctttctccctaccttttcgttcttgcaatggaagtcttctcaaagttgctccattctcggtttgactcaggttacattcgctaccacctgaaagcttctgatctctacatctctcatttgatgttcgccgacgatgttatgatattctttgatggtggtagttcttccttgcacggtatttgtgagactcttgaggactttgcttcttggtctggactaaaggtgaacaaagataaaagtcattttttttgtgctggtctagagcaggctgagagaaactctttggcggcctatggttttccgcaaggctgcctccctatccggtatcttgggcttccgcttatgtgtaggaagttgcgcatcgctgagtatgagcctctcctggaaaaaatctccaaaaaattcagatcatgggcaacaaattgtttatcttacgcaggtagagttcaacttattgcttccgttatctatggtaccgtcaacttttggatgtccactttcttgctgccaaagggttgcattaagaagattgaaagcctttgtgctaggttcctttgggcgggaaacattgatggtagtagaggagcaaaggtctcttggtttgctctttgcctcccataaaatgaaggtgggcttggccttagaagattctccgagtggaacaaaacgctttgtttgcgtcttatttggcttctctttaatcatcaaggttcgctttgggtttcttggcactctcatcaccatcttagaagcaggtctttttgggatgtggctccatccccatcagatccttggtcttggcgtatgctcttgttccttagacctttggcggagcagtttgttaaatgcaacttgggtaatggccgcatagctcacttctggcatgacagttggacttcccttggtccgctgataaaggttatgggtgattatagctcaagatcacttcgcatccctcttaacgctagggtggttgaggcttttggggttaatggttggaagctccccctttctcggtctggtccagctcaagccatccatgaccacatctctaccatcacgaccccctctcctgctacaattgaagactcctttgattgggttgttggtggtgttgtttgtcaaggtttcggcaaggacctgggatgctattagaccaagagcaccggaattggactgggcaaaggctgtttggttcaagggtgttgttcctaagcatgccttcaacatgtggattagtcagttggatagactcccaactcgtcaaaggctagcctcttggggccatatccagtctttcgattgttgcttatgcactattgagactgaatccagagaccatctccttttttcctgtgaatttgcggctcaagtttggagattagcgttttctcgcttatgtccgcgacagaggctgttttgctcttgggcagagctcctctcttggatgcgttcttcctcttcttcggcgccttccctcctcagaaaagtctcagcccatgctatcattttggcgtcagcgcaacaatgtcctccataacaatcttaggatcgctcctcttatcatcttcaagattgtcgaccgcgagattcgtaacatcatctcctctcgctaccacagaaagagatggcgcaacctcatggtgctttggattcgctaaccttatatcttccctaaatctctattgtagccttgttttattttttgcctcggctactctagtataggcctttcgtttttgtaaaagcctcttattcatataatgaaaattaacatttttagcaaaaaaaaaagaattataaataaaaaaaaaaaaaaaaaaaaaagaaagttcgaaccttttatataaacttaacgggcaattcaataaagaattatcaggccttgaacaggctttataaccttgatttaaaaacttttgtatggatccaaattgagttatattgggcttaattttataaattcgcaaactttgtccaagaaggccattgttttacaaaatccattttaaatttaagtccatttgaaaactcggtccaagcaagctacaaggttcactaaccagcaaacaggcgcacacaaaaacgttaacctctacatcaaattcatcaatctttgaagatgaatgtaccatcaataaaaagttatagtttgttctcgcggtattggacgatggcttcaggttgaagacgaccagtgcagatttggtgaaccgttgaaaagagcggaaacatctccaaccatccacaatgtttcaacacctcgtagacctctcttgccgtcgataccccctttaataagcaacagtcagacataagacacaaagagaaccactttctaatttaggactataatcctcacaagcagaatcgaagatgattaaccagacaaaactaaagagtattatgttcttcacaaagtctacctgtagcttttgcccttgtagcatctctgcttcaagctcatcaaaagacctgtgacgtttacaccaccaaaccatcaaaacagtgataactaaaagcagttgcagtgaaatgtgattaacaaaggtaagacctttttcctctgctttttgcaaatgcttccgcaactctccggtttcttcctcctactgtaatagtcagtgaaagaagagtcaaaagggaatcgctgtaacaatggacaaaaaggcgaaaataactcgggttttgattcagttcttacagcaagttgtaatgacatctgctacaccgcagctctcgaagaaagtactatctttaacagatggaaacaaaagctttgagagtgctttcatctctcttagaccaatcctcatgattgcagcctaaagatgatttacaagtaaacagcttgagatctctagaaactacttacgtctcctaataggaaacaataaaacttttcatttgaacttacctttgtgttattacccatttccaaaccgtccacgaaacccgctgcaatagcaactacattcttcaaagtcccacataactctactccttccacatcatggacctgttttcaacacaacctttatatgaggaatgatttccacaagtaacaacttagccatttaacaaccaggaacaaaactaaaagaagcatcaagacttcttaccggtgtgaccataaaatacggagtactaaacaactgaacccatgtgtccgctatttctctactccctctatatccaaccgttgcttcactaaacttctccacagctatctgtataacattataattagtcacagaaatgtaaaaacagaaatgacccaaagtagtcaaatttggatcatgtaacaacctcgtttgcaatgtttgcgcccataagaacacaacaattgataccaagttgcttggaaatgagacttgagatcatacaaggaccttccttcttcacttccattcctttaacaagagatatagcctcaacatctcctgtgatctttccatctaacttcttgcatataccatccataaactgatgcggtgtaacaaaaaccaacatgttcgcgtccttcactgcataatttaaaaaccatcaatttcaagatcatgtaaaaggagaaaaagctcatgagtgagagtcacactaacctgcattttcaaggtcaggatccgcaacaacatttcttcctagcttaatcccagggaggtacttgacattttcctactcaagaaaccaataaatagtaaaatggaaactaaaactcataaatcaatgaagaccaaagtcatccatttgttcttcttacattggtcttgttgataacatcattgagcttctcaccatttggtagaacctcctcaaacacccacatcctcacttcatctgaaaatcattgggtattcatcaaaaccatttcttcttcaaccattcaaaacttgaacaattatcaactttgcccaaagtttcaattttttcacagataaaagtatgagttttgcagaaacaatgtttcaaaaaaaaacagagcattgagatgataatgacacaaacccaaatcatcaaccatatcatataaaaagaaagatcccaaatttgtaacggaggagcgacagaaacgttaattaccatggaaagaaggaagcttgagggcattagaagcaatgagcttagcagcaacacttccccaattgccactaccaacgaccgtgaccttagatttcgaatcatcattacatccaccattgccttgtcgggatttctcgagagcaggagacatagcggcggagagagaggagaaacgagaggaagaaagagaaggagagcgagaatgtgaaagggagaagatagaggaggagaagaagaatgatcggaagcgcatggaagatggagatttgaaaggggacacgtttgacgttgagagagagagagaaacgtttacgtggaagtaacagtagcagtgtcttcaattctctataagccgccatgtttcgatggttggatcttggcgatttgctctatgtttcctcctctcttcctaatcctctcctttttttttctttttttttttacttctgttattattatctttaaaaaatcattagtttttattttatttttgttaaaaacaaatatgaattaattatgttcctaaattccgaccaaaaacaattatatttctagattgataattgtgttagcgtatttatttttatattgaggtttctataaattagtgtaacgtaaacttcataaatcgagatgtatgatgggtaaaaaaaaaaacaaaaaaaaacgagatgcataattacataatatttgtttttctattgaattttccatatgttattgtaacgtaaaattcttagttccaaatgataattacatgaattgtttgcatacatgggattcaaatttcgagaacacttaacattttttctataagtttgttttaccaaacttaaatttggatttaattaaaagcggatgacaaaacaaaaaaaaaaacttaaatttgggtataagtaggaatacgacggttatgagagaaaaacagtctaaatcactcaacatatcaaaatcactaagatattgtcatttttgtttattgtaatattgatcacaataaaaagaaaatttgttctcactccgccactgaatactagtctagtcactagtgcctttccaagtctttctaacattcaattcatagtgagcttggaaaatgtataggttagaaaacacctacatatgatatacaaaagttggaagggaaaaaaaatgatatacaaaagttttgaggagtttgatatgtttagaaagttttagaccaagtatgctttagaatgtatcttaaccgtgaaaagtgtaaataaaatgtctatttttgaccgagttcggatactgagtaaccgagtcatgcggtagcttgttcgtctacttgtaacttttcacatgaaccacttttggattagattaggcgcaacaagctccgtaggaaaaaaaattagagtatgtgtttggttaattagatagtgtaattatgtttacgtacttcatcgaaaatgtatatatagatttgacttatcactatttgttttgtgcgtcatatagcaatctatgtgagcttttatcgttagttagtggcgtacgatttgcgttggtttgatccgaaaagcgagtgagtacacgacatatttttttaaatggctcgaagtccacgtatcacgaattcacgacatagttttcgtcttctaaactatataatataatgtatggtttggtaaattcaagacatgaaaatatattcattacataccttacaagttcataatctctccatggatatatacagaaaccacaaaactagaaacaaaaccgattatgtactgttatcaattgaaacttttatcttataattaattagattattatatttgtgttatgatccatcagtttcaatctttagatttttttatatatatatagtgttatcaaatccgtttgacgtattgctctaattaataacaacccatgcacagttcaaagttatcactttaacgaaaagcaaccacaaacgctaaaaaaaatatgaaaccatattctaaaaactgtggaaaaacacagcctgtatgattcaattttggctaattcacaacggaaaacacacataaactctaaagtttagagtctaaattaacacctgttttaaattaccaaacatatccatctcataattaatagctttaaatcccctatttatctccctttttcctttttattcatactcttcaattttcttcattgatttctctacatttataccatttcgcgttaaaagccgatattgaatcgaaaaaggatcaatctatacataaaaatttatatgtctcgacaacatttctctttcgtaattcttttcataggtcttgctctagccggtggagcttatgccgccaattcatctgcaccttctccaccgtcaaatagcacaaactttttttttccggagacccccttcatctccacggttaacgcaacggtcgttcctgcagattactctgattacgaagtccctatgaatctagcacctgatggagtcaaagtcgtgcaagatgacttgccacttgtcgaagaagaagataaagaagctgatgagtttgcacaacctgaaggtaaatcagataagaaagcaaatcagcctaaggactcagcttcttcttcttattcttcctctttcgtcgtctttgtcgttgctgctggattgtttttattttgagggttaataaaacgatgttgttttggctcataatccattaattaattgtacacatgcaacgtaaatttaatggattttttttgtggcatcaatctaagatccaataaacgttttggaataactacatatgtatgatacggcttgcagcacggtagaactgttttttttttcatatcgagttggttagttcaaaatcaaaaacttaccatttgttagataaatggaaatctgtcctttcagtggcctaaaatcaaaatcgatttacacttgcagaaatctttttcaatactgtcaactatattgtgaacttaattaaatagagtaatctgaatcatatcattttgatattatgaaatgctataaaaaaaaatactttagaatttgatcattattagatcatacagcaattattatgattactttgaaaaaaataaaataaaaattattatgatcatattttgctatgctcgtttcacatagtttattctgtttattttactctaaacacattatttgttttgatttgcttattacaactcattatttttatttattttaaactcatatatatagtttttgatttgcttagtagtacacactcgtcatccattttaagatcaccatttggaccacaaatagtttagtatttgttcataaaaactaaaaaaaatcgtttacaatgtgagttgaactaccaaactaggtgttataagttataacgaacttattatgtagtcgatcacactcttaagaaaattctataagcctttttcccaataaattcttttaccctccaacttttcaattagttcttttttatttctcttaacaaataaagagcatttaaattatatttattattgtcttttttgtacttcaccattgcttttaaaccacttgcttttgtgttgtcggcttgcacgcgtgcgatataatatatattaacgttaacttttcaccataatataatgaaaaagaaggcaaatgattgtaacacatacaaagttattaattagttctaaaagctaattaaccatacttctagtctaatctacaactagttatacctaaaactaatttaacacatggcttgtgtttttttttctaatctattgtatccttttttacaatataattttaattttttaacatttgacaaatcatgcaaacagctgttagcatacataataatctatcaatagcggatgaaatttatttggtagagatgtaaacttcgaactctaaatttagttacttatttagttattttcatagctaaccattcgttattttgtaactactttttaaaccttaatttattatagcaataacaaaacatttcatacaggcttgttcttagacccgttgattcaaatcggatccgtagataatctcctaatacatgtttattcatattgataattataaatcagtaaaaacattttttgttaagacttagtattacataccacgcataactctattgacattaaaatcatagcatacaatgttacactcagaaaattcaatcttccaactttaatcaataggactagcaatttagcaaaatacaatcaatcactcaactcaaagattatcaaatgggagacgatacagcgaaataacaagcatatactactcctgcaaaatcaagaacttatagcacttataaaagagagtgtttaataagtggggattagagctaattaatcgattgattaatcaattaataaagtaaggaattagttagacagtaattgggagatgaatatgtttcaactccttaaaagcaggatcttgtaataaaaagaccttatctccatctccaacaccaatcatgtgtaagtattctctgtcttctctttcctttcctctgaacaagagtctttgctcttttgcctcaattccactcactattgctatcatcatcttcaattcacctgaaaaatatatatcaaatgagaaattatataataagagatcattttgtatcaaaagatgctctaaccatattttaaatgtaaatatagttagttgtcctgtaattaaccaaccagttactcgaataaatatcaaacgcgttatatttaattgccacagtatatatagatcaccctttatagttgcatacttgcatgcataaatcttgatgagttaatcaatagtattatatattggcactctttgaccggtgatagtatctataaggacgatttatatatcaaaatttttaaagccagctttaccaaaacaatactgagtaagtatacgattttttgaaagctgttttcaacaaacaaatttttttttaagttatatatatgtatacttttatttttgtaaacaacaaaacaatcatattcttatacacctattatacaacaaaatctttgtcaactatataatatatatatgaagaagagacgtaaatttgttttggttttcatgttaaaagaggatacgtaattaccgaaagtagagttggcatcaatggagatttcatatgaaagctgagagacagtggagactctaaggctgattaaatcttcagtgttagaatcttctgatctcttctgaaccagcatccctccaggcctcatctcccattttatgttgttattgttacatgatgacgatgaagaagaagatgatgatgataatgatgaaaatgacgatgaagaagaagaagaagatgatgatcttttattgttgcccgtcccaattcttccacacccaaacccaatgcaaaacctctttgccattaactttcccattatctttctctctctctttaatttctttcttttttgcttgtaagaagaagagagatgtgctggcttatatttatagaaaatgaggtttggtacacatattgataaattattattaaacaaaattatcatatgttataaagctaaagaaataaagggaattagggtgtaaattcttttttacttctttagttatcaaatgtgtggtagattagtggcaaaatgacccgatctttctgtgatgaaaattgaactttcaccctagtccaaatctttggggatgaagatttataccttcaaaaagtattactaacggttattcccgaatttgaggagattagggacttaaaaaccctaaatttttctagtcaacaaaaatatattttgtgaaactttgtggatcagttttaaaaattctgttttatagtagttcatctttttcataactgaaagctcgatgatttattaccttgattatactagtttttagattatgtcgtgcaattctccaaaaataaggaataaaagttacaaaacatcaactaattttccagtgcatggttctggaagattatcttctttctccgaatttgataaccattataggacttcccatccttgtccatttttaacatggttttgtttaaatataggagtcaaatatctttattattggtttttagtctattacataattattgtcaagaacaactctaatttcaacaatataatctaattgtctaaaaataatgatgactaccaaactctctttctctgtggtggtctgtacaatttctcaatatgtgatgtacttcatttgaatttttttctttttttttctaaacatgggaggtttctataaaagtttcaattcatgatataaaacattaatacctatgtttgatgacaaatctatacatttgatattcagtttcttaattttataaactgaaaaaaactgaaccaaaaacaaataaaatcagatcgaacatacctaattgtgcttaaatactatttttataatggttgtgaatatttttctgttaattcgttgttaaaggaaaaaaacgtaattttcacaactttgcatacactttctaaacctctataattcgtgtcatgtcatagcaaagcgtgtggatttttgtgttagttaataaggtatttgttagttaggtgaataaaatcttttatattcaacatttgcctctaaagatgtcccttgaggcttactttatgatatagaaggccggtttggttatcctttatggtatcaacccacgtgggtcgaaaaaggcataaagattacattttttgttattatattgatttgaaatctttataaatttcaaacaacaacgattttcttttgcttaaatcattgcaatgtacaaaactaaaatcattcacatgtaagggaaatctatttgaattatacgacgtgacatgttaattgtgttgttgctagactttaaacttggatatgtgttattaatcgattcatcatcagcttcaggataaagataaatagataatatagttacccacaaaaacatggaacttgtatatatgtcttttgcattctttaggttataaaaacatggaattgtggagcgtaatgggcttgagattcaacctcacgaaagcaataaagagaaatagaaatctaaaagtctgccggtcaacagacaaatatgacgagagatacactacgcatgtcaatatatttgatgcgatttcctagaatcaaatattattattctataattcttctgttaattatgtataaaaacataccgtaaaatctaaaacttatgacgggataaaaacatactctaaagatgtctaaagagtactttaatttcttcaagttaatgttttctcgtacaatatagaaaaagggattcgaaatagatacgaatcacgcgataggtcacaaaaaatattaagcagagtacaagagttactaatgcaagcacgttatgcatgactaactattgtatgtaaaagaataaaatctgcttatatgtaaaagagattatttggtacttgtttagttgtttaagtcgtcgtgagcatatagcatcgtttagtctattataatttaattgtaactgcggaaaaattaaaagtaaaagagatataaataaagttatcaaaacttatcaagtagttagtgggttctttatttgtcaacacacgaaaaatcaaatttgcttggaatggttgatattagattaaaatctctaaaaatactcaaaagtaattccaaatatgaaacatagaacactaacgtccgatgtcaaccacttaacactaaaacaaagttgattaaataagctgaggtctcacgttaagtaatttaacaatggcataggaaataaagagtacacaacataagctatttctcattgcacaaataactttgaatgtattctattaaatatcgtttggaacacaaggttgattctcggacaatttccaaaaaatttgctcatgtgatcttgctcttttctcgctataccagttcatggtaatgtttctattagatagtgactagtcggcgtagtagtttgaagtttcaacaaattataagtttagacataggcccaatcttctctcgctaccagttcatggtaatgtttcaacaaattatatataagtttgatttgaagtttgttgtcttcaagtttttgttccgtactgattgggccaatgtctaaagtacactaggccgtccaaaagagtctgaaattttattataacttagacacatttcatatgggcttcgtatcttggagaatcatgagttgatcgtgatgccgtcgaaatttgaagactttggccggctttctccatcaatttggtcggacttttatatttgagagttaagtttactttgtctttataattttttttttcgtaaactatatcatttctgcttgtctatgtaatttatgacaagttgatttcaacaagaaacaaaagttaaaagttgaaaactatgatattatatatgtaaattttttcagttcttttgtttttatttaattaattttcatttctcaatttcaaattcttcatatgtatttttcctttttaatgactttaataatatatttattcccattttaaaagcgtgtctcatatgttgtttattacatttaaaataaacaattgttaataatcgtttttcttattatatatattttaattagattataagacaaataatcttatcctataaccttcaaaaaatcaaattatattatattattcaaaaaaaaaaaaatcttatacaaaaaccttcaagtcaatcgagttttatatgttggacttataagacaaataattttataacaacattcatgataccatgttaagttttatatgcttctacttaaaactaattgattataagtaaaattaacaaatcatttatacacttgtattattataggtccatcacactcctcatgtatgatttcaaacaaagtgatttttgatgagctggaggggttaaacaattttaattaaaaaatatataaaaaatactaaactttgtttgaccagtcgtaccaagttgaaccatggtctaccagttaatccaatttcaaattatgtttttgtttcaagaaaaaataatactccatctgttcttttttgtttgattgtttataaaaaaaaattgtttctaaaagattgattttttaagttttccatgtaatatttattggttagtattggtgaattgtaattttcaagaaaaatagttaattatcattggtttagaggtatagaaaactgtaaaacactaaaaataatatatttataatcaatatttaatatatttttttaatatgtatgttttttctaaacaatcaaacaaaaaagaacaaatggagtaattcagaaaccatagaagagggagcacctgtcttcgcttttgattgcttttatatttctttttcccttctttacttccgattaggttagaatgcatagagccatagattattagtcttatcacttatattatttatttttgtatataatatttacttttataaataattataaatcttatactattaaattttataaacagatttattgtaatattttccaatgataccatttaatatatagtgatgtttcatataaagttcattttaaaaatgaaaattatgtgtttagcaaaggtggcaatagcttttagaaaataaagtagaaaataatgggtttgccaactgccacataaaaaaaaaacctctcttttaatatatacttaaatgtaataaacaataagataatgataatgtgattctttaactgtcgcttagtgtcgacgttagaaaaaaagaaacactaaaaatgttcggttcatgtcgttttctccaattcctttatctcgtgcttctcttctcaatacgaggaggaggatgtgttggcccatgcgttaaacagcagcacaaaaaccgatcaccaagaaacacacccgatttatttagcagcacacgaaattgaaataatatgtaaattaaaaaatatactcttaatttattcagttttaaatgtattttttggtttagggtttatagacggtttcttaaccgtcaaatctaatgtgtgtgtgacatattcttctctctctctctctcgaatctttcgtgttgtttgctgttcaaaattgaaattttaaatattaaaaaaaaagaagaaaacttgttctgcttcttgtcgtgtccgtcacagtttgaatttctctctctctttctctcttcctcataaaaatctctgctttaccttttcttttcaaagggtttcattttgattctagggttgttctaaatgcgacattttgactgatgggtctttgttgaatttgaagagagcaaaagagaaagagattgttctaatggagcctccaacgggaatcttggcttctctgtggcaatttatactcttcattccttatttcactggtttactgcttctcggtgtcattaaaggtaacaaatttcagacttgagttcgatgatgttgacatgagattggcttacttgatttgtgtaggcctccattagggttgtttcatttattcatcaatttgcttcaacagttactgaaattagcatttctaaccaatttagcgatcttcaatgccataaagttccctttttttaattgaagtaaacacctaatccgtgaacgttgttctgttttagagatcttgctcactagtttagtggcttaggatttatctaagagtgattaattggtacataacattcatcaagtgcttccgaagttagtgaatttggtatgaaattagtttcttcagtactataaagttctctttttttaattgaagcaagccccaaaggccaaatccgtgagttcttttactagtcttgttgacaagttttgtgggaatgaattgttgtgaacgtttctttacttcttttttgtttgcttaggtatcgttttatgcccgcttatatgccttactgtggctattggaaactctgcaatcatcttaggccttttaccagtacacgcgatttggactctatattcgatagcgaggtacttacttctttctgaaacaatctctgccctctataataataccattgttatctctttcgatgttgttgaagtgtttttgtttgaaatcagtgctaaacagttaggaccaatcctgaagatctttctgtgtttatgcgttcctcttggtgtcattctctggcttgtggttagtatcttaggaagtgttcttggaggagctatttatggatttctttctccaatatttgctactttcgatgctgttggtgaagggaagtctaatccgtttttccattgcttttatgtaagtctctttttctccatgtctcgttctttatgttattgaagattagacctcaacacctacattgtctgctttcacaatttaggatggaacttggagcactgttcaaggcagtttcaccgttgtttgtgattttaaagatgtttgctttcactcctacttttcttttatggatgatcttcgaacatctactgcgaaccgtcactattatgaaataaggtcttcagaaaatttcagtaaattgtgtgtattgattacttaacagtgctttcttacagttttcacttatatttctcaggttacttcaaattccaggtgctgtgattgttgcggttctcggaattcttgttgatttcccagtgatttcactcttagcattgtgtaaaagcccgtacatgttgttcaaagggtggcaccgtttgtttcatgatctcattggacgtgaaggtcctttcttggaaacaatgtgtgtcccaatcgctggccttgtgatcttactctggcctttagctgttgttggagcagttttaggatccgtggtctctagtgtcttccttggtgcttatggcggtgtagtctcatatcaggttattaaacaatgacttttttttttgaggaaaatgtgaatgctgatgatactgaattggtttctcttgtcataacacaggagtcatcgttcttcttcggtctctgctatgttgttgcttctgtttctatttacgatgagtatagcaacgatgttcttgatatgcctgaaggttcttgctttcccaggtttgtctccattggcttatctagcaatctttacctctctctctttcttttcattctaaaacagtggttttatggttttgtaacaggccaatatatcgaagaaacgaagagggcgctagtacggcattttctggtggtctttcaagaccgaactccttcaagacaactccatcaagaggaggatcaaacaaaggcccaatgattgacctgaaaccgcttgatgtactcactagtcacactcttcttttggttatctttgtatttaaacctgaagcctattcttttgatctttgcagcttttggaggctctatttgtggaatgtaggcggcacggagagattatggtaacgaaagggattataaattcaaaagacattgaagaagctaaatctagcaaaggcagtcaagtgatcagctttggcttacctgcttattctcttcttcacgagcttttacgctctatcaaatctaactccaccggtttattactcggtatgtttcaacagttttctgtcaattttcataaccgcattatctagtaactatttgaacatcatcaagaaacaaacaaaaccgtttctgtgtttttgtttaggtgacggtgtaacggagataactaccagaaaccgcccaaaagatgcgttttttgattggtttctgaatccgtttttgatccttaaagaccagatcgaagctgcaaacctatccgaggaagaagaagagtatcttggtaaattggtattactctttggagattcagagagacttaaaagctccattgttgaatctgaatctcctcctctaactgaactcagaaaagccgaacttgatgcctttgctcgcaggtaaaaaaggcaaaaaaaaaaacacacacaatcttgttacggctttctacttcggattctaagatgtgtttttggttttggttaggcttcaaggattaaccaaatcagtatcaagatatccaacattcagaagacattttgtggaactagtcaagaaactatcaaatgatctagacaataaacataaccgttttgaaggcggttcgagatcagttccacgtcccgggaaaacggtgtctcggattttcagccaaaaatcgttcaagaaaaagacaagtagcaatgggtcagatcaagattcaccaaacagagggttaagagacattgatattgtgtaagtaaatgttatgcgaccagaattagaccgaaacttcgtctgcttttagctctgtaatgataaatttatacagattccaagtgaatatgaaactgtttcatttatctaacaaatgttttacattcagcttttgcttgatgatgtgttgtttctcagaaacagcagaaccgtttcttctgcaatagaaatagcaagcttttagtttttctttcactttagacctcatttgatctaaaacataacaaacataggctgatgttttcgttagtcataaaatcttgagcaattgggattagaaatgttaccgtaggttcatcttgagatttgttattgtcacggcgttgtgaggcggcacgaccacttgcgtttgtctttttgtcgtctcgagctttagcgaatataaccgtaaatccttcggctgatgctggatcgttcacgtcccattctccaaattttggtaatggtcgatcttgttgttgtcgttgttgattattctgaaagtttccaatcacaaaaatgtttgatttctattataatccaacgaaaacacacatgaaaatgctattttttgtatcaaatttgtgaaacaaatgagaaagaaatgagaaagatcttaccgatgccattcaaagattgtgtaaaagatgcaaacagaacatgagatgatctttcttcaaacaacaagaaaacttgtttgtcttctcttttagtttttgttttcttaaaagaatttgattacgtttaaagaattagaatttgagaacagattagcgttttctgaaagtttaaatataggttaacgttttaattattgttgaaacttgaaaacagaaaacaccaatcttttgtagcgaaacggaacgctttttctcgtaccgtcttttgttttcgagtgaacttcatcgtatcaaaactcgccacgtgatctacacacttctcgaggcgaacacgcgcatttcagaacttatccattaatctctgtgattaacctataagccggtatttataaacggtcacgattttccaagttttttaatcaacggtcgttattacgtagacgaagctaagcctcacatctacaaatacgtatacatacatttttacataataattaattaataattacaggttattaacaaattaatcatttttaatagactattaaaaaaacaatttcatttcatttgctctcttctccgagaaaatggcgtttggtttgatcggaagagttgttggaaccaaatcatcacgattatccacggcggcgcgattgattccggcgcgatggacatcaacaggatcagaagcacaatcgaaagcttcaaccggcggcggaggagcgagtctgaagacgtttcagatctatcgatggaatccagataatcctggaaagccagagcttcaagattacaaaatcgatctcaaggattgtggtccaatggttctagatgctttgattaagattaagaacgagatggatccatcgctcactttccgtcgctcttgccgtgaaggtatttgtggttcgtgtgctatgaacattgatggatgtaatggtcttgcttgtttaacgaagattgaatctggatctaaagagacgacgattacgccgttgccgcatatgtttgtgattaaggatttggttgtggatatgacgaatttttataatcagtataagagtattgagccgtggttgaagaggaagaatccagcatctgttcctgggaaagagattttacagagtaagaaagatagagctaagcttgatggaatgtatgaatgtattctctgtgcttgttgtagcacgtcttgccctagctattggtggaaccctgagtcttatcttggtccagctgctttgcttcatgccaacaggtaaacttaatcttgttttctcataatggattcactaatcaaagtagttttttgaagatattgtagggcttgttggtagtttacattagtacgttatatggggtcacttagattgcttaagtttctgtagttgtagtttagagctgaaggaaggttctgttttgagatttgcttgagaattttgttggtttgagcagtaagagttggtagacggattatgtatggcttgggttgttttacttgttttacattcattatgcattgtcaatagggttgtttttactcctttagtgttagtgtggtactgtgggtttagctctttgttcactgaggaaaggtgctaagggatctttgtgcttcttcacctgtctgtagaaaaccccaagttcaatggtctgattgtatccatgtcattatgtatggtcatttaggttgtcttgctcctttagttgtagtgtagtttagcctactttgttcaactgaaatggaggaggtatctctgaagaaaggtgcgaagtactctttgtgcttcttcatctgtctctgtagaaaatctcagattcaacggtctgattgtaactttgtcattatgtatgggcgtttaggttctcttactcctttactgtagtgtagtttagctttatactgaaatggaggaaaggcctctagagtaagctgctaaggactttttgtgcttcttcagatctctaaatagaaaaccgcaagttcaactatctgattatatctgtgtcatcatgtaaagatatatactatataggttgtttctgttcctttagctgttgtgtagtttagccgattttgtgcaattgaaatggaggagagacctctaaaggaaggtgctgaggactctttgtgcttcttcaaatgtttcttgaataaattgcaactatatgattgtatctgtgttattaggttaaagttttgatctctcaaggtattgattgtaacaagaggtttattcacatatgcaggtggataagtgatagccgagatgagtacactaaggaaagacttgaagccattgacgatgagttcaaactgtatcgatgccacacaattctgaactgtgctcgtgcctgtccaaagggattgaacccagggaaacagatcacacacatcaagcagcttcagaaatctggttgaacaacaaatgaatcaggcagtacctaatggatttttgattctaataatctgcaagaaactccaattttggattcattcttgtattgctgtcacaactatcagaattagattattttgtggtatatcttgatgaattttttttgcctacaacaagcaataaaactctgctttttttatcatccactcattcagctttgccttaatacaaacatttggatttcgagttttgctttattggtgaataagagagaaaaatgtttacacatacctcttgcaacttggaaagtaaataactaatctacaaacagataagcttgttttttaatgtgttgaggaaaatgagagactaatgatcagttttcacgggatagagcaagaaacactgtagctgatgagatctgaactttgagatcagcaacatcaatgtcatgcccgccttcgactagtccccatttgtccacctgcatgaaacatgcgacaaagattagtttttatagaatgtcaaagcaatagattttggccaagtgagtgacaaaatgaaacctgtaaatcttcttcaagtctaatcaatttgattgcatcatcgatctggagtttcccacagaagataccgagggcgattactatagagtgagctgatgcttggagtgcatcaatgcttgcgagttcaccatcattcgttttcttgagcagttcttctactgctttcactagcttgtcgtcttgtttacccccgaagatgctagaatacactttcggtttgacccgaaactctgactctatccactcaagtagaggatcaatactctctacctgaatatctgcaaaagacacaactcaataagtgtaaaatctaggaggtagttgaaattgaagagaaagtgtattttaccatggacgtcactagttagatcattatcttcaggtgctcggaaaaagacgagatcttgatgtatctttctcgataaatgttctatgatctttgaacgcgtaagaggaactctttcaagtgcagtacatgctagtctcataagcggcattgtgaatggtctgatcccttctgttagctaacacaagatcatcgtattgattgataccgagtcagctaccacacaaacataagtagatgcaaaaggatcacaagagaaaatgagctagagaactgcaagcctagttctttaaatctcacttcaactaatcgaattatcaacctattgatcacattagaactcagattgcaaagtccagaaaccgatcaaacattagggacactaaagaacggtaagctctcagctttaagttgaataagcaatgagcagacccaattacaaggattctagctaacttaaatcaaacccagtactgatcagctacaaaacaatagctaaatagcttaaagcaataaactttagaagtaaaacagatcaaattagtgaaatggaacaaacctgatactcccactcagcagcaatggccttagcaagtgccaaagaacgaagcttgagaggtcttttcgaaggggttttaagggttctataatcaagcatcacagtccatccatttccatcatcagcttctctagtcgtcactttcttgtaaaacctcttccctacgatcgaaccagtcatgaaagacgtcggcatcgtcactgaatccgattcgtttttccggcgagagttcggagctttcactaagatgggtttctcattttccttctcgaatgtgaacgacgacgaagattccgatggctgagtatcggaatcgggttgacgagcggcagatgtcgtacataaggatctagcacgaatagcaagattagagtttctcgctgacttaaaagctcttccgattaacatcgccgccattaatcctccctctccggtgacgaaaatggggacctccttgcttagggttttagatcacatagatcgtcagatccaagcctaaacgacgtcgcaataacccggagtgatagttaacctctactacaatgaaggtgttttgataattgtgattataattacaattttattctatctcattgtaatcagctctgtaatataatatttgtaaagaattttttgacaaatatcatttgggttatatagacaatcttttttaaaaaaattggctaaatttagtttgtaaacttttctataattttcaagagttacacttacaccaattcattatgtgatatgtattgtttcatccgtaaattaaataaactaaagtattcttacccaaataagtaaattttattactctaaatccaaaagttttgttaattaagtgatccgagtcccgagaaaaaaatgatccgagtcaaaaatgctgaaacttaactcaaaacggcatcgttttagccgccggtttcaaaactttaaagaaagaacgtaaccataaagagcgccagattcagagataaggctcattaaaatcacctgcttcacccatcacgctaagatcgtggaatcttatatcactagactctcccagatcatgacacgtcatcatcttcatcatgagacccataattttttgaaactgttttatttcactccccaataatattttctgcttttagctctttttaaggctcttcaaaaatctccgtcaacgtcgagaacaaaatttggagaaatcgaacagacgatcgagatcgaggaaaatggcgtcgtggaattcgattccgctggagatctcgtacgaaatcgttggatggatcgcgtttgcttcgtggtcaattagcttttacccacagctgattttgaatttccgtaggagaaggtaatctaatctaccttttgttcttgagattttgtttctatatctgtagttgaaattgaaattgatgaaatcttggttgtgtttgggaaagtgttgttggattgaacttcgacttcgtgatgttgaatttgacaaagcactcgtcgtatatgatctacaatgtctgcctctactttagtcctgttattcaaaagcagtactttgacacttatggcgataaagaggtttgtttcctctttctctctgttattcattgaagcattaagcatttaatgaatttgattgtggaatctagaaatgagttttgtttggattctaagatggttcttgttggctcttatcttcatggttacaagtttacctttacttattagctaatgaagtcaaaattgaagataaaagtttgttcctttctaagtttcagcaaaaaaaaaacgctttagattgttcgagctggtttaattttttttgagtcgttttgttataattgttgcttatttcagatgatacctgtggctgcaaatgatgttgcattctcgatccatgcagttgtaatgacagctgttacactgttccagatctttatctatgaagtgagtaatcaagtttcttaggcttgcctttgtctctttatcccatacaagtgttctttttttcctgatgatttctagtgatttgctctcagcgtggacctcaaaaagtatccagacttgctataggtattgtggttgttgtgtggggatttgcagctatctgtttcttcatagcattacctacacactcttggctatggctcatttcaatcttcaagtaagttgttgcgcaaagccttctgaaccaattcttttagtggtaatctaacagttttgatgataatggtttatttgttcattgttatagttcgattcaggtcttcatgacatgcgtcaagtacatcccacaggtcagaaaagattccaaaccttaatttttttcattattgattgaatcagcattactcagattttatgtgtttgcttcacaggcaaagatgaacttcactaggaagagcacagtcgggtggagcatcgggaatattcttctcgattttactggaggacttgctaactatctgcaaatggttatacaatctattgaccaaagtaacaatctcttctctatcacatcaatagcttttgttttctctgataataacattttgaaagaaaactaaaactatctatttcctttggttcttccagattcttggaagaatttctatgggaacatgggaaagactcttctctcacttgtaagaaaattgatggagttttttttttggttcaattctctctctgtctctaataaacgtctcaaattgtttttaacagatatcaatatttttcgacatcctcttcatgtttcaacactatgtgttatacccagagaagaaagtctcaaaatctccggaaactggtgaggaatcgaacgaaccactcattgattcttctcatgaacatgtttaaagatcagattctcaagagtcattagtttcagcgttcccactgtatatgtttatatcacaaaaaggtacaaatgtgagaactcttcagattgtcgtaatatcagtctaatgtatcaaatcaattatcacagaaacagcaaatgtataatacaatgttcgatcttgggttatattttaagaaacaagatgaaagttaatagagcacgatccattacccatagtagtgcatctactagtagtcttaggcacagcatagaagagttatatctatgcaagatccaaccaaagtcactatggttcgaggggtaccatgaaccatcatcttcttggcagcgcatatcgatagggtcttctctaaggttccgtttgcgtcctctgctttttctacccacttctctaatctccagttttctacttgatgcatcgcgagctgtagtgtaccccataggagtccattaacagtgaacaccatcctttcttgtcttgtttccatacgtatcatgaccagaaatttctatatgtatatcactctgtcatgacaaactttatttctcaagttcattgataatacatttggaacatggaaataacttaaaactaagtaacttacttgaaattgaaaagatagtcaaactttttttttgtcaacttcataattcttcattaaaagtttgccaaaaaaaacagtcaaaactgtaaaactcattagttcttttatggtagaaaagttaaacaaaacagtcaaagtttttgaaacatttatcaatagtattttatggaagatggttaatatcatttgactaccattgtagatcattaaaagcaagatagcctctatatatatcttagtaacttttcttctaatgattgtattactggctctgcctcatcttcctaaataactaaatcaaaccaggattcaagtgggaggccaatgcagtcttcactttcaactttcaaggtatagaaatgtagcatatctttctaatcaacctaataactatgtgatacattttctacataatcaccagttatcttcaccatcggcactttgctaatagcggattattgaaatattttaatacaaatgcatacacttccatattataattaatgatgatttattcatattagtttttgtggtttggaatctacagcctaagatgtcattgatgctacaaaaaaatcaagctcgtggaactagagcaagcctgagccaatttgagccaagaaagcttctgattgctagcactaaacccaccatccctgatctgaatgctgaaccttgttccgactcggaagaagaagaaacagtggagaatctcacaagtcttgcacctcaagatgcacacaatggtcttcctaagcttatgttcgaccttgaggtcgagatcttttcccgtctttcatgttttcaatattggaaactaaatcttctcaacaagcagttttcgcaactgctacaaagtcgtgagatttttaaagtgagacgagaacgtggacttgtgcaaccatatgtgcttatgttttcgagcggtgaaacttgttgggtaatgtttgataaaggtttcaagaatttccgacaacttccagaaattccttctgacttttgtttcttttatggagataaggaaacgattactgcgggtacgcatttgatagtcatcgggagagaggagaagcgtattgtggtgtggcgatacgaactagaggtaaacaagtggatcaacgatactgaaatgatcacaccgcgggtaatgtatgcttccgcaagccgtgggaccgatgcatttttcgctggaggaatcaagacaagcgaaaacgggggtcctgatgttgtgaacgttgctgaaagatacaactccgatacaaaaacgtggaaagcgatgaaagcaatgcacaagcgaagaaaatttagctcgggatgtttcttgcggggtaagttttacgctcttggtggtcgagatgagaatgatgtgtaccttacttgtggagaaagttacgatgagttaacagattcatggaagttgataccagacatgctcaaaggcatgactttcatgaatccccaatcccctccacttattgctgtggtcaaggacaacctctacttgctggaaacatggttgaacgagctttgggtttatgatataaacgcaaacgtttggaaaaatcttggagttgtgcctgtgaaagcaaatgctgctttaggttggggagttgcatttaagtcagttggagataggattttggtgattggagcttcagttactaaatcgtgggataacaaaatgtcagtttacacatgttgcccatttccaaaagtggaaaagattacttgggaggagactagctgcgattgtgttcagctcggccattttatccgtaactgttgtgtgatgcttgcttaaggtttctgagcaacatatattgtgtttctgttttcgtttttatgtttatgtttaaaataagttttggcgattatgacgccaaaacataagtcaaattgttgttatgtctctctgtgtgtgtgtgtgtgtgtgtgtgtatgtgtgtttgtttctctgttttgcttttgcgtcttgggtttagacggcaaatcatctcatagaaataaatatttgtcgtaaacttgtattccgatgttttgtgttatttatttaaaagtcgtgtttatgtgcaaaagattacttctgtttgtgtttttataagctttatttacatagttttgtggtttcctctttggccataaactcaagttgtcaatttgtattgaaatttgttaactgttttcaagtggcctaagttttattttatagtgtcggttagacaatcgagtatcaaatttagtttgaagaagttttactaaataaaagattaaacatatacaatgtgggattagcgtgtagtttggttctttccttttgttttttgttttctttttctagaagaagacaaattccaataattgaatagtggaaggaagttatctacacaactcatttggtttggtccacaagcttcactttagggaattcgtcttgacttttgactattccttgtcccgcaagtatattcctcttcttgttatatccttcaagcaaccttttttatcatttcacatctttcttcttccttttttttgtgtgtggttaaggtctcatcgatcaacggataagatgaagcgtgaaggcaaacaacacggtatggtgaggacttaccggattctgcctccgtcgctgaatccaaggccggaatcgaagttggtcaaccctttgacttcacggccaaccgctggattatttaccaaagtgacatcaaagccgaccaatcactcgaaattcaccgggaaatgtggtcaagcaaggtgccttgactgccatatgcacccggtcaccaaatctaaagccaagactaaaggctcttcaaaggtgagaacaaatgatgtcacctataagatgctgacttggcaggtcgctgccggtgggcctagacccggtttgaagctttccgggttctcggctaccggaatacttgatcttatgtctgatgattatggttatgatcatgattatgattatgatgaagaaaatgaagaagaagaaaacagagggagtgttgtagaagaagttgtgaatatacagagtagtgatgatggtggtgaaacagaagaagaagggtcaaatgatgatgatgatgatacagatgatgatggaaggatgagtttttgtgatgtggggatgatgatgatgatggatcatgtggaagaatatgatgaaggatggtatttggttgaagaaatgatgacttaactgatctctctgattatcccccaataattgtctttccttttgcttttgtaaattttatcatttttaataacttgggggaatgaatgattatttctatgtaaatgtgatttgattcttaaatcaaaaactatgatttataattgtaatttatgtaaagttgaaaccttttctcaacaactcattcccactccaaatcagaacagaggttcaactactactatttatcattcttaataacttgtgttagtgtgatttgattcttaaatcttgttttataaatgaaattaatgtaaagttgatacctttttccattccaaattagaaagagaggttcctgcaatcacatctcaatgaagagcaatataaaacttaacatatcgaattcgaatcgagtataaagactatgaaagaaggagaaaggtttttcattgaagatgaagaagatacatacatacaacaaaaaggttcacaaagatacaataccagaaaaaagaaacaaacgttcttctgatattcacttttttcttgctactgtgcactcaaagattctcttttttagttttttaccactcttgaatcctaggacagatcaatctttctacttgcaagtgttttcagagattcctcttctgtgttttggtgttctacctttgtcttcctgcttctgtttccccagccatctcgggtttgaagcaaagacatagaaatggtttcttactcgtctttctctgctgaataaacacagctagtgtcagtattcatattactaatggaaatgagaaaaggcttcttctcatgattttgttaaaagtcgaaatcttaccttctttatagtcagcttttgatcttgagttttagtgtttcccatcaaacagctacatcacaacaacagtatacaattaggataggaacatcaactcaaatacacattgactcaagaagagataacaaatcagtcttacctcaagaaaccgaatctaggacgaactggtttttcgcttttcgtcaacgaactatgagttatcggttttccactgcaaaattacaacataaaacaatcagatggaggacaaattctagacaaaacaatcaaagctgcttttgttaccttattttcagtgagaaaacaagctccattgctttgtccggagtttcagaagttgctgatttctctatagacaatctaaccaccgatgagttcttggttacggattttctctcttcttctttctctccaacgaaacaactcttcttcaccaactctccatcctcagagtgattatctttctctttatcatcatgaataacctgcaaatcatcttcttgttccaaaaccgcaacatttgttcttactggctcatcatctttctcaatactcaacaccaactcttcactactactcaagactaactcagtttcatcaccctcttcttccttaacctcatccttagtcaatgtctccaaagtgttaagcaacaccgcaacactttctggttcttgtttagggtcagaatcagatgattgatctgaagcttttgctttctttgcttcagctattttcttgtaatgagcttcaaagaaagctttcttctgagcaacagatccaggctgagagaacttctcagcttcatcgacatacttcttatgcgaaaaacttgaccatttcccccattcaagattctctgtcatgaatctaccaaatgaaactgattgactaagcgcatgcatcgtattatcctgcaacaatccaacatatcaaaatcagaatcttaccaaaactcaaaaccaaagttataaactttctggtgaatcaaactgtttccaatcaaacccaattcagatactttgagtaaaatcaacatcaagattcatatctatcaagctaaaccctaaagtttgaaactttacattcaaaatctcccagaaaccatcgaattttcccaggaatcatagagagaatgaaactaacctcatgagattcattacgagaaggaggagctgcgaacgaataggaatgaaacagaacagcagattcagccattggccacaaaacctcaaaatcgagaacttcttcgttggaatctcaaaaggaaataaataaaaatcgaagcgttttaatgggttttctcaccgaaacggctataaaagaattttttcgaattttaaaaacttttatttgtcagccctaaacacatgttttaggagacgatctgaagaactttggttgagatctgggtcccacgaaacagataaaactcagaatatctttttaaataaagaagatactcaattttgagtttttatttgaaaatttgataggaatttgagaaactgagaataaattatgtatcaaagaagtctaacaagaatgaatgattctgctatagttgttgatatgaagtggctgagaattgcaacaagagagaaaacgaattttttctggtgatgaaatattaaaatgtgaaatgctttttgggaaaaaaaactctgtaatttaaactgaattctgagtaatttttttttttaatttttagatatatcaacgcgtttaaaaactattttagttgttttaactaaaaaaaatgaatctgattttctattaaaaaaaactttatattagtacttatatgcttacatttgattttttttggttaaaaaaatgaatctgatttagggtgtgaatattagagtcattagaaagactaaagaaataaaattgtagataagtttggagaaaagtagccaaaaaagaaagaagaagaaataaatacgatttattagggaaaactaattagtaagtgattagcgttggtttatgtaacggtaggtgtacttttgtaactccaaataaaacagctttgagttacaaaagtgatgttgttagaatgaatacattacacttcaacccatcacaaaagcaactacttttcttcctttgcatccaacaattatttaatcatatagctgaaaatattgattgcttctctcccataaaaataaacaaaaatgtatattaactcttttagcgttttactttaaaactttttttggtcaaacaaaagattttatcatcgcttttatatctcataaacaaaatgtattagattatttgtcatcgttgaaactttaattctttctccttctttagagattaaccaaaaccaagttgaagttttggttcgttttttttaattcatatttctaaatttcaaagattttattcattatagaattaaaaaaaaaattgacaaagtaatagtgaaaatttcagagtaaagccttaaataattatttaaaaatccaacatttggtggcctttcaaaatatttagaagttttggaaaagggtatagtccattattcaaaaaaagattaaaaaatcaattgaagagaaaatagtttaaagcatttaaaggtttgaatgaattctaaccaaatgtgtacaaaaaaaattcattattgtatcttcatattttttagtgaaattaaataacattggattttttccttgaatacaaaaaacatccaaatccattaaagactaatattcaataacaccacctataaattcttatgttttgaaaataaccccaaactatttttctttcttaacccttaaagtttcatttttcatatattacaccaaaatttgaaatcatcttctttgattgtttttggtgtgagcgaagatgggaagatcgaattctcaatgcccatctcattggattctcctctgcttcttcatctcttctcagttttggggattctcacttcccacttcgataattcaacaaaatctcgaggtgaaatttttagggtttttcagcaatttcaactgtaaatttcgtgtagaagaatgtctgtatcactttagggtttgtaatcgatttggcttacttgggatttacttagaattctagattttgttcaaattttgaagctttgtggttgttgttctacagggttttaaagatcctgaagacggttttcatgagattcattgttcaagagaacgtagcagagttgcttggaaaatcattcaagaggtatgaattgaaagcagtggtttttattattttttatgcaaatctgtagagttttctcattgatctttgttgttgctgtgaagtatctcatgccgtatgtggaaaaggagcggtatcagttaccgagtacttgtagagttcatcgagacaatgacatttatagagaacaagaagagcacaaattgcgttcagatattaatgagtggcgttgtggattctgcaaaaaggctttttatgaagagaagtatctcgataagcatttcgattcgcgccattacaatttacttaatgcggtatatactgatgcattattgttaaaatgatccatctttctgtgacaattcatactgttttggggtctattagcgattcataacttatgtgcttttgaatccagagtcatggtaaatgtctgtcggatctttgtggagcgttgcattgtgatcttgttgtagacacagctcggcttaagtccaagtgtaatcctgcagctgctgcaaaaaaccggcacttatgtgaggtacatatttttttagttttgattcggtcaatatcatatgacaagtttggactctaatactcaaagaaaccttgtagcttctgagaattgcaaagaacatttcactgaaagatttgaacacttctgaacatattgtcttcgttctgtttcttgtgttcccgtgcttatctgctctggtgtggttgcattgcagagtttggctaatagttgttttccggtaaataaaggttcatcagccaaccgtcttcacggtattagaaccttcctgaattttactatcttatttcaacagtttttgcttgtattgatccataaagattcaccactacttttggggtttaaactttacaattgtagacttcttcgtggggggttttaatgatccatagagattcaccacccttttttgggggttttaacttttaaaactgcagatttcttcttgcgtcagttctgcgatgcacatacatgttcaggaggatcaaagcccttatctcaaaaaccaaaggtaacataataaaccctttttttgtaaatgatattatatcatatcatatctcatttaatctcagtcatatgttttgcagaagaggagtatagtgtacattattttctccatcatcgttttggtagtgcttcttctctattacagctttgtctatttgttccgaaggtaacaacaacattaaaatactgtttcagatttccttacaactctaaaaccgaaaaaggccctcatgaactcattgttcttacgttttactaatctgtagaggattaaagagaagatctcaagatttgaagcgtattagacacaatggtctgaagaagaaacccttctaaccatatcaagctttagctttaatggcggctgagagagagtacattttttttctttgcaagatgattacaattaggatcagattagtgcattttgcaacatcccttacaattatatcactacttacaccaatattgttacttagaattcaatagtgtttactgcaactagagcggtacaatcgcatttaacatttctaaaacatttcaaaggttcaacttaatttcatttttcatatttgttagtatcattcttaattatttggtttagacttttgagtcttgatcaaccatgattatctcgatcattttatcaattgggccgtttgatgaaaggccttttgggccaaattacaaaacagatatctttggaagaaccaaaacgacaacgtgggatagacgttagagatgacgtgaagaaaaaaaaggagataagtggaacctactttttcccagtataagtccaatatcactcaaagtcaggacactaatcgaatcatagcctcgtctctttcaatctcaacttcaacgataaacaaaaaaacaaagtggataaattcaaagcacttaaaataggtaaataaataatgacgtgaaatataacaagcaaggtatcctaacttttcttttgctttttttcttcttttgggcaaatctcatacatgttcctgcatattttaaacactcttcgaatgttttatcgaaaaattaaaaacattcttaattaggatgaaaattactacgacagatcacactatacggtactataacgtggataattactacatagtattgtattattgagcttgtataagtatttgtgacaataataccaaagagttttagatattttattggtttttctaaggaaatacagatagataaacctgtcgaaccggttgatttagcacaataagcggtcatgaaacgtcttctacatcaaagttcgtaaatttccatgaaacgtctttgagcaccgaggaagaaagtttaaaattcctaaagaaacacacaaattaaaaaaggcaaaacctaaaccccatatttatttgtctttttttctttatcagagaattttaaaaaggtaaaaatagattatattctattccttcagaaaatttttatcgtcctaaaatcttcgtagcctgcaacaaagaaagactaagaaagaactaaaatattttgcttcgtctaattacttttttcctttggatttaattctcagccatcgccgccgttttcggcggtgtaaaaaatgaagaaccgtaggaaacgcggtggtttaagcagtgtcgacgtcgttgtttcatggagaagatttttccgatttgtttctttgttcgtcttctccttcgttctcttctctgctttcttcatcttcttaggtattaatccaacaattaatcacaaccgttttaatttatttattattacttaatactaattaatatttgtataaatcaggcaaaattcgaccggtggtgcggtcttcggtcaacgcagttcttcgtggttctgtaccggtggttaaggtgatcacgatccatgaagcagttgagtttcccgaccaaacattgattttcctaaaataccctccatcttctcggttttttacgaaagaggacctcttttgcgttttctccgacgtaaacgattcgtctaaactttttaaagagcttcctttcgcggtggaaaccgacgactatggccgtcagatcgtacggtgttccgccgtgcctcgtggcaatactgtatccctcgccgtttcgagatggagggttgatgattataatctccaagtagggctcacacaccgatgggattggctggtgtacgacgccgtgatcgacgacgacaattccacggtggtttttgtcaaggggcttaatctacggccaggaaaggttgctgacgcgtcgagatatgagtgtgtatacggttgggatttcacaaagcccaaacttttgcttagagcacaagctatctctgcggcccaagagatcgtacgttgtaaaacgccactgacagtattagacggcccaagaagggcccaatctcaaccggtgaaagtttctgtgaggatcaaaggaagtgggatgcttccttctgtagctcatccaattaaacgtccgggtcggatcaaagtctcgaaaacgtttgaaacgtgtgtttgcaccatgacgcgaaacgcagcaaacgttttacgagaatgggtgatgtatcacgccggaatcggcgttcaacggtggttcatctacgacaacaacagcgacgacgacattgtttccgagatcaagaatctagaaaatcgcggttacaacatctcgagacatttttggccgtggatcaaaactcaggaagcaggattcgcaaattgcgcgattcgagcaaagagcgattgcgattgggtcgcgtttatcgacgtcgacgagttcttctacatcccctctggtcaaactctaaccaacgtaatcagaaatcacacgacaacaccatcatcgtccggcgagatcggtgaaattcgaacgccgtgtcacagttttggaccgtcgggacttagagatccaccgcgcagcggagtcacagcggcgtacacatgtcgtatggcgttaccggagagacataaaagcataattagaccggaatcgctaaacgcaacgctaataaacgtcgttcatcattttcacttaaaagaagaattcgcgtttgttgacgtggataagagtacgatggtaattaaccattataaatatcaggtttgggatatttttaaggagaagtttaaaaggagagtagcgacttatgtggcggattggcaaaacgaagagaatgtcgggtcgaaagatcgggcacctggtttagggacccgacccgttgaaccaactgattgggctgagagattctgtgaggtgagcgatattgggcttagggattgggtgttggagaaattcagtgaccgtaaaacgcagcgtttagtatgggagagagaagcaaggagagtggaagatgaagttatagttcaaatgggctcgtgggccgataaaagagttggtcggaagaggaaaaagcaattaaaagcccaataggttttgtttttgttttcttaatttccacggtgaaaaaataacgtagagatagggacatatttgtaaatattgattgcttcccggggaaaaaaaaaatgttatactctttacttaataagttaataaaaaacgtcagtttagacttttataattgtagttttatcaagaagaaacttgatggtggtgatttaaaacaaaaaaaattgatggtgataatgaatttatgattatcagcttatcattgttatgatatggttacaccaatcattaccataaaaatttgacatcagtcggcgatttgtttcccacatggctatggcctataaatctataatacaggtttcattttcttgcaaaaacaaaacaccggttctaattgtttttttttttaataatggactggctttaattcttgcatatattaaaatttgttacgcataatttaattaaaaataaatctgatatactttcttatatctaataaataaaaaagtgagtaataattatgattaaatatgattaagaggcaatttctcttaaatatctattagccaaaatcccgagagcttaatatatgtgcttattatagttatccatgtacacgtatatagaaatttattctaaaattttcgtaaccaaaaatgaattggctccacgtctttttgtcctttgagtatttaattctatctaatccataatttattaaattatttaggaataatcaatgctatgagccccataattaaaggttaatttgtttttatgagataattttaccttcattgcctaccccataagagtccataaacaataactcactttatgacaaagatttttttttttaaaaaccacttttaaaactttctgattctgattgagaaatcaataaataacttttaaaactttctgattttacaatatattttcagtttttttttgccttccatataattggccaattatagtaacgtgatagacagaatcacatataatctttaacagctgtcttgatcaatgcatcaaaagccggggccaattcaacaaaaaaaatagaaacaaatcttatttttagtcctaaattaaaataaaatcttattttaagatattcaataaatttcaatatattataaataaaaagttttctctcctatataaacaaatctcacaaacctatttacacaacaaacaacacaaatctttttctcattcatcaaaagaaaaaaccaaagcaaaaaaaactcaaaacgtttttgaagataatgatgatgatgacgaagatgtttgttcagatcgctgtggtttgtctattggcgacgatggccgttgtgtccgcccacgagggtcaccaccaccatgctccggctccagcaccaggacccgcatctagctcaaccgttgtttcggccaccaatatgttcaccgtcttggctattgctgccgtggctctcgtcgttggttccaaccactaagttggttattacattcgtcgttttgtttcggtttctatgaaattgttctcttgacttttaatatattttgaatttttctcatttgtttttaactctctctatgttgatctgatttcttgaataaaataaaagtttattgaacgtgtgtttttaattacgaagatttggattacaaatccgattcttagtaaccgatgaaaccaacgtctgtgtgtgtttttagctaggagatcttcgaaaacaattgtttccttgtgaaaacaatgttttttaattttacgagactaatctataatctgccaagaccactcgaaaagttcatcaacgcttaggttattgtttttaatgtgcatgaacaattttattagatagaagcagcagtatatagatacagaatacagagcatgaaattgagttctaacttctatgtagatgaagaaattttttgataatttggagaagtcaatagcaaaatattgtgataaacgcaagtggtttagaaagaaggaaaaaaaaatcaaactcttcttcttctatagtttttttttacatcttagaaattataacaaaataatcaaatctggtacttttaggaaaaccaaatattagtgagcaatgcttctacctaagctcgagtttctttttacacacacacttgacacaacacaaacaaatagtgatatcatgaatcattcatcaagagtcagtcccattaccaacaaatccaagataaattacgaaagccttgttaaatggtaaataattgatacacctgtgtgagaccgagagatcgatcacaggcttcaaattcccccaagaacaattgttgaagaaacacaagtgttataatgattcaaggcttcttcctaatgctccattaaagcggcttcggtttctgaaagaggagctgcacaaggaaagtgaaatttaacttcatgaactctgtgaatgacaccaatatcagattttttgcaatctacgtataacttagagaaaaatctacataacggtttttcttaataatcggccatttcttagtgcgttcttctatttagacgattaaactaccattaaacatatgtaactatgaggatgggcaacgtacctaacaagtcttcataggcatctgataatagggatgagtccattagtaaaggtggggaaaatacttgatcatcaatatcgtaaaatgattgttgtgcatcagaagctacactgtttgatccagcaaccgacagaaacccgttcccattatcgtaatctttgaatgaatcaagatcatcatacgtgtcaggtatatcgctgtacttgcttggtgcaaagctatcgggaacattgggttcaagaaacgaaggctcgctcagagaggtaagtgctctcgaccctctgagaggcagggctttggtttctgatggaaaacgggaaaagccagttgctgaaagaggtacaaaataatgctcggagccctcatcggattgactatcccgtgatgagcctgctgaagaaggaatcaataaagccgcttccctcacagatttcttcaggttatggacaaaagaactgcttgtatctgacaccaaaattagagtgtaaatttgaattagtagataacacatattgtgatgaactactcattaattagtttgaagtggaataggcgtagaatggatgattggtaccaaaactaaaagcgttaaaaattcacatcagcaaaaccttcttttgatattctattactatacatgtttcgttttagtagagaaggttattatgtcacaaaccagtcggtaagttgtctggtcgagcatttgatagtgcttggtctgtagagttcttctcagacaagctttccattttattgacctgggaagccattgtctgtcgcttttgtccatttcctcctttaccagaagaagtaggagtggaactaaataactgtggaagctttaatgtaggactagctgagactttctcgagctgaacattagacattgtcgaggtcagctcagcaacatcatttgatacaccttcctgtatcacaagaaaaaaatttacatgagcatctcaataaattatgcatcagaagagaataaaaatcaagtcatcccctattaccataattctcccactgccctgagattgtagaagtgaagatgcttgtccattacttctcgtaactggaggcaaggttgggggaagactattaaccatctcagtacattccgatatggacttttgtatggctggagaaacttcctttaattggttgataagaacctgcatatagtgtgccatcagcagtaagaacatagtagagattgagccagaacatatgagtttgatgcataagaaaggttttcggagcatgctccaagagatcctacaaacagcgtggtaatatcaaagatctcacaactttttgatacactctcaagacaagctggatcagaatatccaccattattatggaacttcaggatctccagttaaacaaaatgccttgcgttcaataaaacggaaatgctaggaaagcagaactttttagtttgtttttgtgacatgatgtggatgcattgtcattttcatcaatgcccttaaagaaaagcagctttcttatgtacatgtttatacattgtgcatttgacttccatagttggccaaaagttatttctaaataagggaatgaacaagctaccatatttacctgaaagctagctaaatgttgttgatgttcagtcaaagttgcagccaatgattcaacatgcccacttgtaccaccatcactcgcagtccgcaaaatatctggaccatccccatcatttgctttagcctagaaacatgtacagatggaaaataagtaatcctgaattcctcatagaaaacagtgtgtggaacattaagcagtgagggtcactgtataatttgcgaaaatgataaaacatactttcagtgaaaaaaaccacaacaaaacatgagaagacataccagaagaagagactgtttatgaatacgctgtaatgcatgtgtccagcgccttatgacttccgctacatcgactgtctgattgatctttccacctctatcatctactcgagaaagtgtttcatcacttgcttgtgagctggctgtttcaaaactatctactaaagagtggtcatgcatgtttgtgtacgatccatcacttagttctttgtcatccgcaagtgaagctgaatcatctgagtgggcagagagtaattctgctcgaggaacttgagaactctgatccatcgctgcaagtagggccgatcctgaaatccggtatctacaaatcaaagaaaaccagacatcagtaaatgggtaagtggagttcaggcaatgtgtcttacaattagccaattacctatgctccctgtgagctatcaagtcctcaatgggacctgacgcaagaacttcatgctgacctgacgatagtaacaaaaacacaaaactgtaaactatataactcctgcataattctgtatttgagaacttatctctgtattaacttgtaagaactaagaacaaatagaacagcataaaaccttacctttacgagccattatagaatcccataacctagttgcctttgaaactagatgagaattctgactggagctagacacaaggtcatcccacacttctccttcctgcttcactttgtttctcaaatcgttaagtttctctagttcctgttgaaggtaagcctgatgccaaagaaatagaaaatgaaatgcatcaataaaagccataataaccagacaagaaaatggagtacctctcaccaaaaaataacgtcttacctcttcagcacagagaccacggaactctgcagtcatctcatgggctaaattagaccacatggcctgtctttgtaccgcagtctctgcatttttaagaaaccgacggcgctcaagcactatccgggcctgaaaatcatttacacacacatttctacgttatcccatgaactagtcaacaaggttcacatagaccagtgaaactataacacacaatcttgaaggtaatgctttcggtactaccttggttacaggaagcaaagtagctgcatgtgagaaagaaacgtcagttagagaagaaggtagaggattggaagctacatcagcaggaaatgtccgcctatgaacttctcttaacgcatgcagtgaaagttgccacaagagctccacaaatctgcaatcaaaacaggaagtaccacatatacatatcagatcacctaatgctgcgcaatcaccccaagagcttaatactaagcctaaagcgcccaacgaatacgaagtggagatgactaaactagttgctcgttatcaatcactagaaaaaaaaacctaatgaacatacatacataagaaccacatcagcgtagcctcaaccaaccttggtccacagcaagtggctagtgatgaaaccctcgaattactccttggtaatgccccttgtgattcaagctcgcttataatcgcttgaacaaccttcagattcataattctagtgttaagtaaactatgaattcaataagaaagaaaattgctcacaaaacactaaaagaaacttgattactcaagccctctttaccttacgaaaatcgcgagattgagccgaatcgaaaattggccaaaccttatcaaaatcctgagagatcaagacaaaacaaaatcaaacgactgactccaaaatcactatgtgcgaaacccagaatttcaaaaatcaatttcgtaacgagtgagcgagagagagacagtgaagattcgcacctttgaagactgagcagggccacgaagagaagagaggatgaagtagagaagctgttcaccgagctttggattcgaatggcgaaataacccgacccgaggcgtgccattggaggctccgagtccgatcacattcggatccaaacctaaaagcaaacagtttgtgtacattgcactctcgagctcaagttctctctccttttctctgtccatcgtcatcaccgtcgtcgcctccgatcttcttcaatggtttttttgtttccttttcgatttttttccccttttaattgaatctcgatcgaattttgttgtttccggcgactttttaaattttaatccctccatattataaatttacagaaattgcccttaagttttttttgaagatcccaacttgacatcaaaatttatatgcgtaaaaagacaaagcaaatgagataaatgaaaaagagaatatatttttttgaatagtattagattgtaagaatcaatgatatgatagtttgttttaacactaacaaaaaacgtttagatcttaattttccaattgtaatttagatatatttaaaaataaaaataataatatgtaatggaaattcatttgaatgattttgtttttggggtggttggacgcaaacatcgtaatcgtagacaactacactaacaaatatattattttattttaaaaacaaattttcaataattatagattataaaccatctataatctataatttattttttggtttataatctataaaacaaattcggtaatttcggtaatcttttcggtaattttttggtttatattctataattctattaatttttaaatctaaaccaaaaaattaccgaaaaggaaatttacaagatattcaaacaaatacggatcgtaatatcataaacaagagcaatagggggtaaaacgtgagcttgaaagactagaatactcaatttgtaaaatactttggactttatcccgacgacacgtcagttaaccacaggcattttcaaatgaagacgcgatgctaatgctaatatgcgcctacggcattgtgaacaaatcacaaaagccacgtcacaaatgttccgccatatctggttttattgtgtgttttataaagtaaaaaagtagaaatcaaaccggaaacaaccgtggaagcaaatttgtcccagttaacttagagcatattataaaataatacaacttgaaacattgttaacagttttataaattcgtaagaagaccaaaaaaatgtatactttgttaacttttaatagttgggttatttgaaagattctaattttggggcaatgcttgagaaaattgattattcatgtgagatggtattggtctattggatttactaatactgccaattgttatatggagatataattttgtattggtacaacggaacctggtggacttaaaatagacactgtacgcgttttgttgttattaaatttgcattatcggtccaacggtcgacttttataactttgtgtagtattttatatgctaatctatctattatccttaaatttgaaccaaagcaaacacatttgtaggaacattgcttaaatttaaattatcgtgcatcttcctatttataccagactaacaaaaacgaaaattctatttaatatttctatgtttaaaaaatataattcacttgaaatcatagattcttttaaaatattaagctctagaaacaattcaaccacatacctttctatataaaatcaattatcatttaccagcgtctttcgttagaagattaatcgccgcaaaaatcaaaataatagttcctatatcaatcaaaccatatctagatgaaactgaaaatataaaataaaaattttaaaaaaaaatggtaaacaatacgaaacaaggaaagagaatcatacctagttaccatgccgtctaatacaagcagaaaataatgaaaccctaaagtattgttctagttttcatcgagacaaatatgttaggaacgcttttgattatactcggcttgatatggttgggacaaaaattaatatctagtgccccacaatttgtgaagaaaagagccataagctatcggagagatgaaggaggtgaagataggatcagtgcattgccggacgatttgctcgtgcggattttgttattggttccaacaaaggctgcagtggctaccatgattttgtcaaaaagatggcagtttatttggacgatggtgccgtagctgaagtacatagatatcaaagattttggtcaccaaaaaaaaaaatctagaccgtttatttggagaaagtgagcgacgacaacagtctatttagtggtttcttaacgagtcattgcgactccacaaggcacctatattagaaagattgactataaaactcggtccacattgtcctgttaatgctaacgtgggaaagtggattggaaatgcggttgatcgcagggttcgtaaactagcgttccagctcatgtggtccgcagaacctactagcttgcccaaaagcctttatacatgtgaaacgcttgtgtatatatctccatctttccaacaaggtttttgtagatgtttcttctccggtatgcctcccacctctcaaacgtcttctccttgtctttgtggtatacaaagatgatgattatgttgttaggctcttatcgagttgtcctattctcgaatatttgtatgtgttgcaacatgagcaagacaatgtgacaaagtttagtgtaaaagttccatctttagagactttaatatatttttatcggaaagcaaaagtacttgacgaggaagatattggaagatctttggccatagattctaagattttaaagaaattcttcatcgcagattattctacaaactcgtgctcgattgagaacaaacctagctttgataaagcagttatctacgtttatagttaccctgatgacaaatttatgagatctctttcctcagtcagatatctcgagatacgtctaagcgttgcaacggtacttttcacctcacttttatttatactttatttatttattgttatgatttacatttccaacagttacttacgtgttgttgtgttcattgcatattccgtgttgccacgccattaacttctcacagcttatagagtgcaaaatatgtctctttgatgtaaattggtttgagccattagtgtcttttgcttcaaaattctcctgaactgaaagttcttctcatcgaccaggtccgtgtttgtgcatgcattaataaaagtaaaaacttcaaaattagcaaacatgttaattactttccttgatgttgttgcttcgcaattatggtataggagtgaagctttttcgcgttcgtggaagaaaccgaatgatattcctccatgcttgtcaaccaaactcaagatctttgagtggaaagaatatggagcgacaagcgaagagaaacaagtgttaagttacattcttgccaactccaaatgtttaaagagagctggaatctctttgaaatcaacctggaaatggaataaaaagaagataatgaaggagttgaaatccatgtataggatatcaacaacatctcagcttctcttctccactcaactggagtttaagcctttgtggactccatttagaaacaacgtaactaacctcaaaattggagtttgatgcctccccgtcctgactagtactaataagctatatcaagactcatatgtatatatatctgctagttttatttctagcttttatcatatatatatatatatatatatatatattttttttgaatgaattctaaagttttatttataaaaaaaactatttgtacagagtatattgagtgtgaattttttgaaaattcttgaaggacagaaatcctaaattcttaaattggactagagagcctcataagcaacaatggggtaatcatatacgttggagatgagagctacaatcgggaggacggccggatctgataaacgagtaccagagaacgcgagacggccgatcggactttggtgaaatcgtcgactacttcaatcgggctgaaagagagatttttttggctttattaaaagtctcacaaccaaaaaaatattgacacgtcacgaccgcgttttgattaaaagcccctcttagcttagagctcctctaaaataatttgctcaaataataattaaatttaatcatatataatctaagaattctctactatttccctaatatcccctattaaggatgctctaacgatataacgttgcccttgcaataagtgttgcaatttggtctcaatcagttgtgagcttgtctttaagaatccctttagtaaggtcccaatcagttgtgagcttgtctttaaggatccttctagtaaggtcccaatcaggtggtgttaaccttttgattccacgctttcatcatattattaatcaagtgttaatattttcttaatattattggttaaaatttggttttgtgactttttttttctttgtctctttttttcttggaaattagtaaattgaaaaaaataaaatgaagaaaacaacaaaactgctttctacaaagtactaagtgcatccgtacgtattctaacaaaaatctgaaaaaaattgtcgacaaaaaaaagtgggagaaaatgacggaagctaaaaccacaccaaccccttcctcctccattttgtactagtagttgaagcttccttcttcttcttcttcttcacctaatacttcttctctatctctctcgccaaagaatcgtacttcttctctcaggttgatttctctgtccttcttattcagatctccgtcttgttttttccatgatcgtaattctgaaagttaaaaaaaatgagacgaaagatttttctacgatccgtttgatttttttccttctctttgctctcgattcatgcttctaattattgttcgatttctcttctttatttttttttggatgatgagattcgatctctgtgatgaaaccgaggctgtgaattttatttttttgacgaatttctctgtggtgccatttaggttaagtattggtgtgttgttgttgttcctctttgactatg

SEQ ID NO: 803 - DNA, 14323 bp, Arabidopsis thaliana
agactttgactctctctttttttgtgtgtgtggaaattaaggttttaaggagatgggatctggtcaatggcacgttgagaaaaggtctacgtttaggaatgattcgtttgtgagagaatatggtatagttccagaaactggttgtctttcaatcatagttcttggtgcttctggtgatcttgctaagaagaagacttttcctgctctttttaacttataccgtcaggtttgttccatatcagagctggtgcatgtgttagaatcaatcctctggttaattgtgttagttatggtttttttggtttgtatgatggtcagggatttctcaatccagatgaagttcatattttcgggtatgcgaggactaagatttctgatgaagagctgagagataggattcgtgggtgagttcaattagccatttggtattttgattattaacttgtgagttcaaagttcatattgaatagtttttatgcagatatcttgttgatgagaagaatgctgagcaagctgaagctttgtcaaagtttctgcagctggttagtctattctttttaggatgttgatttcatgaatagggtcctgttttcggtactgaaataagattttttggttccaatctttgtagattaagtatgtgagtggcccttatgatgctgaggaggggttccagagattagacaaggcaatttcagagcacgaaatctccaaaaatagtactgaagggtcttctagaagactgttttatcttgcacttccaccgtctgtttatccttctgtatgcaagatgatcaagacgtgctgcatgaacaaatgtgagtccctttcagctgtggaatttattacttggataaaatgttaacctgcttgagcctaggacacgtatttcatctacgagttagtcttcattttagtagttagcttagaaatacaagttttagacgctttgaagttcatgtaaactatattgtctcataatttccagctgatcttggtggatggacacggattgttgtggagaagccatttggcaaggaccttgaatctgcagagcaactgagttctcagattggagagttatttgatgaatcacagatctatcgtatagaccattatcttgggaaggaattagttcaaaacatggtaacctgcttctctattaatgtctaaatcatcaatctctttctttagactatcagtgattattttatctcgtgcatttcttgcagttggtcctccggtttgcaaatcgctttttcttgccactttggaaccgtgacaatatcgagaacgtgcaggtgagagctgcatagctaagacagaaatagtcagactgtttgttatttagagtcaattcacattttcaaatgcttttcttgcagattgttttcagggaagattttggaactgaagggcgtggcggatattttgacgaatatgggtaatactttctttttgagtgtcttcttgttcttcatatagggtcttaatgagatgacaccagttcatttctgatgacatcttcacttcttgccacacagaataatccgtgatattattcaaaaccatctgctacaggcaagtatacctgagatacttttcctgataacaaaacttcattggaaatctatgtgattgtttttcagagtctctctgtaagttcaaatgctttcatgtattgactaactgagttcataatactctgtaggttctttgccttgttgccatggagaaaccaatatctcttaaacctgagcatatccgggatgagaaagtgaaggtgaacaaatacttttcttgaccactttttgccattctatctggttttcgttgcctcttttatctgaattcatatgattgagaacctcactgtttgatctagttacatttttctttaaaaatctccttagcgagtttacatggattggttgatatttccatttgcattttcagccaattagtctctcgttactgattattttagtgaacttcaggtgcttcaatctgtggttccgataagcgatgacgaggtagttcttggacaatacgaaggatatagggatgatgatactgttccaaacgactcaaacactccaacatttgccacaacaatccttcgcatacacaacgaaagatgggaaggtaccatgtcccacttcactcttcatattttcatctatcagttcagaaacaatctggaaattgacataaaatatgaagaaaaaacagaggtttgatgggtcaacatgatcatagatagcatcaatcttttggttaaagcatgtggaaccaaaatccgacatgtttgcatgcacattctaacggtcctggatatatctttcaggtgttccatttatattaaaggccggaaaagcgttgaattcaaggaaggcagaaattcgcattcaattcaaggatgtcccaggcgacatattcagatgtattgtcttgccctgacatcgtgttttgaatcttcttttagctttttgaatttaaatatatgtaaagacacaatgtatcgctttgtctaaactctcttgcaacaggtcaaaagcaaggaaggaacgagtttgtgatacgcttgcaaccttcagaggcaatgtacatgaaactaactgtaagtatatgatgaacaaacaaacataatttactaattactctgaccttgaaccactacagtgaaccataacgcttttggctatgcttttgctacacaggttaagcaaccaggtctagatatgaatactgtgcaaagtgaactagacttgtcgtatgggcaacggtatcaaggtgtcgctatccctgaggcatacgagcgcttaattcttgacacgtaagaaataaattttctaaattatatactaccccaataggctttatatatctaattgatgccttctgttccttcatgttatcttcaacatattttctttccatctctctgcagaatcaaaggcgatcaacaacatttcgttcgtagagacgaattaaaggtagaaacattttctaacgccacccttaaaccaaagcagtctctgagatcgtttttttgttacattacaaatgctctaactatagacacaatccagacacaaacttttgcatcatacaattcaggagctaacatttgtatccattttgatgattattacaggttgcgtgggagatcttcacgccgctactccacaggatcgacaaaggagaagtaaagtcaatcccatacaaaccaggaagccgaggaccgaaagaagctgatcagctactagagaaagctggttatcttcagactcacggctatatctggatccctcctacactataaaaccctacatatatataaatacacaatacatgtatctacatgtatatgtataaattatgctgaatagtccctcctcgagtttggtgtttgtacgtgaaacttgctacttcagctgttcactttgacacttcctttggtcttgtatttgcggctttgtagaaataaaaataaaaatcttaccaataccataaatgaatttagcttttgttgtgctcgttaaatgaatgaaattgacgatgagatagaaaaaattgccaaaaaatgtagagtttgttgatatacacacataagttcaatctagaggtggttgaaacacacattaagttccatctagagtttgttgacacagacacataagttgagtctaggaaccgacgccgtctttacatagtcatcattatcattagatgaccaaaaaaaaaaaaactaaaaccgatggataaaatggatctcgatagaaaaggctatctttcatgatttctcttctttatttgctttgtttctgaacttgctctgtttatgcaaaaacaattgaatgtccatacagatcgaaatttgacgtagactatcgacagtttatgcaaaataggtaccatctagataatccagatgtgaccatagtttatccgcatagaacaacactcctaggtaccatctgtattttcttttctcacgcatgtgtaacaaacaaattacttacagttcagccaaaatcatttatttgttgagaattagataaacatgatgctgaaaacaaagattcttcaggtagagtaaattttgccgagattcagaacacaataatgacaactcaaacaactagtttctttttcttcttcagagttcatcaaaacaaaagagcatttcacctttttgattcaatcagattcacaacttgatcattaaaatatcgcaaaatgctcccaaacaacctgcacataaccataatacaaagccttcagacaaatcacaaaacgacttaattctatggattcagatgaagcttttacataccatcatatctgatcaagatcaacggttcagggcaaagagcatgctctggccaccgggtaagtaggccacattaggagacctagcaagtgtagacgcaatctcccttgaagcttcaatcctcctaagctcgataagtcccataccagctttagccgtagcatcagaaatcaactgagcagcttcactttcaccttcagctcttataaccgcagctctcctctcttgatcagccttcatcacaacaaacttagacctctctgcctcttgctgagccacttgtttctgctcaacagcccttgaaaactccacaccataggacaaatgcgtgatagctacatcatcaagcacaatgttgaagtccttcgcacgggtgattagtgactcccgaacaagtgctgagacgtgaggacgctcagtgagaagctggtcagcgttgaactgtgcaaccacagctttcaaaacctcatttccaatcgaaggaagaaccttctcgtcatactctagacccaaagtttggaagatgtacgggagacgcgacaccttcacaacaattcacatcacataaacacaccaaattaataacgattctacaatacctagtcctcgaaacaaattttgaaaatcatagatcatcaaaaccctaaaccctaaatccaattcgcaaatgaatctgaaaaacctcaattcagagaaatcaaacgagtctagatcaaaaatgaagaaccgttatgcgttatacctcaggacgagagagaacacgaagagtgagattaaccatctggagatccttagtaccagagattgaagagaacgtgtgaggcttcgtgcggatatcgaagatgtgaggcctctgaagaatcgggatcaagaaatgagtcccttcacccacagtctgatccatcactcccctgaatcgatcgaagataacagctctttctccgccgtcaacggtgaaaagcgatgtattcagcaccgtcgccgccgttccaagaccgaaagcagccttcgccaaattggaaaggaacgaaacagccgcttgttggcttcccatttttgcgtgtggattatcttgaatcgagagagaagaagaaggaagaagagatttgagacgacgagagaggaaagagtttctgctagggtttatgatatgtttctggaacctaccacgggaaatgatttaatgggccaagtaacttagcccaatattattatgtgactatataagcctattaagaactaaattcaataatgggtttcatgacattgggctgaaaacagcttaacggttacagagtatgtttaatatctttttgtctcataaattatgtttctctcaattttttttattttttttttactgaaagatagattatagatagagtttacaaagttaaagctgacgattaacaagataatctcaaaaactaagtcgacggataacaaaaatcctcggagactaaagcccaaaagtatgggaagctaacaaacattactttaaatgcataagaaaatagaaactgaaccatggaaaatcaaaaactataaccagaatctagcacatgagacattgcccaccatcaatccaagataaagaaaagcttgcagaaatggctaaacgacggggaaattctaatccacagcatcaagatagcagctcttcttataacaaatgaagactacctcacagttcaaaaacagcatcccaaccagcaagaagaaaccaaatataaaacagcaaaatcgaggcaatgaaaaccaagatcggtcaacgccaatagtttatctcaatttgtttaatcaaataaaaattgaagaatatacctacttggacatttgtatggtgttaagggcctactataaaagtattagattagtacaagccaacggtagtgaacaaaaatattcttcgagctacttgacaaacacgaagttgaataaggataactactttttcgtataagaaaaatatttacatgtgagcatgattaatccttttcaaatataacggcaggggacgttgttgttgagtttttccagtataaaaagtgtttttttttccttaaaagaaaagttgtgaaacaatgatatctatttttgaaaactttttgtgactattttttgaccaacaaacagtatacgcgaatacttttctattcggttaagtgggatttgaagacagatgtacacgagtattaaaactgaatctgaaagcatgtaaatctccaaatattttatccgtaaaattgttatgtatcttcgaccaaaaaaatatagagatattatgtatcacttaattaatatgactcaattaagtcgtctcgaatactaagaaaattatggagttttacttggaaggtcacacagtgacctcaccacgttatcgaaaatgtcaaatgtttcggtgtcgaatcttatacaggtttgaaaataacctttaaaatagatttatattacagaaaagtccttcaatattgattttcaattaaaatattgcagagaaatctttaatttcaaaaactaaacgccaacttcaaagattgagctaaattcgattctttcaacattttgactccaaccggatatatatgtagtcatcaatattatcgaaacaggtaaaagaaacaacccaagtgaaggaaacatgaatctttgataaccaattagagtgagaagtgtataattgtaaaataaacaaactgaaactaatattaatatatatatatataattatatatatactactactactatactaggttattttgtcaaatatatatatatggtacatgacaacaataataagaaacaatttacacttttgtgtttgctcatcaagaaatttggaacaaagtccaactaatcttgggatagatcgaccaaaacaaaacgttcacttggtttttaatcggtcagaaagaatatgtttaggctaaacattgaatcgaattatcatctgaccaccaatggtagatcaataaaaagtattgatgtgtttttatctagctagtgaaaaaattttagaattgccatttacttaaatatgagactcattacatataatgcaaatattctttagtctaagctataatggatgctcatttgttgtttagtgcacataattttcctccaccaatggccagtatttgtttacaaactagtataagataatgtaagctaattatcacatacatgatgtcacgttgatacactaaattataaaaattataatttagtgtcaaagtgcagatcgaaactatagctaattggtggtgttgaaattattcataccttagtaataattataaaatcaattgattgtaatctaatagtttcgttgaccatatacaacgaagatgaaatagattgacgagtaaataaaaataaatttgcaatctggtggagataaatttcatccttaacctacaacactaggtgacacgtaacaattaaaccgagtcaactgattatttctttgaagaaaacttcctctcgtgtacagcttccgagatgcttcactggaggcattaactactttgatcatttgatttttgtttgcacaatcactaaatgcagatacaaacatgcccgcgctgaactatattacataagcatgtatctctcattcgatgcggagatacagacggaacactcgagttgccaattgcggtttagtctacacgcttctattgaaataaacataacaagtctaagattatgagcttacgacattggacaacatccatataaaactcctgtaaactgtaattaggttatttaaaccagtaattcatatatataggatatttagtgagttgcttctttgaacaacgtatctctttttttatttttgtctactatattttcataaagttttacatgagatagattcatcttgcgtttaatctatttatatggtattagtatttatacgctaatttgttcgtctatttttctcttttttggaaaaaattcgaacttcatcagttgactcattaaataactttcccaacagagttttactttacacgttttttcttcaatcccaataaattccacacacaaaaacctaactataaaacagttttgacttttaaacatttcaataacattttctaatcattgttattattatcataagccataacatgtcatcacataaatgctcacatgcataacgacgagataaatcgagagtaaaaatattctttgtgcatataggagttgttcggaatcggataatgatgaatttagttagaattaaggactcatcatacaaataacattcatcactatacctttttttttctttttttttttcatcactatacctatttgcttgaaatttttaactaattaatcttatgatgataccttaattttttcaaccatgttgatgaatccgtatataaatattttattttacacatcttcttagtttctatagtttttcttttttggggcaactagtttctatagtattttaattcaagaattaatatggaaatcgtcgtaaaacattattccaactaattaaataacaataacaaaatataagtcaatggaagaaagccacttgaccgaaaagcaggaacatgacaagatagaaaatgacaaaataaataattttaagaaaatagagattgttagaacatagaagtgaaccatacacttcattatctcttcttttcattgactctatcattttctcaaaagtcttcatttggtgcatttctacgaactttcctagctccttcacatttaaacactagcaacaatgaattaaattttatgtacaaactaaaagcagaacattaatagtggaaattgaacaatgaccatattttgttttcgaaatatttttaaaacattgccaagaagaaatgagaaacggagacatctgatacttttgatatttaacgaataattaatactcctatgatgtgcgtaaccaaaagatcatttgctacaaacaaaactattatcacagagtcatagataaaattattgactttaaaggttgcgtaaaaccatcaaatacgcacacagaggcatatttttggttgtctcaccgagacaatagtttttttgtttttattatcatatttaacttttaaaaaacgaaaatataaatttgtagtcttgtagagatcataaacaatatataaatggtttagtcagaagactcaatagtttgaacagaaatataatatttccctgttttgagatttacataagatgacgttttgagagtgcacaaaatatcaataatggactgtttggctacaagtttgcggcggtcaacgctaaacactgtactaaacgctaaacacactttccagatcgatatttgttatctatttctatttgtacttgatccaatttagccagccatttggtattcacatattcgctaaaattcaaatgtttgatcaaatatcgatcagtttgctaaatcttattggggaaattaaatttagaagagttctacaatttccttcatgttctaaaatttccttcatgttctaaactatatgtgaaattgtattctaagaatttctatagtttctaaaaacattagaaaacgtttatcgacaaattccttcatgttctatagttttttggagagatacttatctcattcattaaattgaatcaaagtacaaatataagagagattcaaatatcccaaaatttatcgacattagatctataagatattctccaatgctaaaaataaaataaaaactatgtatcaattagatccacaagaaattggagaaaaaagtggatagcatcttagtgcaaagtgcaaactagttcatagttaatcaagggttcatccacaagaaatgagaaaatactcagttaaaaaacatactaacttgaagacgattctaaaaccttggttctcaccggcacgagaagttctacacaacatttaacaaacattttttttagcaaacatttaatttatgtttggatttattttttatgtataatgacgtcgaatttcatataatgttttaacaaacatttaacatgtgtttggatttatttcttatgtatagtgattagtgacgtcgaactccatatgaattaacttttaccaaacattttaacatatgtttcgatttattttttacttttacagcaaattcaaagtttttttttttaaagaagattttttagaaaaaaataaaaataatcataagtagctattcatttcaagatgaaatcattaattatagtgttactgtgtaagtttaactaaaatatataactttgtgatattttaagtatagttttcaatagtataactctataactataaacttgtagacttgtatccatagacgagtcacgagagatgatgtgtttctctcaaaatcacacttcaaataaacaaatgattttacattgtttttggttcaaaaagacaaaaagatgtttgtttttcaaaagcaatggtttagtctaaagactccaaaatctaaaccgatatataacgttttgaaaatgtgcaaaaatcagtgatggactgtttggttacggcgatcaacgctagacactttacgaaacgcactttccagcgtttttgttatgtataaaagttttttttgtttaaattcttagttattgtgctttcataaggttttaaagctttaatatatagtttgctaataatatttaccagctggagttgggtatttgatcgaatatttgaattttaatgtatatgtgaaagatttgggttagatacgatcacaaattcacaattccacaaaaccgtataaataataaaactcacaaatattaaattatctaaaaacgaaacaaatcataatttaataaacaaaatcagtggttttaaaataaaagcgaaatttaatatgtaaaaagtgaaacaaatcatatatattaaaataaataatatttgatatatatataaatgtatatatatatgtgtcttgtttatatatatatatatatattgattttgtttcttaattttataaaattcaatgaatttataactaatttgatcactattatattttttatatacatgatattgatcaaattagctataaaataattgaatcacaaaattaaggaacacaatatctatacaaaaagatacacatatatctatatttttcaaagcatatataatcaaagatttttaatttaaatctttgtgatttgtttcgtttttagagatcaatatttcatttgctctgttaacttatgttagccaaaaaaaatgaacaataataacaaagcacataaggtatcgaaactgatatttaagaaatttgacaagccccaaaattaactattcttgtcactatctataataacgactaatagtttaagattaaagtaatttattgtatattccttggatcgactctataatctattgtctagtagtatgatatagtagtatctttttttttggtcctccatagacgaacaatttagacgagataatctaggtgtgaacaaaaagaacggctttcttctccctctttattgttagtcaataaaagataacttataaaccaaaacatagcttatacatcaaagagtcattacatcgacattcatgtatctgaaaagatattaaaacaaaagattccgtgaatatattaattggtacatataaaaatccaaaaacatactactaaattcgaataaataattatgtttagggagcttcacttatttaagtatagcatctatgactaatctaattactacacaactgatctacacaaaataattaactgaacaaaatacttaaattacaaattaattaagcaaacggtcttcccttgttaaccaatcctatttaagttacgaaactagggatagtatatgaaatttaattcataattaaacatttagtggatgaattaattgtaagagatatataattactattaatttataagattctatgttaggttgaatatattagaagagtccagctcataactcttgtgcccatctccacaagtagtttgtgaagtcaaacaaaaacttccacttttaaaattttctcttatttctttctctctcataagtcataatattcaactaattaagtgcatatatatacgatgtatcagtgcttataatcttcatgaggagctttatatatttagcataatatctttcagaagtgtgaggccttgttaattaagctcttcttctctatctctctctctccctctcaacctctcaccatggtagctcaagctcctcatgatgatcatgttagtttctcctctctttctctcacaatgttattgccttattgtgattcagatcttcatttttgtttttgttttttcgataatcgatcttcatttttgttatgaacaagacaaattggactttgagttattttctcagggcaaagcaaattaaaaagtaaagatgataattgagtctaattatcaaatgataaacaataatacttctcttttttttaacctcacccactgaatttctcataatatgtttcttctttcaaagattttttgagccttgttttcgcaacgatacaatttcctttcggtctttggatttattttgtagaaaatatccagaaaaaaaaaactgtggtgcttagagatagataagatgttgagagaatttaagaacttaaagacagaagtaatttattgtaagttaatgacgtgttgactataaacttctgactcattaaatgcttacgatttttcttaaactccttaattactagtttcattcttttttttccctccaaaattatgtaattgaattcttacgaaaacaaaaaaaaaggatctactttttgttcgtaagttcagatcttaactttcaagtaccgtacatggtcagtttccaacttttccaaagtttagggaacttctaccaaccttaaccatcgtcagaaaagaccaagagatcttccaaatccattattgtacttttactttatcttcattttaccccataatttattatatacacatttttagcccactgacatataatttctgacttttcttccattgattttttgtagaatgaacaaaatcaacttgttctttactttctttcttttttttgtgtaaggtttgtctaccaacctaaaccatgtttacaccaagagatcttccaaacttttcaaccttattttctttttaccccataagttattaaatctaactgtacatccccaaaaatcatgatttttagcaacactcgtataagttgacttttctcattgattttgtggaatagtcagaatcaacttgttctctttgtcctttaacctttgcacgtagttgtagatctcaactttatagtatgggtcagtttctgacttttccaaactttagggacgttccacctagtcaccaacctaaaccattttagactactagatcttccaaaatccacccttatactttttaccctagaagtttattatttaactttttaaccgagttgtaattaaatcattgacttttcttgcaattgaaattcttgtgataataaagcaggatgatgagaaattagcagcagcgagacaaaaagagatcgaagattggttaccaattacttcatcaagaaatgcaaagtggtggtactctgcttttcacaatgtcaccgccatggtcggtgccggagttcttggactcccttacgccatgtctcagctcggatggtaaattcccctaaaccaaaaccggtttattttacctaaaccggatttatcaaatcttaaccggttttaatttgttttcttttcaggggaccgggaattgcagtgttggttttgtcatgggtcataacactatacacattatggcaaatggtggaaatgcatgaaatggttcctggaaagcgttttgatcgttaccatgagctcggacaacacgcgtttggagaaaaactcggtctttatatcgttgtgccgcaacaatt

SEQ ID NO: 804 - DNA, 78181 bp, Arabidopsis thaliana
gatcgttgaaatcggtgtttgcatcgtttatatggtcactggaggcaaatctttaaagaaatttcatgagcttgtttgtgatgattgtaaaccaatcaagcttacttatttcatcatgatctttgcttcggttcacttcgtcctctctcatcttcctaatttcaattccatctccggcgtttctcttgctgctgccgttatgtctctcaggtaaatcattcaaaccggttcggtaatttaaattagtttggtttggtttatttaataactctgttttctcttccttattatccggttctaaatcaatttcctttttgtttctagctactcaacaatcgcatgggcatcatcagcaagcaaaggtgttcaagaagacgttcaatacggttacaaagcgaaaacaacagccggtacggttttcaatttcttcagcggtttaggtgatgtggcatttgcttacgcgggtcataatgtggtccttgagatccaagcaactatcccttcaacgcctgagaaaccctcaaaaggtcccatgtggagaggagtcatcgttgcttacatcgtcgtagcgctctgttatttccccgtggctctcgttggatactacattttcgggaacggagtcgaagataatattctcatgtcacttaagaaaccggcgtggttaatcgccacggcgaacatcttcgtcgtgatccatgtcattggtagttaccaggttggtttttctaaacaagaacgtacccttaaatactcgagagagaaccgttattaactaggtctaaaccaaatcttggttttgttgcagatatatgcaatgccggtatttgatatgatggagactttattggtcaagaagctaaatttcagaccaaccacaactcttcggttctttgtccgtaatttctacgttggtaagaaaatttattgaaattcacgtttattatttacttatgtatatttacatttttaaggtgttagttgttcaaaaaatctgatgatgagtttttttgtcatcttaattatggttttgtagctgcaactatgtttgttggtatgacgtttccgttcttcggtgggcttttggcgttctttggtggattcgcgtttgccccaaccacatacttcgtaagtttgcgattacttaacgcttttcttcagctcgaatgaattattattcatgaagaaacatatgcactttttcaaattttgattaatacaaattagcttacctaatttatttataattttttcagctcccttgcgtcatttggttagccatctacaaacccaagaaatacagcttgtcttggtgggccaactgggtaagtaacattatcatttacttttcaagcatttgcgatccgcggttgcgttttgttatattgtttttcataaaaaataaaattttgtttgttgtttatttcaggtatgcatcgtgtttggtcttttcttgatggtcctatcgccaattggagggctaaggacaatcgttattcaagcaaaaggatacaagttttactcataaacgctatgtaattccactaattaagaaacatatctttatattaatatatgtgtgaagaagtttttaagagatcaacacgagacatttatagaagaatcaatggtctggtctgaatctaaatgtagcttttagggtttgtattttcgtgtgtgttatatatattatataaaacaataatattttgctcaaataggttttcaaaatgtttggttttctgaggagattgattctttgtgttctcaagaaaagaatacatagatggatatcattccaacttccaagttattactattattatattatagccattaaattcatgattagtacgaatataaatatttcatagcgtgcaaataacgacaaaaatagaagattcacaagtgagtcaacgaagaaaaatgaattatatacttcatacattacaaaacgaatatgcataaagaaacatatttataagctttcaagggttcaatgttccactgtttcttatatttgaattaagaatctaaaatttgattagtcggatggggtaaacccaatcaataactcatgattatcttactcgaagattcgatggcagtctttgccagccaaatttgcacatatagtaagatgaaattaaaaataaaataaaagaagttttgtcaacacaaaatattgttcttgtccatttgaaccaatccaaactttaaaaaccaactaaaaaacttataatatatgcatgtgctacaactgccgtttgttcacgcttataatatatgcatttagcttctttatagtttcgcatttgtgctttaaccccacatttacagaagaggcaatgaatcatttcagcttaatccaaccttggtgacttggtgtaatgacattctgattcggcctcttaatttagtattggaccgttcctgagcccacatttctaatggcctggcaggacataaatatcattctcattgtaaaaattaatttccaacccaatcactatcttatacgattacaaatatatattattttcgaccaacttttacgattatatataatgtaattatcatttattgtaagagataaggaatcgatttattgagaatacatgattcggagttgtatatggatcctttgggcaggattttggtatagagcagtcgaatgttttgcacctatttttcttcttttgttaaatagatagcttacaaatcaattttgaattccgcaagggtggaatgacaattcgttcatatcagttgcaacatcttcagagtatttgtttgcataggatctgcaatgttgctcttctggcaagtagcaagaaaactgtcttgatcttacattgtcttgtcacgtgtgagattagtttgaatttaactttatcacgtgtatggacttgtttttttattaggatatatagagtccagtcctcttaattaagacttaaaactgttgcatgtcatgaatcctgatcaaagtttgaatactatgatgaaagtattttgatcgtttaaacacttaatcccacaaggcttcaagtcacttttgtaactgtgcctcccagccagtaaaggcccaagtgacatgtgatcttattcattgaattacatggaccactgtaggatcatgcccaaatagtccagaaatcagcccatgcgaccaaattatattaaacaatgatgctaatatgttgctccaaagtctaaactaattactaaaatagattgatatatatgtgttgacaatattaaatttagacgtaataattattgactatgtctgtggagtttatacctcgtataggataatatcgattttgaccgtccggccaataagagagttttgattccaccatcgactatacaatgttgcataaaatataaacgatcgaggctactaaaacatatatatataaataatatagttaatagtataacatccagtgatatgtatgatatatgcatgtgtgagctgtaaggttagtccataaatcatgggttttgtcgttaaaagaagagaaagaaagaaccttatttatagacaaggaccaaccaagacagccctttctatgaactctcctccaactaaaattgccatctgttcacttatgatttcttcactagtcccttcttatttgttttttatatttatgttgtacgtacgcatatacaaaataaacaaggaaacaaatttgaaatctcgcgctttcactttaaaaaagaatgactcataaacgaatatacactattgatttgttggaaaatatttgatgtgtatagataaccaaataaattcaacctataatagcggtttttaattacacatgtataatgtgggtctgggtctgtatatagaatctagggtaacgaccgcttaactatatacatgcactttttatactttttcttttacatcatatatatatatatatatatataatgtattattaaagcatgaatggtatatcattttttcattttgaacataattctgctataacttttactatatatttagaacataaattttttaaggtttcaaacgtgatttcattgtatacgcgtattattgtattaagttataactataaaactaaaatttcaataataaactaaatccatcttattattgtacaagttatgtagtattttagaatatttttcagaaacaaatgtaaatcacatgtatactacattagttaaagtcatatatgaaataaaatttacgtaaaacgtattatatatatatcctatatatttggaacaagacataagaaaaacctatgggctatggtaatattatataactcctcattccaaaagatataagtactcagacaaagagtactacagccggagtcgaaaacaactctaatccaaattaatcacaagtataagttagctttaagtaggactccacacgtttatgttcatatatatgtaaatagattatatatatcaatatatgtatatatgttgctttcaaaatgtaacgtcgcttaccatcgtcaatattattccaatttctttttgtctttccggtttcaatcacatgccaagccttagagctgattcaacatccaatctccaagcaaacccacctgatcttatcctccatacatcacacggcaccgtcatcttcctccacgtggacggctcgtacctaaccctaaccctgcacgtcaccgcaccgtataactccaccatgcatgctatctcctccataaggtccatggccaccaccagccacaccctgataacatccacgtcgggagctcccatcatcctccggtaggcccggtttacccaacagacccggtttgacccatccgacactaaccatggacacgtgtcaacctctaacatcctcatcactctctcctctgcctgatccatgcggcctagctgctccaggatgtgataccatcccaagtcagtacacgtgtcactcacacactccaccgtcaaccacgactccaccaccttccgatcaaaagatgacgatagccctatgatcgaattatacaagctcttttttggatccatatcactcagatccgaacaaaactcaccagctttatctccattgtttcctatatctctatccttctctggcagcagctgaagcgtgacgatatcggttctatcatcaccgtctatctttttatcaagatcggtctttatgttccctctatcgcaaccattctttttaccagtaatatccttcttattattactaccactactatttttcttgtcccgaaccctaacatactttcgtttcgatcttctgtttcttccaaggaatctatcactatttgtatcgtctgaagattcgccgacagctggttttggtgcgatcggacggaaccgttgcattatcttgcttataacggtcttgtcctgatctgttgcaccgtcgcaaatagaagcttgacactgctttccgttgccatgcataacttgagtctgcctcgatatcactatctctccgggtgtgttaaaatttttaggtgtttgatacaagaaaatgctcaatattgttgggaaaaataaaatagttgagagttgagagagtatgagagatatgaagaggaaagttagtacataaacacgtggctagggcaagcgtttagcatactagtataaaagatttgatgattggttccatatttatggaatgggtcccaattttaaaatgcatctcaacatatttatgttgccagcaaaaaaacttcatatatgtctttgtcgtcgtattatatatacgaattgttgaaaaaaaatctaaataagtattaatgtaatataacaaaaagatataattgaatggtagtcttttttgaattaaatgaaacagtcatattttaagttttgaaataatgtagagtactatcatcaaagtgttaaatttactgtgaagtgaatcatatatcatgcatatatatactcttgatatttaaaatgctacgtaatccatctaatgtaaattgacaacggttcctataaaccaaacttgatatgactatgcgtttaaatactttgcatatcatcaaatatatatacaatagatgggtttcaagttcaaagatatgtcatgtcttcaacgtgtgtttctgatggtttatgggctcacttacaagaatttaggtgttagttattaattgcttatttatttaggttgttctcgtttaatgaaatggagagaaacaagtttatttagaagtatggtttaatctcactcaaaagagaatgtgtttttttttttcgatttatgattggaattttagaagaataagtaattaactaagtaagtacttaatagtctgcaatttataatcatccacagaagttgtttatttattataaatggaagggtttagggaactagctaacatcgaatgtggttggattggtatataaaggactctatctatatatacagatttaaaaggactacatttctataattacatcattgtaaatacaacaatgcttaattaaaaatcatattatacttaacattgttcgttttttatcatctcaaaaaaaaaaattgtgcgttttcaccttcttagtgttgtacatatatgcatctatgatccattcgatgtgtacatctatgttttatgtgtaatacgtatatgtatatacacgtattcaggactatatcgagccaaacaagtacaaataaactaattaataataaaaaagcaaccaatagtaatattaattgttgatttttttttgaaaattcaaaaaggcatgcacgacaagatatagatataagcgtatctatcgtgatggggggattttgagattttggtccaaatcagagtgctggaccaatcagtcgcaaccatctattccaccactacggaaagttataatccacgtggactatctccttaccaatagcgtcactcttcatttttccccatcacacacattgtatattgtaaataaatattaatttatagaaccatttctataggtctagatagagagagagatgctatcttgagtttaaaaagaaagaaaaaaagatagagagacgctatcaaatcagaagaagaaaaaaaaaatggaaaaaaagagagatagggagatgataattggattttattcttagatgcacacagtttaaatagttgaaagttttagatgttgcgtagcaaattaagtaggcatccaacgaggcaacgacaaaactggtaaagctcattctgaggagactcactgtaggtcagaagttaaaattcaaatttgctcttcaatgatatttatgtaacaaaagagtaagctaagtttgttgaattattaatttcaattatgaaaataaaaaagtttgatcagcatttatcaaactcatatcttagtttcacctattttcaaaaacttcatactgtgaaattgcaaaaagcttatgtacaattttgatttgcctataggttttgtaatttatcgaatctgacaacacttaattttgaagatacactaattcgtgtagactctctatctatatgaagtagaatatttaataaaactttaattattgctttgttaaaaaaataaaaataaattatgattgctcgtccgcaaatatgaatccaaagctacatacggagaatgaagacatgcaaagtacatcaataggattaaaatacatacaaaattaaattatcgggataactacaatgttttactattcgctttataaaaaaatatttaggttattgtacgtaattcttttagccagggtcaataattttttcttgaagatctttcgagaaaaacatacacgtgataggctcctattcgttttctcgtcaaccaaatattctatcactgttttaaaaattccacgagccgcatcacaatgaacgtgatatgaacgtacggttagattcatctaacggtaacacatgaacgaccacgatcgataaaagtgagacccaacaaaaaaacttctctcaggtgtggcatgacgtcactattcgacgaaacaagacaattaaacagaaagggaaaaacaaaaataagtgaaagctgattggttgatgtctttctctgttgatatgccacgtgttatattttattttccttatgcgtgattgagtgttccataaccactttatttattccctcccttcgatagatctttttggaattttatattattttgtttttcttttcgaactttttgctcagccaatgagatttctccatatgttgggattcaaaagcccacgaagatttttagatgtgatgtaatcatcattattggctactgcagaatgggtatatctatcatgcgcacatagcatctcgccacttcttataatagcaccagttttatacatatatgaacgttcaatagcttcagatatgcaagtatataagttataacccaaagctatttttctttcaaactatataagatgagattgaccaatagtttagagactaaatacacgtgtcggtaatgaaatttcgaggatcttgtgcttataaggacacacattggattcttttttctatatatacagttatgtcactaactcattttttggtacatatgaatatttgtaggttatttgcataaaatccatatattatacaataatacagttaatggcttagtatcttttcaccaaatatacatacatacacacaaatatgtgtatactggttcatgaatgcataatagtgtccgaatacaattcatgtatctctcaagtctcaaccagatatatattgtatttatactcatagaacttcaaataggtttagatatgatgatcactctcttgcttggaatgcaaaaataaaagtttattttcagatataatttgttttttaatgatcatatgtgacattataggtgatatctttaaaacttgcaaaattagatctatgttataccgaactgagatataaatagataaaaaccaatacaaaagccaagcaatgacacaatgacatctttttattgatattgccaatcaatatttgacattatggtaatttttcaatctatatataaggttcgcaaacacacaaatttattctgaaagctagacttgattctcaagacttcccccacatatattagcattaaatacgtttctcttttatattacttattaacttcccaatatgcaaagtgagaaaaagtaattaaagtgtgagattatacaccttaaccacatgttgatcttaattaatcttaccctctatacctcaaagccaaagagttaaagctgcagtagtatccaacctccatgcaaatccaccaaactccatcttccacacatcacacggcaacgttttagtgtacttcgtttctcgccacgtgtattccattctcaccttacacgtaaaagttcggtagtcacaaaacgtcgccgtttggtcaaccaccaaccacactatcacctctcttccgaatccgccgtctccggttactatcctccggtaagcctcgttaaccatcaccacacggttcgaaccatccgatatgaaaccaggacacgtgtctttatctaaagcatatgtgagctcttcgtccgttaaccctaccgcatgggaaaccaagccactgttaacggactccaccgtcacccacgtctctaccggaacttgttgcaacgcgtcatcaccgccgttaaacttgagccacgtgtcggtattacaagtttcatctccgtttatcgtttccaccgttggatcgagattattatgatctaaactcaacggcgtagatctctccggtaagagctgtagcgtgacgatatcttcccgaccattctccggatctgttgagctagatctgaagccgttcgtctttgatcgacacgtggctttattattctttgaaaccctaacgtactttctcttcgtccttctcgtgctacttgtatctccgaccaatggttgaccagtagtcgtcggctttggagcgatcggacggtacttaagcatgagagtatcaacagaggtcttatcttgcgctttaccggcgcatcttagcgtccgccataactcatgatcttgatccatttctctctctctttttcctctatctctcttcagtctctctctcttttctatattctttctgtgtctctccggtggccgaagagattaacatttgggagtaggagaacgccacgtgtctagggcaaaaacatatacgagacacttgaatcagtgtgcgtctcatttatgtcatcgttactctagttttatgtctctttgcttctttgttttgtttgaactttttttattttccgataaaaggaggtatttaattaagcaagaaatttgtttgtcttcgcaaatcctacgtttttaaccaattacttgtgactattttttcaaacctaggatctgtttttcgtccattttatcagaataaaacgtcatttaccagtaaaataatgttcaattagagtaggtgttgatacgggatagatatacgggtcattgtagctcatcagattaattgtcggattagaattaaacatcttttagtccttaactgaagtagacgttctattaactgattaaggattacacaagccaacgattacaggtcatacgctgggtcataacattgacaaatataataaaacatttttgtcattgtgtgctatttatgggctgatatatattatgcatgtgtgtatatataagtttatataaattgaggagaaaatatatctcatatcaatatatatatttttagaagtactaaaatcccattgccacttttgatatcaattatataagtgatggtaactcatttgtatcattcgacgacggatgtaaatatagaaaataagtgatgctatccaccctttgattttagtgatatgagctagcttttgggagtagcctatctaacccatgctgcaaaacatcaaagccataatgtggactaatttaagtatatcggctttacatatgtgtgtatatatgttttttttaatgtttatttactttgcttgagttcattcatacatgcatgagtgatcatattcaaagaagccagcaatttttgaaacaatgttatatatttgtgacactaacatattgagtttatgcatggctgtttaagtaaatatatagaaaaattattaagaaacttaggaataactcttttataataaaactagtatatacagtattacaaaaatttgtttttattttattgaattttaatagatgtgaattttaactaattaaatagaaaatttagttgaatgtatataatatttacaaataactattcaattttatttataagaaaatacatatctcataatttatcttattataggtgtaacattatttgttcttaatagtcgtttaaatgtggtttattaattatatacatatacaatcttaattaattacatgctaaacaaaattgtacaagatggtatattggtattcagtccacttttatagctttattattcagttgtggctctaatcaaattttttttagttctttttcaatttatgcaatatagaaactgtacggaaaggagatggttcggttttgcatgatattttccagctataaatggcatggtagactacttagcagcaagtatttgtataaaatatgactgaaatcttctgaaatatctcgggctcgaatcctttaaacgagcattgagattcgagatatatcaactaagctctccatataaaggaaataaacaaatatgtatggtcgaagccgattaaaaagcaggcacacacaaacattaaattatactataggcaatgtgactttataacatatatctctctccacataggtctatatgataatttaattggatggttatccaaagcacccaaataattctgggaactgcgatgtgtgatctgattggcttattgctctttattaatatgagatttataagtatatgataaaattaggtgtatgggtcccatgatcaggctaaaacagcatctggtgttttttaccacatttcaagactcttgtatggtccttctttgtcctcccaaccaaccaaattgcatgaagtgtcctccatttcaaaattgaaaaaactggcatgtcagggcacatttggaaatatatacatgtgtatatattgtgtctctatttatggaagtgtaaagcaatgacccataaggtcttctcattgtcctatggtcggatctatgtacttatgtagctccggttctagggatgtgctctcattctatagctaaagtcatcttggtgtggttttgggtgtgttaatcatttaggttcggttagaacatttcacggaataaacctatcatttgcatttgatatctatgaaaaacatttcacggaataaacctatcatacgtatctttcattacctttacataatacatcacacaaaagcataagtattctttcaccttgtcatttttttttgggataaattctatcggtaaaaacatactgaaatacgctagagtggattcttttcacttgtcataaaacccaataaaaatcatatttattattttattattatttaagttcgtttcttaacataatacattaccactatctaatacctcatataaaattagatttaaaatcctataaacacacactaaattctgaaagaaataatgttaggttgtttaatttcttttttttgtttgtcaaatcagatatattgatataaaacaaggttacaaaatatataaacattataatacaattattatacgcaaatacaaaaatttgatacaattttgataaaggagtgaaagtaacccgacattacaagcaaataggcgttggtcatgatacataaatattttttaattataagaaaattactattattttaaaatcacaaattttaaactgtatattttcttaattaggcactgatgaacaattcgtgatacaatgtggaaacatgtctcaaatcgaaacccttatttgatatgttattaagatacctgctggggaggtgcctcatcccaaaataaactaaattaattaacattcatttaggtagaaaaattactataatgacatacttaatcatataattatacttttccttcataccaccaataaaagcagatcgctatctagctcttagacaagataatagcatagcttttaattttgataaagctgaatggtccttgtagataaagttaagagaagaatatgtttttttttttacaaaggcttgttttcattcattcacataaaaacaagtacaagaaggagtgattcaaagatcacaaagtttaaaacataattaaaggaggtattccccaaagccaaaacataatagaggcatttctctaagacacgaaaggaaatgcatagcattcaaaccgactcatattaaatcatctctcataaatgaaaaactacttccacttgagacactaaaggactcaccaatcaacatattaagaaagttactgtttcgtggcttgaaaatatgtagaaaagcttccaggacgatgtctcattcattaattttctgatgattccaaattcgttttccgaaccacaacttatgattgcaaaaacctaatgattcggcttgagttgagtcatgatgagaatttctcctgcttaattaaaattctgtttttaggtataagagattctattcagcaaagatattcaagatgagtaacagatattaaacataccatgaacattcacaaacctgtgggaattaatatatgaacttacctagcaaaagcgaacatgtaatttctcatttacattttcccgtactatgtaaaattgaaacacattttcaagtttaaggaagattataattttggagtcgatgtagtatcccgagagcatacgaaacatatgttgtattttcaaatttgcgcctctcgatattgaactacaataatgcatgttagattcaaagcagcctcgctttggaccctataaaatgagttaatgcaagccataataatttatcgatcgacatatttactaaacaagccagaatgtgatctcgatctcagcctgtgttaatctttttgtaattgaacattctggactaatgaactcttcactattgaaaaaaacaacaacacatagatcatttacacaaagtctccctttactaaatttcaagatttggtccatttattccaatgagaaatattccagatattttttttggctgttgactgtacggataggcccttaatgggcttttaatggattaaattaggcccatgatacttgaaaaatctgaaaggtgttgttgtgttgtgtgtgacagtccagtcgcgtcatccggagacatccattttctctggtagctgtttacttcttcttcttcttcttcttcttcttcctcctcctctgttcgtcaatcgccgatctcgttgcttcattttcctgtgagtattttctcgattcgacacatctcatatccgaatctgccatttcttcattcaattttgtttatttgttggaacttcggatctatatagagaatcgagttttctagggcttactcattgtttcgggtatatgtaatggctgagaatcttctctgtttgtatcagtgagatcgattggtacaagtgttcatccaatggttggaggaggagttatccggcagcttcttagaaggaaacttcattcccaatcagtcgtgagctttttccctgttacatctttttgattttctgctgtagcttaggatctgtttgaagatagaatcatatgatttgttttggttctgtctacaccttcattgctctgagagattgtccttgaagaattgtaactggaattgttgtggcgttggagattttgggatataagaaacttagacttattgatttgtgcttcgagagtatgattaatattcgatttcttttcagaaaaagtagtcttttgatttgttgagcatacaccttcttgtgtcttggcctttttttttgttttcttactgttgttctgtattatctaccaccataggcaactccggtattgtcatggttgtcttcgaagaaagcgaatgaagatgctgggtctgctggtttaagagcatttgctctcatgggtgctggtattaccggattattgagtttttctactgttgcatctgctgatgaggctgaacatggtctggagtgtcctaactacccttggccacatgagggcattctcagctcatatgaccatgcttcgtgagtgttcaagctacaattcaatcatcatagtgaaattgcaacactaaagttgaaaattagagaaatttgagactgctttactgacggttgatttgtaatgagcaggatccgtcgtggtcaccaagtttatcagcaagtttgtgcgtcttgccattcgatgtctctgatctcataccgagacttggtgggtgttgcctacacagaggaagaggcgaaggccatggcagctgaaatcgaggttgttgatggaccaaatgatgagggtgagatgttcacccgacctggtaaactcagtgatcggcttcctgaaccatactcaaatgaatcggctgctaggttcgccaatggaggagcgtatccaccggatctaagtcttgtaactaaggtttggtgctctttctctccatttgtatacaattagaaaattcatctactatgatctaagcaatttggctattttcttccaggcacgtcacaatggccaaaattatgtctttgctctgttgactggttatcgtgatcctcctgctggaatttcggtaaatttctctcctatttttgctttagacttgttattacaacttcaaattgttggaagttagaaataatcctgtgactaacgggtacagatcagagaggggctacactacaatccttatttccctggtggagcaatcgctatgccaaaaatgctcaacgatgaagctgtggaatatgaagatggaactcctgcaacagaagcacaggttagttttcctctgcttaagaaaataatttgcagaccataaagttttatcagatttgacctttcctctgagtcaattatataatctttaatttttctttttttaaaaaacatgatgcagatgggtaaagatgttgtatccttcttgtcctgggcagctgaaccagagatggaagagaggaaattggtaagtttcttagtttcatatattccatgttttaagctgtcgtttccatatgtacgagattgcaataggaatatcaatctggattctgattatttgattttcagattcagtttgagaaaattgttaccaaacttaaaccggcatagtatagattggttttggatgtagaaaaagtatcgccattttatccgtgttaagatttccttggttctgtcttctgtatagcgggatgaacacacctagttgcatagttgtgttgaacacacctagttgcatagttgtgttgaccacactactgcttgtttcttgaggctgctaatctcagaccaaaactattatcaaacatgaaccgtattgttactctgtattcaaaaccgtcatgttggttctaaaccgacccaaaaaaacccgctataccgagaatccaactctttgtgcttagatatctgttaacgttggttgtatgtgtgtgcagatggggttcaaatggatattcttactgtctttggctctgcttcaagctgcgtattacaggagactgaaatggtcagtactcaaatcccgtaagcttgttctcgacgttgttaactaatcccgtgaagatcaccttttctctgggtaataatcattaatcttgaaagggataaatggtgaatcccactttttgtctcaaaagacatgtttctttgtttattgtttagaaagtctaatgaggcaaagaagtaaagcttttttaacctcaagtcacacatgattttgagattatattatttctttttggtttgttgtctcctaaaccggactcggtttgtcttaataaaaatgtggttttacaatctctctcctatttgtatatcacaaaacatgattttgtaactattaaagttaaaaagttaaaatctgtggtctatttctgatagaccaaaactccacagaacaaccaatttacctctgttgcgaactcgattttgtaaaacttagaaaaatgtaggcaggatttagacccgttaatgtaaaaccagttccgttaagacattaccaaacaaaattgcacaatcctacagacaatgaaacaaacatgcaggatcggacaaaacctcaaaatacaagtccacacttttaattgtcccttggaatcaatatttataaaaatgtaatgagctcaaatttttataacctatgaaaagatcaaaatcttgattaaaaagaagaaaaaaaccaatcaaatcctggcaggcttctgcagaacagccgagagaaaaacctcagcatcagttttctctccaacaacccatttcaacttcttatacccaaacctctctatcaaacgcgtaagaactctcttcttctcatcattaccgcaatagaaattgtctaactagaacaatccaccgggtttcaagatccgatcaagatcaaacatcaagaactctagcttctcgggtttactactaaccgctaaatccaatccgttagaagcatgaatgagatcaaaaacattgtcatagaacgggaatctctaatccaaactccctctgaacaacggaaaaatccctcttgtagctatgaattcgctgaaaggagcatctatatttaatgtaataccgataatattcagattcttttcagccattctagcagcaaacgtgcctgatccgctgctaatatcgaatccgattcggattttcccatcgcctaaacccaaacatcatctatcaggaaatcagtcttcactttaaccttaacaaacctatctttctcatgaccagagctagatcaaagcaaccaacaaaatcccggctcagttaagacctttcaagcattcaaaacttttgcagccaagaccgctccagttaacactattgttactgaccgttctccacaaagaatcatgaaacagtgcgagacctggcttatgtactgttttagcttcaacttctacaggaagtttgtgcacaaggagcctatgatacaagtaacatctgcatgtcaaaaagatttgtagccacccatgttttcataggatagtgttatctgcatgtcaacttactgtattaacataaatggcattatgaaaactggtgtagtgtgaacttaacaacagctggtgttcagagattttcatcagaaccagggcatccaccagatgtacatcttcccaagattctcaagtgagactgcatcggcaatcaaccggcgagcctgaccttctaccggtagcggaacaccaacaaccacgccctgcagccgggcttcaatgctgcttatggcccgctgtaattgccaaatcatgtggttgtctcaagcaattagaaaaaaaagaaagggtaaatgaactgacatgaaagagaatcattaaatgattatgcaaacctgagcatgtgggttctgaacttctactccgcttgatttgtgtgactttgtccactccacaagaggatcatggatgaatgtctccaggatgctcatcaacgtctccctatgtgtcctcaacactgtgagagtgatttcacataccctcatgaagatgccctcatatccagtgatgcccaaaccatcaatcatgttctgtggtttggaaaataacaattcactattatgacaaacgaaaacaaaataccaacagaacacaaacaaacgattttgcagtttcttgcctgggtcaatctgaatggcaccaactcaggcttctccagttgtaagcctttgtcaaataagcaactgaagtctacatgaacacaatcacccgaagtagaatcaaagagaatattttctccatgacggtcaccaagcccaacaatgtgcccaaccatggaccaaactgctgtggtgtgagcataagctacacgtgacctaaaccaagcagctggttcagaaaacgttgtcaagaaccatttatggaaaaccggagggaacatagggaggattttggtcttcagcatctcatactcctttttaacagcacattgatcatatattcttttaatttgaggatttgttttctgccgatcaaacttcccacaggaaatgtatatatcttgtagaatatggcggagtccacgtgtatgtggaacccactcgaccagaccacagtcctcagtcagaggagctactgcgaaggtgcggatatatagcttccttcgtctgctttcgggatacttggatagtaagcggtttatcatcgcagtaaattccatcatccgagcatctttcctgagatcatccttgggcttgcagaggaatggatactcaataccatcatttcccagcagaatgatctgaatataaaaaatataatctattggacatgcatattgcaggactggttcttgaagataaactgatcttatgccatggtataatgcatattgggagacatataaaaggagatataagcagagagcagagcagaaaatcatatgaaattaggttgacagctttcaatccatgaaaaatggaaaagcataccttctttgggcgctgaagggaagaaagtatctcggcttcatcggctataccagaaatagttggtagatctgaaccagaaaagacactggcagagtgtcgttcattgttattcatatggaatgctggtaggctaatggtaagagattgttgaattggcatgatgatatccagcggcatcattcttttcaaggcactgaattcagttgctatattgataaccttggatcttggttgtcctccatggaagcatagtttaatgaaatgatcagtcaaactagcaaactgaatgaacaaattgtggcctctgtcactttggttaaaaccttttcgtgcaccttgtatgatttctgcagctgcttcccttctagcaggaacagtagattttgaaacagctgccataatccagagcccttgctgaggaaattgatgtagaacagaagtgatgatatttttaaccattagtactgtatccgcattctggtgacagattcgagaaaccaactggggcaacacagttaaccattgataggttggcagatcctttaagcagcccctcattaaactcattatctgccaaaagaaaagaaaaaattatatataaaatacgagaagtattaatagaataacagctatgagaaacaatccataatcaccaccttcatatgagtacttttcaattccttatttcccgctgagccacttgttttatagatagtaccaaagtcaaaccacagtgttaacaacctcggaagtgcttgaaagagattcttgtgtccactgtgaagtgccttagcatagaagtacattcccttaaacaggtaatcccaccctgctttctcagtgcttaagttcgacgagacagatccttttttactgcctgcagagctaaatacagagctctcttgttgacactttcttgcatcaacatatagttcatcataatacttagccaaatggaaatatcccttctcccagggcagcaattccttgacttgggtatacagatttaaaacatctttcttttgtttctgcccactgtgatggatccatttggaatacaaaagaagagtctttgcgacatcttttttttctttgaaagattgtgtgttacgaactgtgggctctggatttgggggagccatcagtaagctattgatcgaagaaattacagtggagtcaacaacaccctcaggcatattcaggagagattgttgtagctctataattgcactgtctgaacgcttagtgatccaaagaagtttcgccttttccatgtgaacattaggtgcaccagaagcctgagcttccaaaattgccctgtgagctgtctcatagtgtccagccaaacggcaaagctttgcatattgaagccaacagttcccaacttgagcaccaagaccagaggcaccaaagacgagtcttcggaaagctaagagaggttcccttgtccacagtgatgattgagtaaatctgagccgattctcccagttatctactgctttcgaaaacacctgatcacttgtactaaatgatttctccaaatatgaatccccattaagaaccgcctggaagtcctctagctctcttagcaagtgaagtttgacaacaaaaggataagctcgtgtgtaggagtccatgcctgctgcagctagaggagcaatgagagcttgtttggaaatagctattccctcagctacagagtattgatccttcttcatcattgcatggagaatctttgctacatctctatcgaatgaggcattgctgtctgagctactgaatagtaaaccttctgcatcagctccatcaagatactcatccatcaagtcccactttccgagtctccatgcagcttgtacaccttgtgtgcaccacgttttcttgtactcaggtactctggaaattagtccgtcaacatgagtgaccattgtctgatggtggcacatgttaagtaaacaattaagaacatctgaatgtcgttgaactgatgttggttccatctgaagggcttgttcacatgcagtaaaaacgtctgcccagttaccagatttcttgtttatcaacaactggtcttgcaaatttaatgatttgcttaaacttgcaaagcccgaaagaccgtctggctcgtcaaggcagctgtatattcccatcagagaagaaacatcagcattttcaaagatgccggtcttctcagctgcgggatttaaggagcctgactttccacgtacatgggattcaaggtacatcaatgacctggcataagcttgacacctgaaagatgccctagcaagggtcaccttgggaatagctagcaaaagttccaacacatatttacattgtacaagaagatgatcctgttctgttgttgagtttgaaacctggtctttcgatttgggtgctacttgcctaccacctgatgactgcagagacgatgagagtgctactccctgcttcacatcgtcaacccattgcccaaggttatcaagaagcgtgaaaacagcttgaacacaaacttcactctgaccaacaccaaaactgtttattgtcactccactattttctgatgcagcagcatcaagaacagaaaggatctcttcagaaatgctaagccgtgctgcctcagtcccatggcaaacaacatccagaactaaatatggtaagagataagtagctgtctgcatatcgtgacgcactatgcctcggcaagcagcaaatatgcttacacgggatccagttgcaaatgctgtcaatttccttatccagtaggatagccaccttctgaatgacatagaaggccgataaattggtccagctgatccagggtcagacacatttggaagctgaaaccttgaagtcaagcagggagctattagttctttaacatagtttgagaaccgatcccatagtttttgtcccctatccttcacttcattgttacctccacatcttctagaaccagatacattgacttgtacatgctcctggggggtcaacacaacaacattcccagctaatgatggctcacaaccagcaatctttagtagttcctgtatggcaagagcagctgagtcttgtattattgtatcctgtgcagctctaaaagctcttgccaagtgtttgtgaatgagctcaaagataagatcatcatctgagcattggattttaaaacgactgcatgaagcaactctcactttggcagggtcaatagcacctattgctccaagacaatctgcacagactaacttcaacctctggcccactgtagttcgagattcttctgcacacccctgtagtaaatatgtgattaaagagctcaagatctccatgtctgagacaagttcaccggcaatcagtgcagcaacatcttcatttctgttatacagcaatttgcttagctcacatgccaccatgtatctaacattcaggttctcgtgtttcataccatttacaatatcccgcaactgatccttcaggctcattaatccacgtgcttcttgaatagcattgtttaattctcctaaagatggtatgctaggtaagaggggaaactcacaaatatgctcttttactatatctctattcttcaaaacaagttcttcaagaattttcaccacttcatctaaatatacatggggaccttccttctctttctctaagaaggggatgagtgccgcaaaaatctgagaaatcacatactttatgctagatggcgatacatcagccaactttcttgtaaaaaaatgcaagaccaagagaccctcgctctgaagtgcatctttttcaatggcatgcataaggagaaccataagcttaggaacatatgtgctgagataatggcccatcatctcaatgagcagtttaatacgcttcagtgcttgtttttgaagaaaaatgtcatctgcatgaagcatttttctgtcaatactgttaaggagtccaacaaaatggttttgtaagaatccaggaagatcctcggcatttgttaaaacttttgagatcttctttattgcatcaggcagtctctgtagcctgcataagcaaaatagtgaaatcaaatgtcatacaaaacaaaaaagcatcaggacgttcagttatttttaaataatgatgaatgcattttcctctcacagctttaaaaaacaaacaacctctagcaatttctgttgacatgtaaatgtgaatgagcacaagaaagagcaaaacacacgcagagaaattctagttcttagagcaaataggtggcttgctccccaacagatacaactgaaccgaagaatttaccagaagaaaatttttagaaaactttcaggctatttccaactaccaatttctgctcaaaaagtacgaagctatgcgagtacataccgtctatctgtctcaggtgtatcagcaatgtccacaaagcatacaagctcatctaagagtgcaggtaatgcagcagcaaaaatttcttggttgtcagaaccaatctgtgagtgatacaattgcaaaactgagagcaaattcttgtcctcttcttgattcagagcaaatgcaagaactctgggtagccaatttactattagaggtaccacatctgtgtctattaacttggccagttcgttcaaggtattggctgcttgagcattttcctgccaatacaccaagagcttaggaagaacagcagggaccattttcctcacaagttcttcagtttcaacacccaaaacagcttctgcaaattctcttaccacatttggacggctggtcagcctgacagatagattatcaaacaactcattttgaatatgagaggctgtggaaagtagagttgcaaatccccctttcacgtggatgtagcatgaccgatttattaactttgacgcatttattcggacgatcaagtttggatgatcaagctgatcaatcagcaggaaaagacaaatcaagaaaagctcactggtaacatcaacagctaccataacttcagctgtcgtttccaatagagtctggataacaagaagatccttagctgctgctagagaatgctcaatcaaattaaaaaaatttctttcgcaacttttctccgtagcatcttcactaagaaacaaacagctcacaataggatgctgtacgaagataccaatctgagcacagaatgcttcccttacgtctgtatttacatgaactaatagatattgaaggcacctgatccattgagaccttgttcttaccagaatatctggggatgtgtggccaagaattctccttattacttctacgcaggctagctgagtctcttcagaagactcatcatagagaagattaaaatataaagattgaaggttaaagtaatcacgatgatgatccatcttcaatttcaccatctctggagtctctatgattctgaaatgcttttcatcttcgcgttcgataaatttatcacactttgaacatcggaacccttgaagtagagaattcagagtctcatctttctttaaatcttcatgtaggagtaaatggcatgcagttttctctgagtcagtagtacttgatccataaagacaagataagaagccaagtgactgaggaatggccttcttaatcatcaattccttttcttccaacaaatgcctatgaatgtaggacaaaaaaacagttaagctatgtctttaggagcacctttaaaaggaattttgagcaaaaacagcgatatgaacttagattatatgtcgtttttttctcatcaacttactccagcttggggaacatatgaagaagggcaccaagaccagagaaaagaactttgagtggcatagagatagcagcgacagcttgcacttgttcaaaatcatcagaaagagaccaactgaagatatcaaaatcactcccgtcttgtaaaccaagctttgtccatatccctacagataaacacttagactttactagagagctaggcgtcttaaacagcatgtagtgcgtccaaggaagcttcagcaagaattgtatggcaaccagatcattccctttacttgtatattcatactgtggatccacacctgcttaaaggggaatacagtaaaagatgataaatccaaaactgttatagagcaagcgatccaacacattatttggcatggaaaaacatgtcaagacttcatggacaaggagagttaccaacgagcagcagattgtgaattccttccaagtaaatggaaatatcgaacatgataggatttgtttcctcaacctacatacgaatctttcaaaaacaaaactggaaatgaaaacgctagtaaaagaactgggactggggagtttctggttacctgcccagctatccagggaatccaggcatacatctggttaaacaatcgatgagtcatgtcagtccagggacagaaacaaaatgcattggtgagcatgctaagtgccactattgaactttcagtctgtgacagactaggtccagcaggtggaggctttaaagattctacagttgaaataagcatctcacgcagactagcagcatcttttccatcagtctcatcggcaaattcaggagcaaagtaaacccctcgtcgaatatcatcaccaaccttctggcgctttcttttgtatgtactttcatcctcaatatgccttttttttccagcgttaattccctggacaggtctatcacttgttgctgatgtatgactaccacatttggttgtctcaactcgaacacacccaggtccaagaactataagaactgctttaaaacattctatcaactgaaaacaaggttctggaagatgaagcaactctagaaggcagtgtatcttccatatacaaggaggacaagatttcacaatccgcacatatgcactgcagagggaagcctacataaataaattcccgatatgatttcccataaagttgttgaaaaagcagcagcggaaagaaaataaaaagaactgatcagacactcattgaagtggagatgagaagaaacatccaaatataccttaagctcctcactttttgttctctgtaaagcatgagagagaaccaacactaaactttctgcagttagtttgacagcggcatcagaacagctggaatatactgccgtaaggaaacgtccaatggtagaatcataaatcgtattcctgtcatacaaacccagaatttaagttcaaagtgaaggtaaatctatattcttataccttcatatgagaagattcactgaacgagtggaaaaaaaaagtaacttaacacatttttttcccacacttaatgtgaggaaggtaaacaaagaagacccagtaaacgtaattaatattcacaatcatatcaaaataaaacaaaagagctgtgctttgacatgtgggaacacacctgtacacaggaagtccttcatctgcacttaaaaggaggatgattgactgtattaaggccacatgcgggaggatgttgaatgtaaggattgatccgacaagagtagcaaattcaaagcatgccttccatagaaaaatcagatgtcagattaatgtcccaaaaccatcacatcttcaaagaaaattaaatgcacctaaaccgatcagataaagcaaatcacaagctattgaacaactcaccatctgcacatctgcgccaccacagcatactagagaacaagccgccttaaaaaatgatgtatggatgagaccctggacgtagagtgtcccctcagttaggcatttacagatgagtttaagaatacaagtagcaaaaggttgccatcggttggctcccaataagttcaacacaagaccatcaccatctctgggcttattagcatctggcagatcacccccaattccagaaaaggacatacagaaacacctaaatggaatgtgagattcacaaacttccggttcaattgagtgcagtgatgcaataggttgcatatctggacacacaaaaaggcacgttagttcagtataagttgaagaatttggaaccattattaacattcagggagccagtttttcaagcaactatctccaacagtcttacactcaccttgaattgcctgcaaagcgtcatggaagaagatccggtatgccttccttgagttggaacgcagcaacattaagagagagccaacagtttcaagtaatactccatgcccaggactgcaattgattttaagcattagagcaaaactcttgaagagtgacccaaatgctagtgaaaacaacaacacttacacaaattctggttcagcaaagaagggaataatacgagcaatcacagggaggatagcagaaggggttccgtgatagaagactcctggaatgttccttgctgtgtgaccaacaagcttcagaacagctgtaacttccctcccgttgcctgtgaaattggaaaaagcaatcctaggttaacctaaatcaattccggcaaaatccaagctaagaatcatccaagggaacagaaacaagagacagttattaccgagagaaggaacaacgtaggtattcaatagattagggatgacagcacgaaatcgaatctctagagcatcttcgtctccggaagagtgacggaggttgttagccggagtggaggcggatgcggccacccgttcacgaagttcgtgaaccaagctcgacagattattgtcgtccttcgccatttcacaatcgcagaagctctctcgctccagtccccttccccttccctcccaatttttaaaagaaaataaaatgttaaaaaaaaaattaaaaaaaaacatatttgggaaaatatcatttaagggtttaactggtttttccgctacccgccgctaacgctgcatttgcgggtgattgcagttgctaacgttatatccaattacagaaaatgttttcaatcgctccggaccgtactacaccgctcgaaatcgcgaattccaagcataaactttgcacctagtgatttgaaacctcaaattttatgttgagtttcaatttaatctcgaattcttttactcggatttattgtttctttctcgtttgagccggaaaaaaaaccctgttagactggatttgtatcatgaacttgttcctctttgctagactactctgtaagctggcttattcggcacataaggaaaagaaggcagagctccatctcagagacaaattggctgaacatgaggaaatgttcatggagttataggatcacttaacgaaaaacttaacaatgcattgggagacatccgaagatcttataaagatcttacaaacaatcttacacacatacagcagaacaatcataattcatacaaaacctcaaaatacaaattcacactttcaattgtctcttgggatcaatagtaaaaaaatatgtaatgagctcaaaattttataacctatgaaaagatcaaaatcttgatttttcaaaaaaatatatatcaatcaaatccgggcaggcttttgcagaacagccgagagaaaaacctcagcatcagttttctctccaacaacccatttcaacttcttatacccaaacctctctatcaaacgcgtaagaactctcttcttctcatcgttaccgcaatagaaattgtctaaccagaacaatccaccgggtttcaagatccgatcaagatcaaacatcaagaactccagcttctcgggtttattactaaccgctaaatccaatccgttagatgcatgtatgagatcgaaaacattgtcgtagaacggtaatctctgatccaaactcatgaacaacggaaaaattcctctcgcagctatgaattcgctgaaaggagcatctatattcaatgtattactgattatattcacattcttttcagccattctagcagcaaacgtacctgatccactgctaatatcgaatcctattcggattttcccatcgcctaaatccaaaacatcatctatcaggaaatcagtcttcccattaaccttaacaaacctatctttctcatgactagtagctagatcaaagcaaccaacacaatcccggctcagtttcttacctttcaagcattcgaaacttttgcagccaagaccgctccagttaacactactgttaccaactggtctccacaaagaatcaggaaacaaagcgagacctggtttatgcaccgttttagccaaacatcgacggcgtggcaacggttcacaagcacggagaatcaacttctgagctaggctccaatcatcaggacatttttcaaagacattatacgacatatactgagataacaaatctagagacatttcacaggaatgtccaacagatgcaaccatttgtgtgataccagtacgagaatctttaccaagaggaagctgatgttgttgaaggaaaagtttaagctcttgtggaacttcttgttgcgagagatcgagagattcataaccaataatctgtttctccatctgagtgagtgtgtggtgggaggaatcgatttctctgaggatgagtgagagatgttgagaaaccaaagagacattgttggaatgaagagggtgtggcgtgtgggattgagaccgagacgagaaggcgtatagtgcaaagagatttgtagtgactatagagaaaagcataaggaggttgatagctgaagaaaaaagcgttgatcgcttgaatcttgcggttccatcgccaatcttcagcgatacagatcccatacttcaatgtagcttatattgcatcaattccaaatttgttccatattgttgaacctatgatcggatctgcaaatttcaaacatgaaacgaaagagcatcaaataggtttctgaaacaatgacaaaagagaagaactatcctgaggatccttgaaatttttgtacatacataaatagtccaataacagatgatcgaaacaatcaagagaagatctcaatttctgggatttagtaacgagtatcaacagatcttaccaaatcaaaaaagaggaatcacgatgaatataaaaagcaatatgagattaatagcatcgaaaaacaaagaaagaagagagacttacgagagatccagtgacctactctgattcagccgatgaacatatcgaaaagtatagaaaagtatagaaaagctactgagtgacgagtgacgagtgacgaggacagaatatcgccgacaaacgaataataaagtaatttattatattctctttttttttttttggcaaattatatttccattcaaatttataatttgatgttattttgatgtcatttaatcctacaacatataaatatattagttattttatacattatttttatatatagccatttaaaacatcctactatattatttgagaattatattttaaatataactttaatttttgtaagtaattacataagtatgccattagaaataaaattttaaaaattaaattaatttatctctttaaaaattaaaaaatcaaatactaatttaattaattaaattaattaaaaaacgaaaaacattattaatttccaaaaataatagccaatcaaaatcaacatataagatttgatatctaaattttaattaatttaatttaattagaaaaacgaaatacattattaatttccaaaaaagtaaccaattaaaatcaacaaactatatttggtatctaaattatcatattaatttttattaattattatagttcacttctcatctttatatgattctatttttacgaaaaaataatatcatcattataaaaaaataattagagtttttttcgcatatgccataatttgaatttttaaaaacgaatataaactgttcaatacatgaaataatattataacgggtgaaaaatagatttaagaaaactttctactgagtaacgggacataaatttgaaatatttatatttaatttcatacatattatattgaaaatttataatcttatatacgacaatagttaataacatattagatgtgattcaatttttaatacaagctggaaaatcctacaattgacgggtttagatcgatattaatacaagatggtatactacatgtgaaactcttaaattaacaatcaaactacaagtgtataatcttaaacaccaaacaatatagataatatcaacaaaacatatacagttcacagtttactatacatttaaaatcaaataaaataatatcatatatttttaaatcatctttacaataaaaaattttagtttaactaaaatataagcatacttgcggtatactgcagataatctctagattataggacttattggatctaaagacgggtcatcaaagatttcctaaactgaagcaaaatatactgaatattcaaatatctatctgttaccaaattataaacaaataagtcaatttaatattttatatatgtaatcaattaaatcttaatcacataaaattagaacaaaaaaagtattcaacaattaaaaaattatcaaatctctgtgttatataagttttgatactatatttgaataaagtgtaatatacctttttaatttgtattctttaactaatttaagctaactaatatatttgcttatcttatatctatcaaaaccgactatcgtttcttatctctatagtatttttgcaagacttttttggtggatttggataaaaatgcattcgggtcatatggtacattcccctattaaataaatatggtgcactcctatattattagctaaaatatttaaattataattcagagtcatatcattaataaaactaatattaataaaataaatgactttttggcaagacggatttggagggacgggtttttgaatcaacattaataaaaaagtaaaatataaataatccaccgttttaatatgggttaaatctttaatttattattttttaagaccactaatattaaacatatcaaatcatcctaatttagaaaaaattatataaaaccaaaaatgttatgtggtaggtataatgttactatatataaaattaaactataaaatataaatgtattagagaatgatacaattggcaaaacttttatatataaaaaataattctaagattttaaaaattactactttaaaaaaaaatcatgggacgggtaaagaaattacagaacgtgttttattttagaattgagttatatggtggatgtatttgaatcaatatttataaaattttaaaatattattaatatgctgttttaataggggtcaaaacttcagtttttttaacaattgtcttatgaattcgtggtatagcgttacttaataacaattataaactgtaaaatataaatatattgtaaaaataaaatttgcaagttttaatatatattacttttaaaaataaatcgttccgcggtataccgcgggttaaaatctagtcctactatattatttgggaagtccaatttaaaatataaccttaactttctaactaattacatgacaacgtcattaaaaaaatctaatcaagaacaaaatcgtttcacgtcattaaaattagcaaagtcatttaataataatatccatctcttaattatgaggcttattggatctaaatacggatcacatgccaattaccgaatagtcatatcataaataagattaataaaataaattgctttttggcaaaacggatttgaagggatagatttttgattcaatattaataaaaacttaaaatatcattaatctaccgctttaatacgggttaaatttttaatttattattttttaagaccaccaatattagacatatcaaaattatttttttagaaaaaattgtataaaaccaaaaatgttatgtggtataatgttattatatataaagttaaactataaaatataaatgacttagagaataatacaacttgtatacttttatatataataaataattattaaattttagaaattaatatttttaaaaaacaaattacgagacggataaaaaaattacagaataaattatattttggattttgaaatggtgttatatgatgaatatgtttgaatcaatattttataaatacatatattttgcaaattttgatatatactactttaaaaaaaaaaatcatcccgcaatataccgcgagttaaaatctagtgaactaaatatttataaacgtttgaaatatataaattcgttgatcaaaatagatgtagcgttatcagtccttaacgaaactctggcacccgttatcacatgttaacaattctgctagtcgttaaaacaatctatagcatggctaaggactctttaaaaacttaaaaacttgataagacacatatactttagatcgtcaattattcttactaaaaattaacttaaaagaaaaactaaaaatagctattttgttagaagatactaaaagctaacaacattaatctgaaacctaactgaagaaatctgaggaaaatcttaagtgaagaaaatatccatttttcaacaagctttttgtggtctggaaacacgcatgagaaaaacatcactatatggatgattttgcttcacttccacgtatcctttggtcttcaacacctgcaaaatcaaattcagagagtttctccatcttaagtctttcatggagacagataaaacggtgaagacatgtgcttgtaaaaaaattgagaaataccaaagtctcgtagaagagtcttgcgctttccttctgagttcttcctctacacagttgcaacaaactcaccttctcttcttcttctctttccctctgttccaaaaacgtcttttccaagaatttcgccacattcctgtacaatccagcgtcagaaaaccaggataatcatctgaatgtaagcgaatcgaagctgttgataccgaaagtgtgagtctgttaccttgttcttgaggaccatgtctctgcaaatcaaaatatacatggtaaggacgcagcacgatgatcgacatgcaacaagaacaatttgataagatttggattccaaataagttgcgtatatttcgatggttgaaactttcactcaaagctacatataatttcagaaacttaatagattcttgtctactaaatcaataaaagcctgagcactcatgagacctacaaaaattcagaatgcgttttaccttgttgtaagtcctgtctttcatctgcattcacctgctgaagcagaaacaaaaaaaaaaaatgctcagtcttgcaattaaataagataggctaaaagaactataaaaacctttttaactactatcagaaggatgcaacacagcagtacctcatcgttcattaaaatcgtatcaagatctctattttccacataatacacagacgggtgctcctcaaaggaagtgaagggacttgcaggtctggattttttataacaggtcccagggtccttgaaaaatcttttcgacattgattccctcaccggcgtttcaggtgcaatctctacttgctcagagactactggtgtttctggagcaatcactgtttgctctgatgtcctcacgggtgtttctggagcaataactgaaggcttcacaggtgtctctgcggcattttctgtttgatgagcagttccagaagttgtagaacttgctcccatctcaaccgaaaccacgttactatttccggctgtcactttcagcccagcgagagcagcagcctgaggagtctccataatttcttgagtattctcagtctgatctgaagataaaataaccccaggagatctgacagtgtcaagagaagacttttccttatgtctagcgattttagtatctttaggggttcctgtggttgcccagtttttaagcttgatgggttgacaaaaaagcgactggaggtccgaagaaccatctgcgggattacaacaatcagcaaacacaacaatacaatacgatatacagcggattaccaggttttacttacactgaatcaaaggttccaaaaaacttcgaaaaggattggcaaaacgtttggttctcctctcaggacagtcagtatgaggtacgtttctccgttttgcaagcaatttacttgagtcctctatcatttccttcataactctacaataacaaaagaaccaaatattacatacttgtacggaactctgcagacgaatctaatccaggttacaaatagttctcttacttgttcggaattatcacttcatcatctatcagacattttcttttccgtgaaactcgagaagactccttcgcagccggcgtagggatgatcgagaactgtggacttgttccccctgtaattcaaagtataggttaacacgctaaaaacgtaactaaaagtatattaagctcatatttcaataaagtgtgcaccttcagaaattttcaaccgggaaggtgttttgggagtgacagtaactggagtatctgttgcattaaattcgctactagggtctttagaaacagtcatgtcagagagaaaacctttctcggaaccatggagattcacttcagaagtttcagattgctctttatgagacccatgaaacaattcaaagtctgccatttccgcttcattatggtctcgacatttttctacgccttcttgcaagtctctggaaccagtcacagatactggttctggtttttctagagtactcatctcagggatctccttctccccattaattcttgtggcaccagaaggttgatcctcaatcccatgaattgcttcaggtattccgcattcagatgggagggacctgtcatgctgcatctcttcgcaacttgttttcttcgaggttttctccgattctaaattctctgtgtgaccatctctgtgtagattatctcctgaggattcatgagaatccactagtctctgcacaatggtacatatggtttctctaactgtatcttcttcttgagctattcggatatcttcggacatttgcggttccagaagaatgtcatctgattctggatcctctctatgcctagatgcattttgatgatctctggatggttcattagaatccagtggttccgcttcaacgactctgacggatgcttcttcagtggtatctctgacattttctgcatccaattccatatcatgagcaaaactctcactgcaacaacaaacagaaaattaggattgtgtttgccgattacatgtatggaaccaaaaatatcagactcactgtttattttcattatgattggtagagaaagtctcatgaaacgtaaacagaaggtcctcttccatgtcaaactgcaactccacaaagcattatctttattacatatatagattcacgaaattaccagaattaaaaggaatggaacgaagaaacaatgtcaatatacgctgtagtagcttagaacctaacagttacacactcagtaatctataaggtgagaaaccataccctttccatcgaatacatgtccatgcgctctgtttcctgacttccatctgttttatcgcagtgcagtggtattagtaaatgaacagtgatgagattccctttaaacgactttagtgataagatacctttaagtgtaatatcttcatgcggcttaacatttcccctgagaaagaagaaacaaaagagttgagactatgaaagaatctctgcgaaatacattctatatagaaataacaagcatacccatgaaaatcctccagaaccccaagatcaaaagcatctagttcaaatctctcaggtaaagcaatggaaaaacactcgatagatgcaggcaatgatacacctgtcttttctctgttcctttccttagccacaaactcctttacaccgatcaacgctttattgcaatcatcgaacaaaaagtcaaccttcttggaatatatccttacaacaccaagaagaagatacgccaaaactctgtatgtcaacgcatctaactctttttgcaagatttgatctgtgcatccaaaaaaaaaacccccgaagaattacacatcagaaacgtcattaaagtaaaaaatactgaaaatgtcaaatgttgtagaaaaaaagtccatctttctcgaggatacaagtactttagagatcaagcaaactaagcgttgaccagcagctttctgatactaagtgagtaagatgaaatgtttagatttaagtttatatgagaaaaggcagattgatactactaaggattcgatactattcagacttaaaataaatcactgaactcaatctctgaggttcactcaggcattttgtcaaacaactgatgaacataaacaagtaacattgaaagaccccaacaaaatcaacagtgatctctaattaacgctgccaatggatacaaacgaaaccctaaaattctattccagctaaaaaatccactaaagctgcaaagtttcactcaaacaatcacttttccaatcgccggagaaaaatctctaactagaacagagagaagaagaagaagaatgtgaaggaggagaaagacaaaccaacggaagaaggaatatgagtagctttgacttgagatttcttaagctttttgaagaaataggcagcgacccaaatagctcctaaaggtccttttctcgatactagacaatgcgagtaaaacatttttgagtgtgaaggtttaccagattctgggttttagacaaaggttagttttttttaagagagcagcgagagagagagagagagcgagcaacttcgtaaaatagtgaagcgagggagagaagaaattgaggagaaggaaacggtcaagcggtgtacggaacaagcttcttactaaaccgattaactttttttcttttaattttaattttagtttttttttttcttgttaagtcacgcttaatctgtttattttcaagtcgttttagagtaattaaactttttaaagtctattgacaagttatgtagttttggaaattgaaaatgttttgaattaggtgtcataaatttaaattttcctaattagacggtgaccagaaaatcacaccttcttaattatgcatttttttttaattgatacttccttctctgttgatcaaaaaaaaaaaaaaaaaaccttctcctttttaattgtgcaatttcctatttttccataagaatagaaaaaataattttggagggagtgatagtctgatagtattagataatttataatttatttaattaattttggataaacaaaatatatatatatatatacaagttaattttttgaataggaaaaaaaaaaacattgctgttaaaaattaatcaacgaagataacaattgaattgaaatatgctaatgctgattattgacttcatatttatatttaccttttctaaattctacagaaaaagaagtaaataaataatataatactaccacactaaaagataacgactagtttgatggaaatgtgagctgtctcactccttcacgcatcgttaagagcgtttaaacgtttataactgcgcacagtcattttgtataacacgtgtccggttaaaagtctacgtggcgtttaagtgacagcgacatctcatagaccattggtccgacgtggcattacgttgcgaatgggcctgaatagaataaaattatgcccaataaaaagtctctcgacctaactcttaaaagcccaataatttgatcaattcttatataagggcctgactggtttaaatacagcgggtgcggttacggttgcgcaagtttgcggaaacggccggttgcggttttaagcgttatcaagccttttaaacgactggttaagcgtttgataatgggtgcgttttcgggagttttatgaccggtaaaccagcaagtgtgatagtaattaaataaaaaaccaaaataaatataatatattactattaaaagaaagaaaaatacaatatattattatgataaattgataatattagaaaaattaaacatgcttaataattaaaaccataaataaaacattaaatttaaaataaataaattttgtaagaaaaagtttaatactttatgcatttggtacataccaaaaattgcatcaagtagtgtgataaactataaataacgttgaactcgcgggttttccggattgcctctatacatatgataaagtttcttcaagatatccaaacgatttttaacacatctccaactcaaatttttcccaaactggtcgttaatattcttaagaatattttctttttgaacatcacttagaaatctgattttgggatctttggaatcttccgttaaatattgattaggttttttttaataagaataagatatatagggtttgggtagaagacataattattttaattaattaaaaaaaaaaaataacctaactgctaccgcccgcaaccgcaaatgcttgcgggaatgagcttttgaaatctggcgattttgaacggtgtaaagcagtatctagcggtttctatgattgatgtcaatcgctaacaatcgctagcacccgcaaatacagcgtttgcgagtgacaaagggaaaaccaattaaaccctaagtaattgtctttgtctttgatattcctttcttctgacccaattaagacaaaaccctctacacacttttctctttcgaagacaaagatgaactgcattaataattcaacgagcccaaacaggcccaatggcccaatacggtccatcgactaaatatatcagaccctagttcccaagaaatgtccccgaggaagaagatgatgatgcgaaacatgaatgctcaggtaaaacatgaccagtaccgtgcaacaactttccccataatttgcttgtcgtgttgtgtagatgtcaagtgttttgctaaatctaagaaaacttgcagtgtgatacagagacatataatcaaatatgtagtcagcggtgttaaaaacagaatctgtcaaaccgtcttcttcaaatccacggaatgagaagcttgattaatgagatgctcccaaccatacccaaatattaatcagacattcattattgtctctagaggttaatgtctttgagtgtttttaggtgttcctagaacacaatttatgggaagatccagctgcatctccatctcctaatttggagtgaaagagcctagtctttcacaccaattttgagtttcaaatatatgtgcataaatgaatgaagatgcaaggtttggatttcgtttttatgactcttgtctaatcttacgtttgaggtaggtgagcaaagatgctatcacagcaaaaaatgctaaattactagattcaaattacgaatctaccctctgcatagctccgagagtgatgtgattccccttgaaagcatcaaagggttagtaaccttttctagagagtgccctttcgtcgtcagaaaaacgtaagcaaaaatgctacaaattaaaaagtgtctccaacatgtgcatattcacacacaagttggtgtcaacgctcagacaagaaaggcgtgtgttcattgttgaatcttcccatttcctcatccaaattccgacataactatcctagccgccatttgttctccacattacaaaaccctcagcagcttcaaaactcttccgatctctccctcacgctcgcaattctctcgtctccattttaatagtttttcttctcggaatcacaaatcttcggcttcttgttccttggtgagtttataatctatcttttgctctgcttcgatacttcaaagtctgttccttttgtctctctgagttcggtttttagttgtgttttatttcgacttctgttttagcgctttttctgaatctgatattgaactctttatcagaattaaggacccagatcatagttaggctcttcaattatatctgggttttgtgccaattgaagaaatcagtgaataatttttgtcaaattaaaatctgggtttggtcctacttgttgctccttgatgaatccttctcttgtagtaatcatatgatttactaactatagtttctgagtttaatatatgttacgatgatgttgatgatgttgctgttatgatgatgtggatgatttgatggtgttgatgttattaatgatgaggctaatgatggatacgaatcttgtacaggcgtgtgtgtgtgttgttgaatggctcttgttcagcggattccaatttcctcctccagtattcggaattggcaacaagcgaggaccaatttgactcctatttgttgtttacattacaatactgcatcttcttcttcttcaccctttacagagaagcactctgtggagagataccaaagggatcaatggctgtacaaagcggttgaaccaacgccaccatcgactccatctccatcgccatttgaagatgaagtctttgttagggaaaacgacattgcatcgcagctgcctgagctgaagaagcttttggcagtgctgaaagagaagagagttaaaggatgcaaaggtggtgattgtggaccaggagatgtgtatcttgttgggacagggccaggagatcctgagcttttgactcttaaagctgtcagagttattcaaagtgccgatcttttgctttacgacaggcttgtctccaatgatgtcttggagttggttgctcctgatgctagacttctttatgtcggcaaaactgctggttatcatagcagaactcaggtaatgcctaagttcttgttttgattgcttagccggatcgttttgttatggataagaccattgttttataaagtggtttcttaagccttttgatgttgttgcaggaagagattcatgaactactcctaaattttgctgaagctggtgccactgttgtcaggcttaaaggtggagatcctctggtaagcttatatctgcttctcatactcttcctaatttcgtatatggctcctgtttaaatgtgtttgcaactatttggatatttcaggtctttggacggggcggcgaagaaatggactttctgcaacagcaagggattcgagttcaagttataccaggtaatgtttgtttgttatcatgctgtacattcatcattctactccagtttacgcatatgattgtggcctcttgtgatctcgtgctgctgaaactttattttatcgaagtttgcgattatgattgcagggataactgcggcgtcggggatagcagcagagttggggattccactaacacatcgaggtgttgcaactagtgtaaggtttctcactggtcattcaaggaaaggagggacagaccctctgtttgttgcagagaatgcagctgacccggatacaacacttgtcgtttatatgggtttgggaactttaccttctcttgcacaaaaactaatggaccatggtctcccttctgatacaccagctgttgcggttgaacgtggaaccactcctctacagcgtacagtaagcaaccaaaccgtagtctcttcatacgaaccaactctcaagagggggtatgttaacttgagtttttaaggcttttgggatattgtgcaggtttttgctgagcttaaagattttgcaactgagattcagtcagctggattggtgtcaccaacactcatcatcatagggaaagtcgttgagctctcacctttatggccacattgcacgaaagaatcctcctgccttgtagagacccggtagatatttcactcttattttacgggcgtgtggcttccatcgacattacggtgaagttttaggagctatggagctatgaaggttgagacttgagagatgtaataaacaaaaaggaaagctgatagtttcttatgacgtgtccttcaattgttttgggacaatggtaatggcaatgttaatgtaataaacaagtttcaatcagtgccactgtgactaatttttccaccacaagatgatgtctttaaaactttaatagtcaaattcaaattaaagttacaagatgatgtcttgataccctcatgatgctctccaaacttgtatgcttctttcttcttttgaaagtgagcgtgtctactgttgttagaaccttattcttcatttgatgcatgtgtctatgtacatgagtcttccatgtctttagatgaacaagggattttggcagggctacttttgagctgatatttgcatttgacgaggtcatatctcttgggcacaaggaaagtgtgacaagtgtccaggtgaagcagtattgtgaaatggagaagttgcattaagtggttgtgcaaaagaaatggttttgatggtttgagcagatccattggttttgtaaatggttctgcgtttggcattagttaggcctcaaattctgtaccgttctcttttaacccaagagagttagtttattggattctgtttactgttgatttcaatgaataaaagaattttgttctctttggagattcctatgtttgatcttacatacttttctctactaccttctagctccatcgtcacgttgttggacttagaactagtaacaatgttgaattcggagattttaacttattgatggacctaacaaatcccctaaacaagatacgaaactgagaagaggtttttggcgacttatagcataatctctacaatctagctttaccctttgatctacaagcaacataacctaaagtatatgcacatacataatccttttaacccctcaaattaaactacgttgaaaatttcaaaatcgaaagcaatcttagactcttaaatttaatttggtatttccattcaatgattttactaattttgaggcatgttgaaattttgtgttatttaatcaatgagtttggaagaagaaaaaaaaaatcagatttctctagtcaaaatattataaaaattaaattactatcaacatattttaaaagatttttaagaattatttaaaagctattgacaaaaaaaaaacatattttaaaagataaaacaaatttcatatttccagaaaatgcttgtaaataacttaactgcatttcttttatcattttcacattcaaaacaaagtaaaaagtaaaaagtaattactaccaaaacaatctaagtttcaataaaggaagatagtatttactaataatagtcaacgttatggacttgttgaatatagcggccacgtcgtctcagaaggcaaaaacagcacgagaccaacgcgaagtgaaacaaacgacatcgtgtattttatctcccgaatgagccacgtggatgactgagtgggctccacaatatcttcatgggacccacaacgcttctccgactaagttacacgaatcatcggccggccaatatcttcaactgcgtgcgaggcaatacgtgtcaaaatcaaaatctgtaaaaaacttgcgttttaattggtagattcgaatttgaaacgtgcgcgtcaatgagtttaaaagctcgtgagatcgcccactatgataagccacgactcgtttccgatgaataattcgccggtgacggcggaggagaacggtggtgttacggaaaaatccatacaggagaacggtggtgttacggaaaaatccatttttttgtctccttctactaagaaaatatctggtatcaatcttctctgtatgagaaatctctggtaaattatgtgttatataaaaacgtacgtatatatatgagtttattcatactttaccttcagaatcgccggtaaaggagaatttagctccggtggctactccgaagacggtggataatggtttaagtgctcaagtgaaatctcggtggtcgttttcttcttctaagagaagctttggtacttgtttcataatctttttttttgttgttttcaatttccttttatggtaatctgattataaagaatatttttgttttctttgatggtgtgaaaatatcataattgagctctttgtactttgtagtaagataatatcctgaattcttagcgttaatttcattgattttgtttccattaatagattcgaagaacgaattttctttatattaaaatcataatcatatcatcgtcttaactggatttatctaatcattggcttttcttctcgtcaaaatagagagatttagctttttccaaaatagatttcttccactaatcaatggctgcttaattaatgattcaaaccctcaagaacagtgatattttttttgcttttttaattttattatttgggtttcattccggttttaatttatgagttctagaaaacttaaattttattgcccggtgaattggagagttcatagtgaagtaagatttgtgttttgaggttagagatttaaagagtggtttcttacacttgagttgtgtttatttcttttttatgattctatgaagtcctgaaatgtgtgaatattgttccaatgtgacaggaagtagtaaagatgaaacctattttgattcacatcaatggcaacaatctgattctgaagacgatttctatagcgttcgtggcggtttgttacattttattacaccctgatataagtttggttaataacttttatgtgatcaactcaagatttgagattgtttatgtagatttcactccatcagttggaaacactccaaggtgtagtatctcagagaagcttcctcgtattcacagccctttatttgaaggagagaaacctcgagtatcgttttcgcattctcctgcaccgcggagaaagaaactaggcgaactatttagagatagtataagagaagaacgagcagtaattttagaagagtcatcggaataccaaagtgaaaaaagtaaaaaatcatcatgtgataattcgggtgagctcaaagtcattgaagaatctgtaaaagagaagaagaatcttaaatctcctctgaattatcaccatcgttgtcttccgagattctcgtcttttaaaggaagtttaatggacaagagaaagaagaagaagaagaaaattcatgtgaaatgagattgaaagtttggatgtttgcattataaaaatctggaaactttcagcatagtaattttacaggttatttactgactgatgtgatgaaaaacataaacgatatagatgaagagaaaactttttaccactttctaaaaagttatttagatcgttgtatttccccaacagaatttctggttctattacaactactggttcaagtttctagttccttctaaactgtgtgtttcgtaatggctttaatattttttatttgggcttccaaatattgggccattggctctgtaaaacttttttttctgatgctttatataataagacaataatgcttaattgttttagaaaaaatcaaaatataacatgcttaattgattaacattattatataatttattattttgtattttttgaatataaaaaccttttctatatacatatataatttagtgtacaatttcaggatttaatatgtggtatgacaggcagaatctttttttagtagtatagacaataatgttagattttacaaatttttttttgtattaaagttaataattgtgtataagtacaattaaaaaaaaaattgatgctgataaaatattcaaataagatttaaaccgtattactacttttggttgatgatattataaatttgtattaatattgatccaaacccgttccaccatataactctcgtgaaatattactttttataagtttaaatattaataatgtttataaagtttaaatagttcaataatatatttcaaaaattaatatgtttttgccttttacgtaatgacattttttgtaattcttactaaaacaaaataactctataaaatgtaattcaattttttaatgtagataatgttaaaatttataaataaatatttagtttaatcataatttatgattgatatgtatttgagtttttggactacctttcacgtcatttaatagcctacattgggtagttttgtaacattctttgaaataataatattatcttaatctatatatacatttttgcagtcattttagcaaataaatcttatagttggacttatttacaacccaatgccattagcattaaatctttttccaaaataattaattttactttaaatttttaatttaaattgtcaattacattatcaatcaaatttaatccaaacaaacttcacatcaatcccttaaaattagcataaacgtattttattaacaatattttaaaacaaagttttttgtttaaataaatattgttcttactaaacgttttttgtttaaataaacaaatcatgtatttgaacttatttacaatatcatgctacttacattaattatttaggcataaaaatatttatataagatttaaatcttctaaattcttgcttttagagttattatatcattacctaaaaggcaaaaaatattatttttttgaatattattatttgtatatttaaacttcataaaacattatcaatatttgaaattatcaaaagtttaatatatcaaaaaaattaacatcattatataatatatagagtttaaaaaaatctcaaaaaaaatttcgtcatattttgtgattcgaaattttaagaatgaacatatattaaccaattggcaaaaaatgtgtggattcaacgtcccgcaacgactaaaatattttgacaatgattcataaacatattataaagaagatcaacattaataaaataaatagtttttttttttgtggacgggtttggcaggacgttacttagtaacaatggtaaactataaaataatttacaaatttttatatatattaattttagaaaatgaattgtcttcatggtgtaccgcgggttaaaatctagtacatgtacattttactaactgaaaatatgagattgattctttatattacactgataatgaatgattcaaaactaaagatcagagtgtaatatagtttagcttagaaaataattaaaacaattttattatttatttagtttcctaaattttagtttagattcagaaaataattgtttaacttctttagaagatgataaacatatatggaagatttgaatctctattcatatatatttaaaaaatcaataatgtcaatataattaaaggatagtttagaagaaattttcttgaattctaaataattaatttgtatttttaaacaaatattaaatactgtaaaaacgaaatattaaataaatatggaaagaaaatcctgccttaaaagattttgtattattgaaaccgatttttttttacagcaaatttaaaccaaaaattaataaatacttaaaagagatcttaggaatgattttgtttgaagtaatgatttagtcgcaaactctagcaactaatcaactcctaaatcataaaaaccccaaaatatgcgtttttctttaaataactataattgtaattatctttaaaaatgtaacttttaaaattataaataatgtttaagataattataattgaaaatttcaataaaagcattttagagcagaattttgttttatccacttttggactattttgatctcatatacattttcctataacaagtgtagctttgttgattggtataaaatggaagtaaaaaagtggaatattccttattatgtcttttattttcacaagcccaatacagtttctacgaaatgtatatctatttatccaccaaaaaaaaaatgtatatctattttatttgtttcttatttaattagcatcaccacaatttggtgcaataaagagtatcaaattatcaaaacataaaataaataaatttataagccaaatattaaaataaaatctaatataataagatttgttcctatcccaaatcctaaatgtaagtacaacacattatttataataaacaagacagaggtctgatatttgcgttgaacagaatcgttgtcacttgttcagtcttcactacggagctgttttttttcgattcgccggaaaaatcataaaatccaaatctacaaccacctttttatcgcaatccaatgccggaagattcttcttctttagactacgcgatggagaaggcatcagggcctcacttctccggtcttcgcttcgacggccttctctcttcttctccacccaattcctccgtcgtctcttcactccgatcagctgtttcttcttcttctccgtcttcttccgatcccgaagcgcctaagcagcccttcattatcggtgatttctcaaaccccatttcgctctagcgttgtttaggttttatcaaatttgggaaattgggttctgtctctcttgatttcgagagtttcttctgcattaacttcgttggaatctagggttttgatgatagaacctctgagtatggtagcattttttgtgctcctgagatttaacagaactaatttggtttcaattgtattaaagtatcgtttttttttttttttgacgttttgtttgatttgaccttttgacaggggtttctggtggtacggcttctggtaagaccacggtctgtgacatgataatccagcaacttcatgaccatcgtgtcgttttagttaatcaggtttgattctattgcttcaatcttgttctcaatgtcccactttattctgtatgagattcacatcttataatgtttgatatcttttgttgattaggattccttttatcgtggtttgacatctgaggagttgcagcgtgtgcaagagtataactttgatcatcctggtaaactaacttaatcgtttttcttgaattttcttctcactgcttgcttgtattttggttttaagtacactgcggttcagctgacagcagcatttggtattcttttgcagatgcgtttgacactgagcagcttttgcattgtgctgagactctcaagagcgggcaaccctatcaagttccaatctatgactttaagactcatcaacgtagatctgatactttccgccaggtgcttactcttatgtccaagaccattattgtggttcttgtgctcatgtgatttgaatctcttatttatgtgttcctattttaacttaatgggcatattagcatatattcattccctttaaacttaatatctgttgggagcctctgtcaggtcaatgcttctgatgtaataatattggaagggattctagttttccatgactcacgagttcggaatctgatgaatatgaagatctttgttgatacaggtatcaaccgctatgcctttttgtttccccaaaacatgcatatgtcttgcgctactcatcctttttcactctttggataaccttattagttttgtatacctggaaatgatattttgtaatcaaagttgtctatctccttggaatctttttcacttctctctagtcctcaacataagctattaaatggtttcagatgctgatgtaaggcttgctcgcagaattaggcgtgacacagttgagaggggtagggatgtcaattctgtgcttgaacaggtcagtcctcttttcgatttatgctgtaggatttgtaagcataggttcatctaacctagttaggtagctttattttgtgtgtgtatatgagacatgagtaaatacatggaaattctgctctagggaacatctcattgtgtctcttctctggtttcttcttccttttctgcttcctactgttgtttttttactagataactctatatgttcttattccatcctttgagatgctcctctgtaaaacatctcttttatcttctgagcttcccatgtgcctaatttgttttctgaggatgttatgttcgtttacagtatgcaaagtttgtgaagccggcatttgatgacttcgtgctcccttcaaagaaatatgctgacgtgatcattcctcgaggaggtgataatcacgttgcagtcgatttgattacgcaacatatccacacaaaacttgggcagcatgatctctgcaaaatctacccaaatgtttatgttatccagtcaacatttcaggtattttctcactcttgctctctttgatacttgatttagatggtaagtgttatcgatggtctcactataggatcatgattgcagataagaggcatgcatacacttattcgggaaaaggacatatcaaagcatgactttgtgttttattcagatagactcattcgtctggtatatctctcccttatgtcttctctttcaacgtcactcacttttcaggctttcttattttaactaatatcagttcaatttcaggtcgtggagcatggtcttggtcatttgccattcactgagaaacaagtagttactccaacaggtatgagaagagaatgcatgagctgtaacaatactgtatacacttttttatataacttggtcatcagatgtccgtctccttcacgtcaatctagttagagttagcttattcaactcatttaaacttatcttttccacaccaggagctgtatataccggtgttgatttctgcaagaaactttgtggggtctcaattattagaaggtgagcctttgaaaggtattgtatttggttaagtttgatatgataagatgcttattcttccaactgttttacatcatgcaaggcataaatttacttgtttgcgattaaattatctctcctacgtggtttctgttttgtatgtttttcctagtggtgaaagcatggaaaatgcattacgcgcttgctgcaaaggaattaaaatagggaagattctcatccaccgtgatggcgataatggaaaacaggtcttcctattaatattttgctctgtttttaaaagtatcaagtataatctctttttataaacacgaattttgaagtttctcttgtcgtgataatcagcttatttatgagaagcttcctcacgacatatctgaacgccatgtcctgcttctagatcctgtcttagccacaggtactctgtctctctacgctgtatatttcgattttggtcctttttgatggatttttggttctcgaaattcatatctcgtgatattgcttcttcttgaaggtaactcggctaatcaagccattgaactactcatacagaaaggtgttcctgaagctcacattatattcctcaaccttatatcggtgagtgtaaaaagctatatatcgatctttcgctcttttgtgaatgtagaagctaaagatctcattatgtatctgcttctctatctctttgcttctctctttccctcgtcatgaccttgctttctgacaggcgccggagggaatccactgtgtctgcaaacgttttccagcattgaaaattgtgacgtctgaaatagaccaatgtctgaaccaagaattcagagttataccgggcttaggcgagtttggcgatcgttacttcggcaccgacgaggaagaccagtagccaccactcaacactgtgactggtttcaaaggaaaagcctaaatttatgactagagcgacagtagaggcacttgcatgtctttgtagtttgtgctaaagaatctttatcttattgtttatgaagctcctcttgcttacttgaattatttttgaaaaactacgttaattttctcattaaaaaaatgatcgggacaatgctagttttctaaaccggtggaaaaagacataaccaatccttttatacatgattttgacaatcgtacgaaaattccagttctctctaattttaatttctttatttacatgttgattaatatatatttaccatttttcttaaggatcttagggtttagggattatgacctaaacctaatgatagaatttaaccttagttggacccacgaatgatgggcctaagttaagcccaactataaattaatgtagcgtaaccgccacacgctcatctataaatacaccactcctatgcaagacctatagttttatttcagtcgactcttgaccttcaatttcctccgtctctaaatttccttttcttttggctctctctgcgatcgagttcgaaaccgttccctaatcgaagatctagattcaacatacgttttatctctcaggtttgcttcttcttcgactacgttttctccgcgattatgatgatgccttcttcttcctgctttcactttgggttgcgtttcttcatctcctcgattcgcgatcctcctattcgcatcgatacccagagatctagggtttccaccgatatggatatggataaatcttagggtttcaccgataaggattatggattcgagtttctcttctatgtacattgtcggagctacatcttctcttcttgttgttagtgttagggttttgaataggttttaggtgatgaattataggtttagagttctgaattagagatttatttggttttttctgtggacgtggtgctctatgatacctggattgaatttggggttacagacagaagaatgtgttgcttttgattctctagcgattggggaattcagaaactccttgcttctggacttgttacccttgtgaaaatttatgtatgggtcatcagtcatcatggatgaagcaaacagttatcgactctgtggttcagtcttctaaagttggtgttttctcaatgtttagtatggattacaaggcgccaaggaaatactcacacggaaggaattttggagttgcgagacagcaagattttgcagcagatatagttacgagaagaccttatgccccgtatgacaatggtatgaagaaaggtcctaataagttgtcaaggaatctggtttggacgtcaaaagagtacaaatcaccagagggaaacaggccaaggcagaatgcagccaatgggtcagcgaaaccacaagttataggcacaggacatcgtgtatcaaaccagccgaggaagaatgctgtgtatgggccaaggagctcttctctttcagacaccagaggttgtgggccgagactcaatggcagtcccaaaaagagtgtgtgtaatttttggaaagatggaaactgcaaaaagggcgagaaatgccagttcttacactcttggtcttgttttcctggactggccatggtagctgctcttgaaggacacaagaatgatattaagggaatcgcccttcctcagggttcagataaactcttttcagtcagtggtgatggtacattgctaatttgggactgcaattctggtcagtgtgttcgatccatcaacctccaggcagaagcagggtctctaattagtgaaggaccatgggttttccttggcttgccaaacgctgtaaaggttagtttaaggcgtctcttaacacaaatattcttctgttatctaaattctgttcgttaaactcagttgattctggtgttaaagtttttgtttatcaattttgcaggcttttaacgttcaaaacagtaaagatgtgcatcttgaaggggtggttggtcaggtgcatgcaatgactgctgcaaacggaatgctttttgctggaacaagtgtaagcatttttaacttaactctctatcttctctatacatgtgttaggttctctgcttctttgttggatctatactaataagtttcttttgtcttttttggaattgcagtctggtagtatattagtctggaaagctacagactcggagtctgatccattcaaatacttgacatctctcgagggacatcatagtggtgaagtcacttgttttgttgttggaggtgaagtgctatactctggttctgtcgataaaacaataaaggtaagatatggctgctactaaatacaaaatgatttcatctttaatcttattttgaatgcattctaataacttctgtttgctgtggttctaggtgtgggatctcaacaccttgcaatgtagaatgaccctgaagcaacatatcggcactgtcacttcactcttatgttgggacaagtgtctgatatcgtcttccttggatgggaccataaaactttgggcttgttctgaaaatgaaagtttgaaagttgttcaaactcgcaaacaagaactgagtgttcatactctctgtggaatgcacgatgcagaggccaaaccgatcatgttttgctcttaccaaaatggagcagttggcattttcgacctaccatcttttgaagaaagaggaaagatgttctctacgcagacgatctgcacacttacaattggtcctggaggattgttattcagtggagacaagagtgggaacttgcgtgtatggagcttagcttctggcaccaaagtttagtcgttttaacaattttcgactattgattttcatttaatttgtacatatacattggtggttgattctaaatccttgcattaatgtaataacttttaatgttgccaagataaaagaaagtaatattttcatatccgttctctcatagaaagatgtttatttaacacaattccttaaaagatttgtgaactccatggaagcttcaaagttttgttctgtattcaaatttcttattcttcttcttttgaaactgaaaacgtggggaaaaaaaaggagatttacaagtagaaaacacaaatctaccaaatggtataatttgtttttggtcttgaaggaagaatgcaagcaaaactggacagaatatatatcaactaagaatgtggaaagacacacgaatcacacaaaccaaataatagtgaacgctctttgcattttggcttattcatctagcttttccacttttgtgtttatccaagtgaggaaatgcttgtagaatgttataagccctgagatcttgccttgttaagatccctatcacaggtgacatctgcaacaacacaagacacacgtttagtagtgttcttgaatcttgaatcaagagagtaaaaaagcaaacttacccctgaagcttgaatcttgggaaccaccagtaaatgtctgagacccactgaccggaacagaaccaaagctttagccactgacatactttgcaccactgtgtaaggtgtagtgttggtcaaaggatgaagatcaacatacaattgcatctctgagcttgtgattgcaacatcatcgaagttatcttctctctcagctaattcaaccggtgtgaacttttccctaacttcccactcttctgttctccttttctcattcaagaaccatctctttttcagaactttcacaaggtgagctcttaggatcagaccatggagctctgtgccagtgttttgatctgctccatccaagactgggaatgcgttatgcgttgtgttccttagtacatcgactatatttgccactttttctactccgttaagtgttacaaccggaggcttagcgtcgttaagctcacctacagtgagattcctcatccacggctctggatttgcttccaagaaaggtaagcccttaagatggagaatgatctcgtagatacttagattgaagctgtcacctactgttttagctatcagaagcacaaacattgtaatgggcaacaaaagaaggttgttggtgagttccagaaatataacacagagtgaaacagtcattctcattgaaccagccatgagtgaagctgcaccaagaaccgcgtaaagcccttgatctatgtttgtgtaagaccccattgctgtgcctagcatcctaccgtatgcagaacccatgaggataatcggtaggaagagacccgacggtgtcgctataccgaatgttataagacccaaaatgcagtagaggccaaagaatatccagagagaaaccatgccaaactcattaggagtgtttgaagagaaaatgtttctgactgcatcatcattggttgtgagaagcagagtggatagatcgttgtaataaccatttggacagttgaattgcttgaaatttcctgatcttccgtttgttggacatatctcgtctatagaaggatcacaaggcttgcattccgctaagaaaggaagaccgaacaagcaaactgatgtgaatagagataccccaagacttagaagcaccttatgaatctttcccttcctacaccaaaatttaccaaacaatgttaagtaaaaagaaatctttaagactcttgaacgttcataaacacttactggttgatgagattgtaaagccggagaactttatgcagaagatgattgtacaagcttccaagaatgccaccaaagactccaatcaatgtgactgggattatatctgctgcgtggtacctaacctctacatgactcacatcgaacataatgagtcctcctgagccgaaaagtccgcatttcccggagttacaaatctcaatgaacgctcttaatacaaccaccacaacggctgtactgaagaatgttctccacaagagagcgcttctccaccacgtagcgacttcctcaagagcgaaaagtactcctcctactggtgacctgaaagcagcacatactccagaggcagatccacatgtaataagatctcttcgatctctatcgttgttgaagtaacgaagccatctccatttgattctgtgattatctggaccaccttgaccaagcaaagaagctatgcaacttccaatatgaaccaatggcccttctttaccaagatcaagtccagctgcaaccgctccaatacttccaacaatctaatcggaaaaaaaccgcaaaatccatcagtaaaacaaaagatctcacactaactttgtgggaagcttcaaactttgtgaaggtttaagaaacaaaccttaaccatcatggtggtaaaaccaaacatattgggagtgtcaatgccattaaggtaagctttaatctcagggatccccggaccagccgccgtaggagcaaagtaaacaacaagtactgtcgccaccaaagtcagacccaaattcgcccccgtaaagaccatcagacctgtccaaaacctatttcaaaaacataaacttgtcatacaaggtatctcaatttcttgatcttgactgttttgtttttcaagatttggctgatgagtcaatacctatcttgagcaatgtagtagccgacggcgagaagtttgtaaccggcgatgttttcgacagcaaggttgatgagagtagcgataagaccagtgaagagaccaacaagacaagctaatgtccattttaagaatatgtattgaaacacttgtgcttttgatctgcttctccagtcatgcttgaacagatcattctcgtttattctgcagaaatccaaaatctcaaatcaaaaatctatacaagtatatgtctccatcactgattattttccaccaagtttaagaaaaaaaaatatatgaagattgtctgaaaacagagtaaagataaataaacgttatagaaagagatttgagaccaagacttatcatacaactaataaacaaaaggtaacctaattatctggatcttgtacaagatttggtttatgattgcttgcggcaaattgaaaatgtgagaaataattgaagtatcacaacaggtcatatgtctccatcactaatattttcattcttcttgtcaaaattatctctaatattttcataatttatgttctgaaaatcaggataaagatttaaaaatttatagaaagagattgagacaaataatccattcaattttatttctttctaaaatgaaaattagctgaaaaaatagtaagattgaaactttacaaaaaaaaaagataatgacaaactcaataaaccatcagaaagtgaagatttatctggaaacagagtaaagctcaaaactttatagaataaggttttttttttgtcactctttatagaacaagattaagactcatccaaaaaacaattcaagaaaagtaaaattcgatatgaaaacagaataagaatcaaataatcaagatctagaagataaagaagacatactcataatctaaactctcgatgtgtgaaaccttggcaccgaccaaagcaagaggagttgaagaaagagttctatgtctcttaagcagtggttgattcaaagtgttgttctctggatcttctccttcttcttctccattgtaattactattactaatctgcaagtttccatcttcatccatcgatagctgtctctctaatgatccaagaaacaataaataggaccactccgaaaatttatgaaaagaagaagaagaagaacaaaagtagattttggttagatcttcaagagctttctatctatctctctgttacaaaactacttttggtttggattttctctgcgaattttgtcgttttttctagagaaacacttttatgaagctttatagatctctctctacatatgatacatgcatgcatcaatatacaccattatatgtatggtgatacaaacataacatttaatttaaatgttatttgttgtgaggaggagtcacagtgggtggatgggtaccatatgctattctcactaaagataagacaatcattggtctatattatattgcctacttaaataatataacctaaaataaaggttgtcatcaaaaaaaaaaaaaaaaaacctaaaatgaaggcatgatatgtgtgtttgtgtaggcatctactattctctagctatgtttcaatctgaatagtgaatacagtatatagttttgaaatccattgttggttttgaagttagaaggaagaaagttataattctgtatacaaaccctatattagtttatttattcttatcaatatttttagtccattttgttgtgtgtacaaatctactttgtctttagctatatacatacttttgttttactcgtttttcatgtatattaatacccaaaataaatttgaaattagtttgtgattttgacgtagttgaacaacgacgaatttttttatattgaaataattcttatccactaaggatataaccctttttgtgtgtgtagaaatcgactattatctagctattaatttgtactcaatttttttatttctttcattacaaatcaatatgtgattttgacgtaaagttgaagagggaaagaaaaatgatttacataaacattaaggtaacttttaagaatttttgtggcagacataaaatgttttacgtcgatagttccaaaatctttgggcgcatagtgcaacttgtataatttggtttcataatagggtttcttgaaaagtactgtcaaaaatgcatatgtggaagtccaaaaatactactccatatcccaaatttctctaagtaatagtccctaacaactattaatatcacaattagttatttattaatttatcaaatacataattattttaaaatagacattttaaatattttcatgaatttcttgcacagaccaacgctctccatacttttccgttttggatcgacaaagacggttgcatgtggatctctaaggcattgacaaatcttttctgttttcatgtataaaactaatgatattcaaacattgtccataaaaaacattactcatagaatactctacaatttgcactaggggacataaacaaaatttgtttcggttgcttgtgtacacatggtagatcacaataataatcttctttttaattccttcatttttcattatacatcacacattacctgaataagtagcttctatcttttttattctcccatgtacttttttcatatatcatttcatccgttttcatataaatatcgattcaaactttttacttaacttttaaaaatatggaaagaagaaatcaaatatcaacatttaaataagattttgtaattatttttcttctaattcatataattcattcttgattcttcattgatcagccatttgcccatttggttgcgtactggccaagtgactatatctctcttctgttaaattggtgacttgtgtcaaatgacaactcagccactaggtctgacagatcagcaaaaacctttgtaaccaataagtatgaacatgtgtaatcttacacattcgttcgataattccaagatccaacgatcaaaagaattccgacccttgaggtcatcgaacagccctttttaaattttctcttgtacgagtatttatctctaatcatttattctccaaacacgtgatttatatattccggaccctagaaacgtccaattggagaaatatatttgaccacataaacgtagatataattaatctttaacattatacgatgttttgtgtactacttagtctactttgttgttgaataagtataatttagttatatatatacttataagttgtaaatcaatatgaaatggatgagactgaagtatcccataactaaatatgagaaattattatgaaaaaaaatatataaatattcaaaagtatgagtggcaaaaccatagaaattatacaacccaaaaagaagatatgaaataaatactctaagaaaatgctattagctctaaggtattgagcgtctgaggtgattgtacataagcgattaatcaaatctaaatgaacttcgagcaaatttttactggtggttagctatgtttcccgtcacagtagttattcgaaatttgctctatttgttaggattcaaaagttgataactagtacataaataacctttacttctttttatttatataaattttgtttttaatgcaggaaatctattttaatgagttgtaccatttgtttaattacaatgacaaacacattatattgttacctagctagttcgggtactatggatagtgtgggactaaaatcctagaattgcaagattgctatggggtctgggagcatggttttgttcaactgagaatccctttattattaaaaaggaagtacaaattgaaattttgtctaatttgacatcaattttgatttcaattttggattttgttttatgctattcaaaattattaagggtaattttgtcttaacaatctcctaaactttatatgatccgattcaatcaaaaccgttcaacaaaaataatattcaaatcatatattacgattcttactaatcactaaaaaattatatttataagtttagaatatcaaatttattcgaatatttagtataaaaaccaaataaaccgattgcccgctgtaaaccgcgggttaaaacctagttgtgctgaattttgtcatacagtaataaattgatgaaagtaagaacacaaaaatgtttacgaagaattataatactctcataaattgatcatgttataatatttggtataaaatatcaaataatatacatcccaacaaaaagaaaggagatatatactctacaaaaaacgactagtctatcaagtaaactattaggtgttggtaatttaaacttctattcatccataaaatgagaattaaaattttagatattcgcattatcaaatattggtatagcagagagaaaactactctatatatgtttctaagaaattatgttttggattttttcacacaaatttagaaaaaatatttttatttttatttttatttttgttagtttagtaatattaattctacttctcttttttctttattggttacagatgaaagtaataataacattgataaaaacattaatttttgtggaacaagaaaaaaaaatctttaggaaatagatggagtagttaacttgttatgatccatggtacgtataaagaaattatttagaaaattcttggttaccaaataattataataaataatccaaccaaccgaataatgtgttgtacataaattttggtcagaaatggggccagtagagaagaagctacacttggcatatgcgaaaccatgtgatccatatgtagagtccctatttgacgacgatcttgtgattagatctaaatccaactggctggtttcatgaatgagctacgtatctcgtcatggttcatgtgacttttgtttttcgctttttatttattttttggtttctttccctcatgattgagaatttgagatgatgaaagaaaaaattactgaccgaaaaatagacacaattataagtacaaacagaagttatatgttaatatgttaatatgatatgataagaaaacagaagttatatacaaattataaacaaaataggccctttaacaaaaaaaaaaaagttataaacaaaatatttggttttcttgtttgtaaaattgttcggaccaacaatttctttttatgtaaagattgttggagataacattttgtttataatgtagctaaatgggaacatggtcaaagctttcggaagagtatctttcgtgttaacggcaattaagagatgcatccattcgtgatatataatacataaaacaaaaacattatcatgtgttataattggagcaatataatccgccaatcttaaccaatatgcatgcatctgtttattacaagtttttggttcaaaaactatagtccattatgtttttatatagggttcaggatttaaaaaatatatattgtttttttttgggttttaatgttaagctaaaatcgatattgctttaggttggataatttagtttacgtgataatctttttataagttaatcaatgagagaaagcgtaacaacttaccagattcatgagttttcaacacttatattagatttatgaagaaaaaaatatttgatttatgaacaattaacaaatcttcagtcttttcatgatgaaatttaataatgcggatatcgagatttgcatatttgctttgagtatgaagttaggcaaagttattggcgaaaatattattttaattttggaaaaaagaaacaaaaacttcaacaaaaaagatggtaatgttgaacacggcgtcgactcaccgcctatggccgaccagatacgtacactcttgatatgtttgttatgtaattcctcgactttggggatgagatgatagtgaccaaaagattataaacaaattaataatatttttcaaaaattaagtgaattagaaaaacattagacaagaaaaatttatttaaggattaggtagttttagtttatcagaatcttcaagagagtgaccgtttttttagtcttcggatcatacccaatatttcttttcgaatgttcaattttaatactactactattattaattaattaatcatacacgataatcgtgtgtttaaatattaatggcggtgacagtattataaatatatacaatcaattagaatataacataagaaaaagtcttttgtaattaaataaccaaatgctggaggtttatttgtaaaaatatgataacatgtaaaatagcatgcattttttataaaaaaaacatacacaaatgttacataatttgtttaaaacatatgtgatatgtatcatatactctacttattcgtgattttgccacctaattatcatttttcaaataatcattccacatatatatggtcattttaaagaatattggaaatataaagaactaaatttatagtactaatcagctgatttacctttttgaaatgacatcaatatttctagttaatatttcaaacatcaatatttctagttaatatatgcaatgatgacagagaattaaagatattttggagtattatttgtaacaccaaaaatactcaccttgggatggaagttgagtatttttggagtattaatttagaggagataatttatgttttaataggtattaacaaacgtctatggatgtgagtgtctaagatatcaaaactcaagttggttataaagaaacaaaaggtcgaacatcaaacatcaatatttctagaaacataaatacgttcaagaatcaagattatatattgttatccccttttggggtctgacttgtcaaatcttatcaacttcttttacatttgcttatctagtaaaccaacaatattcactaatcaaatcattggctactgagacatcatcaccggttaaaatattccggtttaaggacaaatgattggttttgtttcccttattggctatttatggattgcaataatttactttctcttttatatattacaagatgtaatttagattactgtacttacgttactcttgtcggcctgattggtaaataaatatttaatatacagtgaccgtatctctgtggccattatattctttttgtttttccttcaatagtgaaggctaaactaaccagtttaatatgaatatatataatcataatgattttgaatcatattcttatatatatattatagttttttgtttattttaatatgaacaagacaccacatattccgatgatatacaatactactagacataattaaatacctacgaaatatatttcaccaagaatatacctacgaaatatttacacatttttatgttataatttcttttaaggttctcaatatatatatatatatatatatatattatttaaaaatatatggatcaatctatacaacccataattcgccattctctttatttatttagaaaataaaagttactgaacccatgaaataaacggtgggttgaagtacatgaataagggtcggacctagcaatccattttaatgcagcaagtaattaaatatatttgaaaaaacatctggaatcagaaaacaaatattaaaaatggatgtaaacttggagaaacgatctgtcctaacaacaatctctatttgagtcaaacaaaattaatttgagtaataaattctgaaaggtgcaaaatgcaattatttgtcataaaagagagaatcccaataattagtgtatagtataatctaaccattatttacttaacaaatatggatttggaagcaaaaggaaatgactgtaaccagattctgcatgaaccccttcttatctattcaatgtattcaccattaatgccaatataacaaaaggacatatattttggacttccaagattttttttttggtcgaaatggactttcaagattttatattctaagattttgcaatcaaaactcagtagaacaaaaatgaagattgtaaggatagtgaaatcaccttaccttgtcatatgttgccttctcttgatcattctttggttattgtctcatcatgatcataatcatcactcttgtgctccatacatgaatactatcagaggaacacaattctcgcatcttcaacctgtaagatcaagattatgatccaattatgatgctttttatttaataacattatatattgatagatttggtatttctgatcataggaatcttcaggcttatcgagtctacttaaagaagcagctacagaagacaagatagtgattattaccatggtcgatcgagaatgggcaaaacctgactctattcttgatctattcctggagagtgtacggattggagaaagaaccaaacacttgctaaaccatttgatcgttgtggctttagatgatcaagctcttcgatattgtcttcgtgcccacccacattgttaccttcatagatattctagaaaaaaatcagaatctttaaaaccagatggtcttgttaccggttggaacaagaagtctttggttaaagagatcttagaactcggctaccacataatgttcaccgtaagttctcttaatgcaaatgtttccctttctacaaccagtttttatagaacaagtatgactttgtattcaagaacctaggttaggtacttaggtgggcacctagctagattggcatatcccgctccatgaataaccttagatggtggatttatgagttttttccacctaatatatatttttttttattcaaatttattgtttttgtccatctaattcttcagaatcattatttctaattattatatatgtcttagaatagtgaaacaactagagtttgaagtagaagaaatgttctgatatcacaaagccaaaaaaatagatcaaaatttattttatttttatctaaatcatttgtttgtaacaaattgtaatattgatttgttaacaagttttaaaattgaattattgattgtagtgtttatagaccatgttgtttacgtttttggttacatagacgcttaaaattggttgcaggaagcagatgtgatgtggctaagaaatcctctaatgcactgcaacccacaaaatgcaatatcagtggcttgcgggaactcattaattgatcatcaacatgatcatttaacaacggaaaacacaggaggtttcttctatgccaagtccaatgatataaccatagacatgtttaatatcttgaacgtagaaagggttttgtatcctgcaactggaaaccaatccttgtgtgatattgtcaagcgcgaagatgtaatcaaagcccttgataagaaagtcaccttcttggatgatgctaactttgggaagttttgtcaaccaaatccgcaagatcaaagcaagataacaacagtccatgcaagttgttgtcatgatacaaagagtaaggtgcgttacctaaagctacttctccaggaccggaaaaatatgaatccgcaatggattattccaagccagttatgcagatgattttattcgttacaattttttttaacatatgtataacattttgtacaacatgaaagaacgaaaaactacattaccttaagaccatgtttataggtgattttatttgagtatcataagcccaaaaatcattttttaatgcagtaaagcatgtatttgggcatgatctgtatcagtccactgatacttttgatactgagtatcagatgacgtgacatcacaccattggttcagcgaaaacaaagaaaaaaaagaaaaatcttctctcctctctcactgataatactatttttctttcgttctcttctacaaacctaaaaaatcagagcgataaacgaacaggtatgattgaactgaacctaaaaaccattttcctttcgtttttatatatttattttcgatgttgcaatttttttctttttatgatatttaaaccggtctcaccaatagaaatcgatttattacgagtatcatacaaaatcttaaataataaacaaacattaaaattaatattaaaaaattactaatgatattctatgagtatcaactatatacatgctctaagttttgaccaaaaagtagcctcatctgaagattcatcctctaaataactcatcttttagactttgtggcaacagttgaaggcacatgggatcaatgttatctaccatgtagattatccatccgaaggataggcgcttgagatcttttgtctatatgcttttaaacaaagttctcggcgggatggttatgaagagcatgcagcaaaagtagttaagctttgcggtaatcttccactggccattcgtgttgtgggttcttcttttaatggagacagctaagatgagcggatgcttcaattatatgggacagaaactaatcttgatagaaaaattgaggatttcgtcttcagagtgggttatgacaaattgttggagaaacatcattctcggtttcttcatattgcatgttttatgtgacaaccatgggtcgaagaccccaatatatttttgtattctttattgggctgactttatcataaagcccataaggcccattactttattctgtaggattcgtgaaacggccttatgattatgaattctgcaataaaaaaaattcgtgatttgtcgttacggaagaaaaaagggaaaaaatcgcgaagcttgagaacacatagatatgcagagtgaaatcgggagattgatgttccctgaagatgctcgaaaagtagctgaatcaatctctagattccgatgttcgcagtttaattctcatcggagaatttgtacttcgatttgggtttctttgattttttcttttgtagaacttgacgagatggggaggagcattactggaaatttcacagtttcagaaagtctctgaagtcaaaacaaatgaatctaggtgcttttttttttccttctactttttttttttgttagctttgatgataattttcaaattcaatttaagaacataactgtcattgattctgcctggaaatgtgaactcttatggtaggatttcaaaattctcttaaaaaaaatgagttcttatgtttatagtgtcacttttgaccttgcttcaaagtggcacttaagattcagtagtagtagtgctacttttaatgttttgcaattttagtaagatggatgtgttttgaggtaacaaatgttggtgatttagctttgcattctttgccactaataaccacgtgagaatgctattcaacagactcacgaattattcacctagttttgaattatgtctttatcttaatctctagcttttatttagttccataatcaaaggaatttaaaacttattctttgtaggttagcacaaagaagctgacgcctatgtatgcaaactttatacaattgaattcaaaatcataaaggtcagtggtcttcgacgactgtggggacacattgtttgtcactttgtatttttctgtagaaatttctttggtgtttcttactatagtgatagtgggaaacacagtgttatgtggtctttgatgactttggggacacatgtttgtttttttctcttatcttctcatttttcccttaatatatagcacattgtgataccttcttcttcaaatctcacttttactctatctcttatggctttttcatcaccgtctgacttcaagagataccatgtcttttcgagtttccatggaccagatgtccgtagtggatttctcagtcatttacacaatcacttcgaaagcaaagggatcactccgttcaaggatcaagagatcgagagaggccatacgatcggacctgagctcatacaagcgattagagaatctagagtctcgattgtggtgctttcagagaagtacgcttcttcgtgctggtgcttagatgagttggtggaaatcttgaagtgcaaagaagcttcggggcaagttgtgatgactattttttacaaagttgatccgtccgatgtacggaaacagcggggagacttcggaagtactttcaagaaaacatgtgaagggaaaacctggatagtgaagcagagatggatcaaagctttggaatatatagcaaccgtagctggagaacactctctaagctgtttttttttttttctcttggctcaatgagttagaatgcttttctctttcttaattgtttcttcaaccgtggaatttctatcatttaattagacccaccaacttgattttgtttgcttttattagggctaatgaagcagagttgatccaaaagattgctacagatgtttcaaacaaacttaatcttacaccgtcgagggattttgaggggatggtgggacttgaagctcatttgacaaaactggactcttttttatgccttgagagtgatgatgtaaagatgattggcatttggggtcctgctggaattggtaagactaccattgctagagctttatttaaccaactctctaccggttttcggcttagttgttttatggggaccattgatgttaatgactatgattcgaagttgtgtttgcaaaacaagcttctgtccaaaattttgaaccaaaaggatatgaagatacatcatttaggcgcaattgaagaatggctacataaccaaagagttcttatagttcttgatgatgtggatgatctagagcaactagaggtattggctaaagaaagttcttggttcggtcatggaagtcggatcattgtttccttaaatgatagaaagattttgaaggcacatgggatcaacgatatctacgatgtggattttccatccgaagaagaagctcttgagatcttatgtctatctgctttcaaacaaaattctccacaagatggttttgaagaggttgcaaaaagagtagtagagctttgcggtaagcttccattgggccttcgtgttgtgggttcttctttttatggggagagcgaggatgagtggagaattcaattatatggaattgaaactaatcttgataggaaaattgagaatgtcttgagagtgggatatgacaaattgtcggagcgacatcaatctttgtttcttcatattgcatgctttttcaaccataaaagtgttgattatgtgacaaccatgctcgctgacagtactttggatgtcgaaaatgggttaaagaccttagccgctaaatctcttgtgtctactaatggatggataacgatgcactgtctactacaacaattgggtagacaagttgttgttcaacagggtgacccggggaaacgtcagtttttagtagaggccaaagagattcgcgatgtcttggcaaatgaaacagtaagttctaatctatataccctggatattgcctaattttgtttgtgataacagtgtcatcagtcttcttttgcaatattttgtagggtactgaatccgtcataggtatatcgtttgacatttcgaagatcgagacgttatctataagcaagcgagcctttaatagaatgcgtaatctcaaattcttaaatttctataatggaagtgttagcttgttagaggacatggaatatctacctcgtctaaggttactttattggggttcatacccgagaaaaagtcttcctctgacatttaagccagaatgtctcgtcgaactctatatgggattcagcaagttggagaagctatggggaggaatccaggttggtatttgatacttgtgattgtgaatacgtttgtttaccaatgatatttaaccttagtatgatattcctcatttttttgtgtgtttgacatgcagcccctcacaaatctaaagaaaataaatttgggatattcctctaatttgaaagaaatcccaaatctttcgaaagccactaacctcaagacgttgacgcttaccggttgtgagagtttggtggagattccatcctctatttggaatctacagaaactggaaatgctgtatgcgtcaggatgcattaagctacaagttattcccaccaacatcaacttagcatctcttgaggaagtcaacatgagtaattgctcacgtctgagaagttttccagatatatctagtaacattaagcgtctctatgtagcaggcacaatgattaaagaatttcctgcatccattgttggacactggtgtcgtcttgattttcttcagataggcagcagaagcctcaagagattaacacatgtcccagagagtgtaacacatctagacctacgcaacagtgatataaagatgatcccagattgcgtcataggtcttccgcatctagtatctcttctcgtcgaaaactgcacaaaactggtgtcaattcagggtcattccccttcgctggtgaccctatttgcagaccactgtatatcactcaagagcgtatgctgctctttccacggaccaatctcgaaattgatgttctacaactgtctgaaactggataaggaatcaaaaagaggaatcatacaacaatcgggtaacaagtctatatgcttgccaggtaaagaaatccctgcagagttcactcaccaaactatagggaacttgataaccatctccctggctccaggttgtgaggaggcttattctacgttctcaagatttaaggcttgcctcctgctttcgccaatcaagaatttcgcatttaataagataaattgttttctaagaagcaaaggtgtcgaaattagtcgcactacagagtctatatatccttttgtgtctggtggatctctatcagaacatctgtttatcttttgtggcgacttatttcctgaagaaaacagaagccttatggacgtgactccgaacgagattctgtttgatttcagctccagtgatgtcgagattgtggaatgtggtgtaaagatctttttaagtagtggcattgaagtgggctactgtgaaactggaggcaacagaaaccaccacatagatggagaagcagaagcgtttaaggtaactcaagttgaaaacagtaaacatacaggccactggagttggcttaggaagcttcgtctggggaagaagaagatgaagaataataagacagagcttagttcgagaccagtctcaggatttagtgatcttactcggggaatctttataaggtatcaggagcctgaagctgttgagctcactaaagatgaaagaatcacagatctttcgagtttactatgtattggttcccttgtggtctgtttttttctttctgtttttttcgggcaaccccttgtggtctctgttttgttgcttttttcttgcttctttcttcagatgcaatgagctgcatcacagacagatcttgttgtgtttgtatgtgcgaaacaaaaaaagatttcagttttcttgttcttatatatactccctctgggagaggccttgttaatctatccaaagaagcacgatgctctttggtgcattggggatgctcatacttcatatggggttttgactcctgatcaaactgaggctagagatcactttgagaaagctactctgctttttcaacaagctttggaggaggtaattagtctctttcttttgtaatcctcacctaatcaaagtgattgttatttgttttttgtgcgtggtgttttgtaatttgagatgtatatttacgcagcaaccggagaatgctcactatgcgagatcactggaattggcttccaaggtacatctttattgttaaagtttcctcaaatttgtcatgtttcatcttttggttctggtttaagaaactgagatctacgtgttgtagaggcttatctagttgtcttagcaataggaactgcgaggtggtttggtttgatggatatatatataatcactcatagacggagaaaaatgtatctgaatcatacctttatgcctagatatgaagtttctttagtgtagaataaactcattgtacagtgaagcaatggttatgaatctttggtttttgttcgttagaccaattctccttctatttgtgcaaaaatgcagggtccagaactaaatacagaggttcacaaacatggtttaggtccacaaccattgggcggcaccgcaggaccaccatctaccagtgcgaaggtattttcttttcttcaaatatcccaattggtttgatgaaaatctaacatttttgttctttcttagattactttgagaaagctactcagttcctacaacaagctttttttgtttgctctctttttagtattcatcaaattcagatgagctttaatgataaggtcatattcgtttgattgaatctgcctgaaaatgtgaactctttatgttagaatttcaaaatactcttgaatttggaatattcttttatgtatgtatgtatgttaagatgtacagttttctctattaaaaaaaaaaaagatgtacattttgttgaaattcgaattgggtggtttgttcgaattacaggaaatatcacagtttcagaaagtcgagagtcaacagactctcgaattattcacctagttttgaaaattttgtctttattagttccataatcagaggaatttataacttattctcgttagcacaaagaagctgatgcctatgtatgcaaactttacacaattgatttcaaaatcatagaagtcaaggtcttcgacggctgtggggacacattgtttgtcactttgtatttttctgtagaaatttctttggtgtttcttactatagtgatagtgggaaacacagtgttctgtggtctttgatgactttggggacacatgtttgtttttttctcttatcttctcatttttcccttaatatatagcacattgtgataccttcttcttcaaatctcacttttactctatctcttatggctttttcatcaccgtctgacttcaagagataccatgtcttttcgagtttccatggaccagatgtccgtagtggatttctcagtcatttacacaatcacttcgaaagcaaagggatcactccgttcaaggatcaagagatcgagagaggccatacgatcggacctgagctcatacaagcgattagagaatctagagtctcgattgtggtgctttcggagaagtatgcttcttcgggctggtgcttagatgagttggtggaaatcttgaagtgcaaagaagcttcggggcatgctgtgatgactattttttataaagttgatccgtccagtgtacggaaacagtggggagacttcggaagtactttcaagaaaacttgtgaagggaaaaccgaggaagtgaagcagagatggagcaaagctttggcctatatagcaaccgtagctggagaacactctctaaactggtttgttgattaaattataatgcttttatctttctaaatcgatgcttcaacggtggaatttctatgatttaattagacccaccaacttgattttgtttgcttttgttagggataatgaagcagagatgatccaaaagattgctatagatgtttcaaacaaacttaatgttacaccttcaagggattttgaagggatggtgggacttgaagctcacctggcgtaactggactctttgttatgcctcgagtgtgatgatgtgaagatgattggcatttggggtcctgcgggaattggtaaaactaccattgctagagctttgtttaaccaactctttaccggttttcggcatagctgttttatggggaacattgatgttaataactatgattcgaagctgcgtttgcataacatgcttctttcgaagatcttgaaccaaaaggatatgaagatacatcatttaggcgcaattgaagaatggctacgtaaccaaagagtgcttatagttcttgatgatgtggatgatctagagcaactagaggtattggctaaagaaagtttttggttcggtcctggaagccgggtcatcgttaccttgaaagataaaaagattttgatggcacatgggatcaacgacatctaccatgtggattatccgtcccaaaaaaaagctcttgagatattttgtctttctgctttcaaacaaagttctccacaagatggtttcgaagagcttgcaagaaaagtagtagagctttgcggtaatcttccattggctcttcgtgttgtgggttcttctttttatggggagagcgaggatgagtggaggcttcaattgtatgggatagaaactaatcttgatagaaaaattgagcatgtcttgagagtggggtatgacaaattattggagaaacatcaatctctgtttcttcatattgcatgctttttcaaccatgaaagtgttgattatgtgtcaaccatgctcgctgacagtactttggatgtcgaaaatgggttgaagaccttagccgctaagtctcttgtgcatatatctactcatgggctggtaaggatgcactgcctactacaacagttgggtagacaagtagttgttcaacagtctggtgagccggggaaacgtcagtttttagtagaggccaaagagattcgtgatgtgttggcaaatgaaacagtaagttcttacctatatatatactcccttgatattccctactttctgtttgtgataacagtttcatcggttttgttttgcaatatttggtagggtactggatctatcattggtatatcatttgatatgtccaagatcggggagttctctataaggaaacgagtctttgaagggatgcataatctcaaattcttaaaattctacaatggaaatgttagcttgttagaggacatgaaatatctacctcgtctaaggttacttcattgggattcatacccgagaaaaaggcttcctctgacatttcagccagaatgtctcgtcgaactctatttggtatccagcaagttggagaagctatggggaggaatccaggttggtatttggtacttgtgattgtgaatacgtttgtttactaatgataattaaacttagtatgatattcgtcatctttgtgacatgcagcccctcacaaatctaaagaaaataaatttggaatactcctctaatttgaaagaaatcccaaatctttcgaaagccactaatctcgagacgttgagacttaccggttgtgagagtttgatggagattccgtcctctatttcgaatctacacaaattggaagtactggatgcgtcagggtgctctaagctacatgttattcccaccaagatcaacttatcatctctaaaaatggtcggcatggatgattgctcacgactgagaagttttccagatatttcgactaacatcaagatactcagtataagaggcacaaagattaaagaatttcctgcgtccattgttggaggtcttggtattcttctgataggcagcagaagcctcaagagattaacacatgtcccagagagtgtatcgtatttagacctaagccattctgatataaagatgattccagattacgtcataggtctcccgcatctacaacatctgaccatcggaaactgcagaaaactggtgtctattgagggtcattccccttcgctggagtccatagttgcataccgctgtatatcactcgagagcatgtgttgctctttccacaggccaatcttgaaactggagttctacaactgtctgaaactggataatgaatcaaaaagacgaatcatactacactcgggtcacagaattatttttttgacaggtaatgaagtccctgcacagttcactcaccaaactagagggaactcgataaccatctctctgtctccaggtggtgaggagtctttctctgtgtcctcaagatttagggcttgccttgtgctttcgccaagcaagaattccccatattctgacataaattgttttctaagaaccaaacaaggtgtcgaaattaacagcactgcaaagtccatatattcaagtccccctaacagatc

SEQ ID NO: 805 - DNA, 6478 bp, Arabidopsis thaliana
tctatcagaatatctgttaattttttttggcgacatatttcctgaagcaaacagatgccttatggacgtgaccccgaacgaaattgtgtttgaattcagctcctctagtgctaagactatggaatgtggtgtacagatcttggcagaaggaggacagaattgtagtgtcgtcgaaatgggccactctgaaactggaggcaacagaaaccacctcacagatgttttaaaggtatctcaagtcgaaaccatcaaaaacagtaataatacaggtcactggagttggcttctagggaagaagaagacagagcttagttcgacattagtctcaggatccagtgatgataccttgatgaggcatcatgagcctgaagctgttcagctcagtaatgatgaaaacaccagaaatctttcgcgtttgctatgtattgtttcccttgtgatctctgttttgttacttttccattgcttttttcttcaaatgcaatgacctgatgcattacactacagatcctgttgtggttagacgtaatagttgttgttgtattgtttggtgttttttttgttgttactagttgttgtatgattgtgtgaaaaaaaaagggtttagttttcttagatattgttgggctgactttagcaaaagcccataaggccttttaagcccacttcccggacgagaagagcgaaccgacttatatacgaggatttatagctcgtcttccttaaattatcgtttgtgacggaagaagaatcaaaacaattaatcgcgaggcttgagaatcaatcaatggatatgcagaatgaaaacgagagattgatggtcttcgaacatgctcgcaaagtagcagaagcaacctacgtcaaaaaccctttagatgccgaggttagtcttttgatttatcgttttttggataatttaccctaaattcgattacgaattttgttattcgaattttgtttctttgtttctgtagaatttgacgagatgggcaggagctttacttgaactatcacagtttcagacagagccaaagcagatgattctaggttctttgttatttcttctcgttttagttttgtatcgaattcagattaaattcgtttgattgagtctgccttgaaattgaattattatagacttagattagtcgtttatgtatgtatgttaagatgtatgttttgttattgaaatctgtaactaatacttaaaagatggaattttacgtagaggctattttgaagctgggagaggccttggtcatcgatccaaagaagcatgatgctctttggttaattgggaatgctcatctttcatttgggtttttgagttctgatcagacagaagctagcgataactttgagaaagcttctcagttctttcaacttgctgtggaggaggtaattagtctctttctttcgtaatcctgacctaattaatatgatttgttttatgtttttgtcttctgtggtgttttgaaatgtgagatgtatttttgcagcaaccagagagcgaactctatcggaaatcattgacattggcttccaaggtacatcttcattgttaaaatttcctcaaatttggtcatgtttacttcctgatttaagaaattgagatctgcttagctagttgtcttagcaataggaactgcgaggtggtttggtttgatggatatatatagtaactcatagacggggaataatgtatgtgaactgaatcatacctttatgcctagagatgaagcttttttagtgtagaataaactcattgttcagtgaagcaatggttatgaatctttgatttttgttcgtgagacctattctccttctctctttgtgaaactgcaggctccagaactacatacaggcggcaccgctggaccatcatctaacagtgcgaaggttgtttcttttattcgaaactacaatttggtttgatgaaaatttaacacgtttgttctttctcacagacgatgaagcagaaaaagaccagtgagttcaagtatgatgtgttcggatgggtcatcttagccagttacgttgttgcgtggatcagttttgccaattctcagacgccggtgtcaaggcagtaacgctcaccaagagcgtctaaagaccagcactttttttttaatgcattttgaaacaaaagagttttctcattataacaactcctagaacatatttgaagttaagaatgagagagactcagaaaatgtataagaactcatattgtcctttggaaattaacatacaaattagtgaagacattatgcctaactcagtagagtactcttcataatcaccttcttcttctcccccatcgcttagctctgacaaagactccctatgtaacctgtttctcgttgggtaccgtaccatcatttggttaacaaaaatatcagttttcttttccttgtactatatttgtccatgatcaggttctagctttgaagattaacatttcatcttattctagcgatagtaacttctaggtggttcgaatttatctactcatacaaggagaatagtgcatctgaatcatgttctgcctatagatgaagtttttagtctagaaaaacacagtatatagtgaagcaatggttatgacttatgagtgcaggctccaatactacatacagaggttcacgaacatggtttacgtccacaaatacgagcaacctcacaggctatgaagaacaacactgattccaggtactaactaccatcaacctcagagaccaatatcgagccagtaacattcaccaagagagtctaaattcacaactttatattcattttcaaactaaagaggttctcattgttaacaactctgaacagattcgagattatgaaataagagaatcaacactgatatgagtatctctctacattgctgttgaatcaaattgtcttgtagaaatcagtgaagaccatagtcacctaactcagaagagtactctccatgaacaccttcttcttcttgttctccattgtttagcactgtgatagaatctcccacatccacctgtttctcttttgttacaatcatctgattaaagccatgaacagcaatccaatcgttgacatacaaatctggatatatgagtggaactccattgagaagaagtatatcaccggacaaagaaatctcaatctcataccctttaagaacagtctgcagaatcgatccttccttagcaaatttctgaagatctttccataagagaagttgactgacaacatgtcctctgaaaatagtaacgtaatcggagaatttagtagttggatttggaattgcttcgtcgatcggagcaaagactgtgatcttcgtgtcgtttcctgaagtattatcttctaattgcagagcgagaaacgtagctataatcacgaaacctctcgacattaacaatcttgaagccgattcaaagatgttgaagcgattcactggtttagatctattgggaagatttcgagtggaatccgaagcgatattaggacttggaggtgtttgagtcgctgagctagggatagggattgaaccagtagatgaagtagtgcttgggattgaagaagaagatgatgaatcgtcggagattttcgtcggtgatgtgaaaaactcgtcggatccgtaaatcacgacgtatccgtcgtcaaaaacaggagaatcttggactacgacgttgttgatcgaagttttacctccgaatcgtgaagaattcgtgacggttagagagtaattagatctgagagtagggattttggcgccatttgggaggtttcttaaggtttctcctgggagtctcgtcggagagagctggtacttcatatcgagaagcgaaggttgaccaaacttagagaaagattgatcagaaggtgcgaagagggtgagttcttgccaatcttcgaggtttagatcttgattcgcgagctttagtgtgagtcccatggataagtagccggaatcggaaagaacttccacggcggatgaaacagatgtcatagaagttgcgacgagatcgatatcgagaacgaaaaatatgaggaagaaggtcgttagaagcttcgacgccattgatgcgttcttcgagctttttttttcgtttggtttcagagaaaagccgttgcagaggaagttacagtttttatagtccgtcctattaagagagggaaaatatttactgggctttttattcataggcccatgtgtttttttgtcaacaggcccatatgtttttttcttttttagttttcagtttttcacattttccctcccgcttctttttcttatttccctctctaaaaacaagaaaacatttttacattttccctcctaaatctccaaattttcagaataaatatctcaattacaaatccatgataatccacacaacaataaacactcatcgattaaatcttcttcaccggaaaaaatgccttcgatgccagaggaaccaatcctaacaccaacaccagatcgattctgtatgttcccaatccaatacccacagatttgggagatgtacaagaaagccgaagcatccttctggacagccgaagaagtcgatctctctcaagacaatcgcgactgggaaaactcactaaccaacgacgaacgtcacttcattaaacacgtcctcgccttcttcgccgcatcagacggaatcgttctcgagaatctctcaactagattcatgtccgatgttcagatctcagaagctcgtgccttctacggattccaaatcgcgattgagaatattcactccgagatgtatagtctccttctcgacacgtatatcaaagacaacaaagagagagatcatctttttcgtgcaatcgaaaccattccttgtgacgaaaaaagcagaatgggctatgaaatggatcaacggatctcaaagcttcgctgagagaatcgtagcgtttgcttgcgttgaaggtatattcttctccggtagcttttgttcgatattctggttgaagaaacgaggtttaatgcctggactcactttttcaaacgaattgatttcgagagacgaaggtcttcactgtgatttcgcttgtttgatatatagtcttcttagaactaagtttgatgaagatcgtttgaaagcgattgtttgtgatgctgttgagattgagagagagtttgtttgtgacgcgctttcttgtgccttggttgggatgaatcgtgagttgatgagtcagtacattgagttcgttgctgataggttgttggctgcgcttgggtgtggtaaggtgtatggtgtgactaatccttttgattggatggaattgatttcgcttcagggtaagaccaacttttttgagaagagagttggtgagtatcagaaagcttctgttatgtctagtgttcatggaaacgctgcgtttaatgatgatcatgtcttcaagcttgacgaggatttttagattttgcttacttgctttatttttagttttgtaattttcagtataatgaaaaacagatgaagtttaatttgataatggacatttaatttcttaattatttaacatagtttttacatggttaacatataactaatccggatcctagtaattacatgggtctacccaaatccaaaaaggattggagccaatgactttgctatatatttcgttcttaagaacattgctaggtttctagctatattggttttgcctctttattggcagagggagcacaaagagaatcctcccctttcgacataaaaatgttattttctcatggtcttttggatgattagcaagacttactcttaagtttttgcataagtatcttacatcactttctaactcaaccttcgaaatatgcatttgtttcaaacaatccagtgttcatttccaagtaggtgtagtgacttatgataagaaagcatgtcgattatggtaaaaatattttagtggctgttcacaataattctatgagagagaatcattagtaggcaaattgaataggaaacagacatgatatcaaattcttttgaaggcagaaagaaatgaaaatatagaaaacataactaaaagagaataaacaaccaattaccatttaccgttccaaagaccttcatcgtcgaatttcaagaacaatgaaggtctttgaaagatacttttgtcaataaatatgaaaaccataaacaattagtagagatgagagatcactataactctcctatgactttccatccaatcaaaaagaaaagtttgtgtccatgtctctataactctatccaacttctttaagataagatcattttctcgcttattacaccaagtatacagcggaccatgggatgataggtctcaaacaaagcaatagtttaccactgattgaaagtctctcattccattggtataatagggttgtcttcagctctagaatgctccacaagttctaaaatctcattaaaatctccaaacattatttaaggcttgctactaatgacaggagagtcatagt

SEQ ID NO: 806 - DNA, 83698 bp, Arabidopsis thaliana
gatctctcatcttgttcataatacttttttctcctctaaccaactagacagtctatgaaactcaaataatataatttttaattttcggtcaaaactgtaaaaacatgtcaaaatcaaataatattttttttttgccaaatcagaaaattacatttttccgccaatgtaaaaataatttttagagtgacattgtcagtataaatcctaatttatgttttaatattatagctaaagtctataattatttttggctgcttcttgcatattattattctaagtttggtttttgtttttatctgagaaatttctactatataatgaatatttgaaactgtagtctatatatttagatttaatattttatacaacaagttgatatggccgagttggtctaaggcgccagattaaggttctggtccgaaagggcgtgggttcaaatcccactgtcaacattcacttttttctctttttccattatttacttgctgacgtgtactcaccttatcttacattatttgatgacgtgtaattttagtggtcactaatcgagagagtgagacgaaacgataaggagaagaacttcttcttcaacctcagaaaaccctaatttctccatttcgaaactccaacgaattctctggtgattttaccaatggcgatggcaacatcgatgagtttgaatctaattggggcattcaaaggcttgtctctttcttcgacttcgtcttttcttagaggcgatttgagtttttcccccaaaacctctttcacggtgactcttcctctggaaaatcttcaagctccgattccgttgacaattgaatcggcccataagaaaggagctggtagcaccaagaacggtcgtgattctcctgggcaacgactcggcgtcaagatctacggtgaccaagttgctaaacctggtgctatcattgttcgtcaacgtggcactaaggtaacacttaagaacacagaattgttgaaattgagaacctcttaagctcctctttcaattctcttctaatttcaccgcaactctgtcaatttggtcagtttcttatgggtttagctctcaagctctgttttcagattccattctcgaacacatctgggtttaggatgaattttcgtatttagtagctcttgtttctgatgccattgccatttctctggaagttctacgttatgtttgtgtttaggatggaactatattgtttgagaagattgattcatgaatggtgatgtttggtgcagttccatgctgggaaaaatgttgggattggtaaagatcataccatcttctctttaatcgatggattagtcaagttcgagaagtttggtcctgacaggaagaaggtatacctgtagttatactgagtaaggtttataagctttcttaatcttctaggatgttaaaggaaatgagacttgtttttgcagataagtgtgtatccaagagaaattgtaccagagaatcccaatagctacagagcaagaaagagagaaaacttcagattgcaaagggagaagaagaaggcgagacgcgagaattactcgtacacacttcctacaccagaacttgttcttgcatctgcctcagtcgatgatgctgaagccaatccggagtgctagaagattgaatgtggagtttccttgtctctttttgtttagtcttgtttatgaaaaatgatcctttcagagtattaagagttggttgtattgtcgaatccaagcctctcttttgtcaaattgagtcccaagcaggcggatttttacccaacttgagttattagtgtaatcaaatggttattgttaattagtcaaagcctcaaaggttttaatttagtgaatttctcttccaacttagtaattctgaatcattgataagagagaccaccaaacctttgaatgccccaattagatttagtcaagtataaatctagttcaagtgtctatttgaggtttttttattataaaaattataaaacttatttggatcccaaaaatggatccattgttagtctaagaagccgaagactttatgggccttctagcgaaataatgggttttagcccaattacttagcatttcggaatatgtagatagtggtacaaaaaagaaattgaataatattcattttcgtctatcattgcataattagtggaatgaaattattattctatgttttttttttttcatttatctatatcttgctcatcttgaatccatcaatttcgctaacgttttacctgtaccatattagatcctttgtgttatctttaggccatatttcaccagcttgaggtcaaatacttatacacatgtatgtaacgatatatatatgtaagatgacgatatattattgaataacactaaaggcctagagcaaaaatagtaattgatgagaagttttaaattctaggagcagtaattaagaagaagaacaaagacaaatcctaaaacaaagcatatcagtagtaaaaccttgtagcacaaagcagagaggcacatacatgagtgtaataaatgagctatgcatagacatggacgttgagaacaacgagaaagaggataagaaagagaccatagagaacagtgtgaacgaaaatagaagctaccgtcgtcttcatgttcatgaaacccaccggagattctttccccggaaactgcagtatcaaccctggcgacagaaacgcgaacaaagccgaagctatcaacggtgcagcccaatcatgcatctcttcttacaagaacaagaacaaaagaaaaagaaaaagagaaatggagaaagaaagaagagagtgggaaataggtttggatgggtgaaaaaggagatgatggaattgtgagaatgagaatctgataaagtctagttctttacaattaaaggaagagagagattttttggaattttgctttaggtgaggtgtcttaatttaatcgtaattggctatcgaaggagagtttgaatttgaaacgattctagcttaagcatatcaaatgctcgattgtattagaataaacatggtttgagctgtatatctattctatgcggtttgagcggtttgagcggtttaaccaatttacgtggtgcagttttgcctttggaagaataactttcaataatataattgtactctgttttacaattaagcaatgtaaaaacagaagaaaaataaacaatgtatgtaatttgtagagaaacggttctatgtcacattcaaaatcctatgtgattcacatgaatagcgacatatctttcggtgatcaataaatgtacacgccacttttcgaaatacgtttggaggaattttgttattttattacttggaatgtattcttgattagtagaatttgtttgacttgagaagactaaattagattacaagtaacgggtccaccacttgctaagcgaccaatatattccgtaagaagagaacaatatttctccacttttttttcctactaaaaacaaaaattcaacttttttatatagttattgtacacttttcatatctccaaaatttagtatttataattttttttggtgactataaaatcaagacgatataaatcttagtaatttgtttgacaaatatattttttccatcccgaaatgctaatctttttactttctagtgggcaatatatacgagattatctcaaaattgtaacaaaaaataataatgttggaattaactcaaaataaatatgaagaaaataaaataagaattgggcttagctcagcttttcttctttgtttcaactttcaagtctctgtttttgactcttttactctctctcacgagtcacgccaccgctttatcgaaaaaaggcgtctgcttttacgttttctacttcacagcaatggcggattgggctccagttctcgtcggagttgtattattcgttatcctttctccgggacttcttttctcgttgcccggacatcaccatactctccaattcggcggcatgaaaaccaacggcaaagccatcgccgttcacacactcatcttcttcgctgcttacaccatcttgatcctcgctgtcaatctccacatcactaccggctaatttatgggccgaaataaaggtaacccttttgctgaatctgagctctctccctctcaggaatcttctgagatctggaactctgtttttagggatttgtatactttactctgttctctagtttgtgttgtgcattgagttaatactgaaaaatgtaataatcattaagcttgtattgatgtcattaagttataatgcaaaatttgatgtttgattccatctttgctattgaattgtgaaatacaaaatcacatatttttagttgtctatacaatatttaccttgaaaccatatcagcaaagaagcagagattagtgaaaaatgtgggaacaaaccaaatttgtaactaaatgaagatgctttatgttacgttattacatgctgaagctacgagagatcagaggatattgttatctcatttgaattgtggaaaacaaaattaccgattatttatttgtgtacaacctttttaaatcaccctgcttgagaccctatgagccaagaatcagagattaggaataaaaagaaaagaaaaaatagatgaaggcgaagttgagtccaaagaagctgtctttgttacactacatgatcagaaatggatgtgaatttgtatggcaatgatcaagatagtgagtatacagaagtaaataatggcgtggaccaaaatcgaaatcccgcttgtgctcatgttcccgaattccatcactcttgtccttgccggtagctgaaatagcaatcctggtgagagtaggatgaacagagccactgctacaatcacaggtccccagtctgcactcatatctcaacaaaatctgttttttgaaatgagtttttgtataacaggttcttgtgttttggtggcaggtgaaaatggaagatgaaactgagaatggagaagcttgctagtgttttatgtagagttatgggtttcttggtggctaaggagaggaattggtttagatgctaagctttgtgaagactacaaaagaaaggtattatattcttgaagtgggatttgctttttttggtctatgaactttctttattcttaattcttcaatcaattgcgtcttttaagtttctgttttctattttctacaactgctttacagatcgttcttggtatgtgttttctgctttcgtttttttgcttttgttaaagaagtgctcaaaagtagatgactgtgtaaaaagatgatattaccagttgttgtttcgttgtaagggtctactttgatagttttcttcataggtttggatttagctttttcttggtcagtctcgaggaaactgttggacagatgaaagtcggtgtttaatattcttatgatgtaaacaaactgttcgggactaaccgggactgatttcggtaatttggtattgaagtttgtgtataggtcttgggtctaattatgttgtaatgcatagctaaagagagggaatacaaataaaagataatcatcacttcactttcttcttatttataagtttgtgtgtttgtatctatgtttcaactctctagccctttccaaattttaattctttttcctcgtttcaaatgtgatgtgttcaggttctgtagtagtagtagtagtttcttgactttaaacgctctgcatcagtgtgaatcttgaccaacttctcggtttccatggtcggggtcatataacgagaacttgttgtctcggtttttctccgcaagattcaaggttacttcaacttcattgatctttagttttgagttttgacaacagcagtgttgactacaacaagaattggtcaagattatttgtttctgggcttattttcgtactgggcctaaatttcaaatatggcccattatcctttgctcttcttctttaacacgaatcgtctctactcctaacttaaggatccacaacgttcttcctctttttctttatcaaaggaaagcaatcttcacaaaaacaaatatcagtttcggtgaccaagctaattttcacaccaatgaaagattttacttttcggcaagcacatacctaaacatcatttttttatgtgacaactaaaatattttttctttatctattcaattttttttcatcaataacatggatttgatcccatacgttaacatcatattagctatttcactaacacaaatcaccagcctacaagtagttttgcatgtatagttatcaacttatcaatcaatgatttttctagaatattactgttggttctgttgaataattttaaaatgtatgattattactaatttacctactccacaagaaacatgtaacgactgctctatggtcaattttgctcactagtctatcataaattacatatactattgtctcagtcaaaagtgacttgcgtgattctaattgaaaagtattgtgtattgaagttttgactagccaacttagaaagtttatgcatataacaaatttaaattttaaattaaaatccatttaaatttaatagagaattatgaattttctattaaaattttgaaatgtcaagaatttaagaaaatgacattctattgtaaataagagccaattctaaaatttatttaactttttttgcaaaaaaaatatatatagattgaaaaaagagtaatcattgattatctataaaaaaaaagaagtagtccaatttaattggaagtcaatatggtttagtccttttgctctgttcaaaaaaatcaatttatgttattttgttttgaaaaaccggatatttttatcttttggtctcaattctgaaatttggaatatatcagaaatcgctaaatgaaaacaatttttcatggaggttgaatactctaagtgggttttatatataacagttttcaaatttattgtcatatttacatctacggatctacctaatatgataagagcatgttttagatggtcaagttcaatattgttacatgccaaatatttaggagggtgtattcaatcaaacattttcaagtgatttgtgttaaaataacagatcttatgttattcaatcatgaatttttaaaagtctcataaaatctaatgttattgaactagtgattctaaaatctacttaaaagtcccctgttattgaaaacattttaaagattggatttgtagtgactttaagagacttaagtgaattttagtggatttccttagttaaaaatacagaattttaaatcccatggttttaggtagaatttgagaggattttacaataaatcataacaactttcttaaattcacccaaattctttaaaatcatataaaactcaaaataattcaaatcactcaaaatataattgcagttaatcctaactaacccaacaaggattttacagaattttttcgagttcgctgaattaataatttcaaaaacaaaatcagacattgttgaatcatttagtttcttcactagattcagtgaaattcagacaaataaaaacctgatctcaaaactcataaacaaaaacctagacctacgagtgaacaaacgaagcaaagcaggaattgttttgagggataaaatcgacgttacttatgtctggttttgtatgggttaaaacgcttttaagacaatctttcatgattaaatagtctaatatctgcaaagtcaaactagacggcattttccgaaaagtaaaattgaagggacgcaaataatatttatacttatttaggtattttattttatatccgaaaaagtaaaattgaagaaataaaaattgaattttggaaaataaaaattgaatttttgaaaataaaaataaataataaattaattgaaatatgagtgaaactcaaattatatgaagtctatgcaaatgaaagttaacttgaattattcttcatttaaatgatcaattatccttcatttaaactcaaatattaaaactggacttttaaatagtatctaacaattcacaaaaaatatctaggagatgtgaggataaaaagtttggcacattcttaaataatttaatataaatatgcaaactcaaatttaaaactcaacccaaaaactttttttaccactatcaaaattttgtagaaatatttaagaaatttgtatttgataatcagccaaactaaaaagataattgttgtgtgattacatgaacatggtacatcaatagaggagcaaaaccaaacacaaacaatctaaacaagatggactcctcaacacgaaacattaccaccaaatacatacaacttcgtcaaggaccttaaatttaagactactctatgccgaaacatagatagtagaaaacagagcaaggaacataatggcgagaggttagatagagtaaagtttaggtaaaatgaattttatatagctcctttacgtctttgtcaatttcatacttttatcaacaagacatatttccgacttcgattcaaagtcgtacattggaaaattatgctttagaaaaaacaaacttgacgaccaaaaatattttttaaaacttaaaaataaaaaaaaactgttaataaaaaaagtttcaaaaatagcttgagcaatgcatgaaagagagctgggagtgatagtagaagcaaaaaaaaacctttcaggagatatatataacccaaaggccaaagctctatattagaacacaaacattaaacattaggcatggaaaactctcaattagtttcgatcactttcttagcttacactataatcatatcaatcggctccatcaactgcatagacaacaataatcttgtaacaaaccaatccgctctgttcgtgtttggagattctgtgttcgatgctggaaataacaactacatcgatactctctctagtgtccggtctaattactggccgtatggtcaaacaacattcaaatcccctactggaagagtctctgacggacgtttgattcctgatttcatcggtaccaaaattactttttcgtttccttattttattttaaaacattttctttgtaactgatcgataacatggcagcggagtacgcatggttaccgttgatcccgccaaatttacaaccattcaacggtaacagccaatttgcctatggggtaaactttgcgtcaggtggcgccggagctttagtcggaaccttttctggattggtattcattagtaactactttacattggttttatttatttgttttcttttgttgaatccatggtaattgtttgtcttgtctatttttttttctttttcaaaaaacattttcaccactgcaaggtgataaatttgagaacacaattaaacaacttcaaaaaggttgaagaaatgttaaggtctaagttaggagatgctgaggggaagagggttatctcaagagctgtttatttgtttcatattggactcaacgactatcaatatccattcactacaaattcttccttatttcaatccatttccaacgagaaatacgtagattatgttgtcggtaacatgacagacgttttcaaggtaaaaaattttcaaaagggtttttgtagagtttctattgtgaacaacttttggtctgaaaaatgagagatgatgttgtgttcttaggaagtgtataatcttggaggaaggaagtttggaatcttgaacacgggaccgtacgattgtgcaccagcctcattggttatagaccaaacaaaaataagatcttgtttccagccggtcactgaactgatcaatatgcacaacgagaagcttctgaatggtttgagacggctaaatcatgaactatccggattcaaatacgcccttcacgactatcacacttccctatcggaaaggatgaacgatccttcaaaatatggtaacaaaacttggttaataattgcaatatatataacagagtctttactataaactttttgatcgttttgaagggttcaaggaggggaagaaagcatgttgcggaagcggaccattgagaggaatcaatacgtgtggaggccgaatgggactgtcgcaaagttacgagttatgtgaaaacgttacagactatttgttctttgatccttttcatttgacggaaaaggctaatcgacagatcgctgagctgatttggagcggacctaccaacattactggaccctataatctcaaagcgctgtttgaacttaattaaagctcactatctcgtcgtgtcatcttgtttggttttcattcaaaattttttgtgtatttgaattgtcaccagaatctttcagttttcttagactcttggtctccaaggctttacgcgagcgatatatatcactcgtttcgattttgagtttttgaccgtttgaactttgaagagtgtttcttcaaattaaaccaaaccaattttacaaaaccaaaattcataactgattcttttggttcacactaaaccgagtttatcaaaactactttaaaatatggtttggtttaaccaaattatacgtcttaatcaatgattaggagactttattaaagtctataaccgcaattcgtcatcaactaccatttccttctccaatggagttcttctctgagagtgagaggaatcactgaaaaaataatactgaccatttcccaaaaagttatgtacttattctgacgaaatctgcaggaaattctcaatttttttaaaagaagtagctttttggagttatggagacggagattcctaggtcaacggagatatcagagacattgttgttaccagaaacgaatctagatcacggtgaatatgtacccgagtggaaggaacagatcacgattcgaggcttgatctctagcgccttgttagggattttgttctgtatcattacccataagctcaatctaacaatcggaatcattccttcgcttaatgtagctgctggtcttctcggcttcttcttcatcaagtcgtggactgggttcttgtctaaattagggtttttatctaaaccctttactaagcaagagaacactgttattcagacttgcgttgtctcctgctacggccttgcttatagcggtaaaaatcgttacttgcttagatatgggttaatagtaatcttcttgatttggttacgtttagtttcaattcctatgtgttgatgatgaacaatgggagatatggatgatactaactttggatccacttgatgactttgctgaagggaactgtagctattccagatttatgatgatcaagtttgatttttttgtgtgcctaatctgatatagtttcttgtttttttaggaggatttggttcgtatttgatagctatggatgaaaggacatataagctcattggttctgattatcctggaaacaatcctgaagatgttataaatcctggattgtggtggatgactggctttttatttgtagttagcttcctcggtctcttctgtctcgttccacttcgcaaggtagcgtctcattactgcgatattagtattaatcaaaacaaaatatctaagagaacactattgtttgatctgttgatccttattcaatagtgtatcttaggtgatgattttggattacaagcttacgtatcccagtggaaccgctacagcaatgttgattaacagtttccacaacaatactggagctgagcttgcagggtaattgtcagagattcatcttcaatattcaactccctgcaaaacattgcttgagtttcattaaaaatttatctccaatattattcacatcagaaaacaagtcaaatgtcttgggaaatacctgagccttagcttagtttggagttgcttcaagtggttctttagtggtattggaggtgcatgtgggtttgatcactttcccacacttggtttgactctattcaagaacacgtaagttaaccaatttcgtacagtttaacaataagtaaatgagaatggtttagcatgtggatataattggtaacgagtcatgattttttctgctgtgcaggttttactttgatttcagtcctacttttattggatgtggcatgatatgtccccatttggtgaactgttcggttcttcttggtgctatcatctcttggggttttctctggccatttatatcacagcatgctggggactggtatccagctgaccttaaagccaacgatttcaaaggtctctatggatataaggtacacaataaaccgattaagtaggaagaatttaatgttagtagatgaatttcataggtactctcattgtggtggttactgattctctttcatataattactgtacttataggtatttatcgccatttctatcatccttggtgacggtctctacaacctcattaagatcattgttgtcactgtgaaggaaatctgcaacaaaagctccagacaacacaacctacctgtctttaccgacattttaggtgcgaatatatatgatcctgattcacaatcgcgtttgttagtaatagtcatagttattaataaaggtgtctctcatgaccatactgacaacgtctgtctcaaatattttcttaagagtttctttctccattcttaattcagataaaagtaagacctcagtattaatgcgggagaagaagaaaagagatatcatatttctcaaggaccgtatacccctcgagtttgcggtttctggttatgtgggtcttgcagctatttcaaccgctataatcccgttgatattcccaccattgaaatggtactttgtcctctgttcatacttagttgccccgggtcttgctttttgcaattcttatggagccgggctcacagatatgagcatgccttcaacctacggaaagactggtcttttcatcgttgcttcaattgtaggaaataatggtggagtcattgccggtttagcagcatgtggcattatgatgtcaatcgtctcaactgcagcggatctcatgcaggattttaaaacaggttacctcacactatcatctgcaaaatccatgtttgtaactcagcttttgggtacagcaatgggttgcataatcgctcctctcacgttctggctgttttggactgcttttgatattggagatcctgatggtctatacaaagcaccttacgcggtcatctaccgcgaaatggctattctcggggtcgaaggctttgccaaactgcccaaacactgtttggcactttgttgtggattcttcatcgctgctctgattgtaaatctaattagagacatgacaccaccaaagatctctaagttgataccacttccaatggcaatggctggtccattctacataggagcttacttcgccatcgacatgttcgtaggaaccgtgataatgctcgtatgggaacggatgaataagaaagacgcagatgattactcgggtgcagtagcttcaggtctgatctgcggagatggaatttggaccatcccatccgcaattctttctatattaagaatcaatccacccatttgtatgtactttagaccatcctagacattgttatcatgttaaaaatttgttgcattatggcagataatagagtttttatatctcactctagaacacaaagtgccaatagcaacaagtatgtggcataaagtcaaacagacaaggttgaccaacgaaactttatttgggcttattctgtaagcccatagacttttgttaagaagcccatacgaatctctttcctcgtcttttcgaccgaaattattaaaacctctaattcctcctcaaaaaccctaaaatcccaattgagaaaatttagacgctcaaggttttgtttacatcttgtccggtggcttgaaacaaattcaacttctgcgtactgtttctttgttgaatcatggatccagcgcccgaacccgttacttacgtctgcggaggtaagctcgacttgaaaacttcatcgaacatctaattttgctttgaaatcaaagttttgttagtatctgtaaaagattgtagctttgtgaaagtaaatgctaaagttgcctcttttgagtagccatatgaatcctaatctattaggaaatttcataatctggcttagttaggaggcataaatcaatcttgatcatcaatactttactgtattgtattgatctatttgacttgaggtctttttgaggaggagctttgcttctgctaagtatcaagcttctcccaagcagcctcagacatatacacttttaaaccaaaattcataagtaaaaaggttgtcttcgttttatgggtttgcttaatttcttattttctgtatcatcagattgtggtcaagagaacactttgaagtctggggatgtgatccaatgcagagagtgtgggtaccgtattctctacaagaagcgtacccgtagaggtgacttattcttaatcctccttttgttttgtaatgtttttagctttctttgattcctctttttttggatcttgttcctagtttataaaagtgatggcaccattttgaatgcgtctcaacatatacatgatatcgggatccttttttaagtcttgatcatagtttatgatactgatggaacgattttcagtgtgtcttatataacgcaaatgttctaaggatccggtttccgaatttatcttgagattgttaatctgttggttttcttgtacaaaatgtagatgttgtaaacttgtttccggctaatttatttgatggtttattctcttgcagttgttcaatacgaagctcgctgagaactactactcctgaaggtggttcatagtctgttaagatgggttgagactttttggcactgtttgtgatatatatatcgacatggtgattgctacattgccagttcgatttgatttggtcacagtgtgactgtgtaatgactttaccgttttgatagatgtaattcttggaataactaagttcacattgctataatccttgattggctataatctctcgttgttttgctacctttgttctttagtgtactctgcatttagttgatcagattctggtggtggaaaaggtagtgactaccatatatcaatcttgtttgctacatattaagtgttcggaagaaatcgaagagagacatgaagagaacccaccacaatgttactctcaaaatacctttttagtaccaagcagatggataaattagtgtgttaatatctgtctaacgaaacctttggtaagtcctataggctatggctacaaatagaagagtcaacacaagagaataatcgcggcaaatatgctctctattagctttcatcaaatacaaactatgagttttcaatctcatgatacatttatctcgaataccaaatgctatgaaataatctatacgttactaaatactagtactctcttcgggtggttacttcactatttcatatcattcattaccgaatttacaagccttaattgccattgctatcgtccttggtgactgtatctaaaacctggctaaactcattgttgtcgctgataaactcttccaacaaaagctccaaacaaaaccaactgtagcattttttttttttttttgtcaaaaccaactgtagcatttatataatagtctgggttatcaaaatcaaatacattctcagagtttctatctgctgacataagaaagtaccaacacatattatcaaacaataaaaagtaccgaaaaacatgtaaggtatggttccaaacttaatcttcaggatcatagggtctgttgtcaaaatcctctctgtcctcagctatgtcagggcaatacctgtcagacaaaatctcaacttgttctgcaaatgttttcgatttcggtacgccgatatgaatgatcatctggttccaccgttttctacaagcttctccatctcgattctccaaaagattatcccaatccacatcgtcgatacaagcagcatccagtttcaaaagctcttccaagagcctatagtcatcaacgttagcccacattccctttgctaccattggtgatatcaactgctcataccatttctggcagcaagtcacgtggtcccgtgtttcaagtacgtcgcttatagccatccaagggatgttatctttgagcataccatgttttgagtgtttctctttgaatgctttcattctaaggtctttgttgacaaggtcaaagaggttttgatactcctccctcatccaatgtcctttcttcttacctgccaatcttcctctcctccaagcgtctttcacatgcttcctgtgcttacccattgcatctgcaagtgttttccaatcattcccgtgtgtcttttgaaactccataacgagttcaatatcctctttcgtccatatcccctgagatcctgcttcaaatatagtatgtgcacgatgatacacactattataagtcctccaaggtaaagcagatgtaatttctttccaacagcctttaagttgtgggtatgccttgcattccataaccatctttatcccctcatctcctaaagcatggttatcaatgtattctaatacagcattctttaccatctcatcttcttcttttgtaaaccgcttacccctcaccaccttaacttcttcttcatcatcatcttccgttccttcatcatcatcactaggaaaaaactccacttggtcagaaaacttcacccttttacttgatgtagatggggtggtcaagtcttcatcacttttatcagacttttcttcagcctcagagacttcactttgcttcttcttcttcttcttcttccttctcttctttgcgtctttggtagagttcaagccgttttcttcagtctctgaatcctcactttgtttctttttcttccttttcttctttccatcatttgtagagtccaaattgatatcttcaacatctgaatccacacttggtttcttcttgttgttcttcctcttcacctccttgtctatgttttcttcagctcccaaatcagtatcatcccgctttctttttccctttttcttatcagatactttggagctttcagtattttctatcacatcaccaccagattctttcttgctcttcttcttcttcctcttcacaccatcatgagcttcagaatcaacctttgtctccttacttttctccttggatttcttctccacaccatcatcctcagcttcggaatcagcctttgtctccttacttctctttttcgatttcttcttcacagcatcaacagcttcagaatcaatccttattggcttcttcgacttcttcttcttcttaactataaaaacctcatcacctagtttctcactttcacgcccagttatctccatatcttctccagtaaaaccatccttattctctcgcttattcttcttcctcttcttttccttatccttcatagaactgtgctcggaaatgaattcttcaccggtttcttcagaatcaaccttagcgtcactctttttcttcttattcttcttctcctcagccatctcatataccggcggacacggttacgaaaccctaatcacaaaaaccgccgcgactttcgctcaaatctaaatccgaatttcgattgagtgattttaagacacagcgatgctgagattgattgtgaaggagcttttggatacggcggcttccttcatgaatttgagatgattagggtatttaattacttttgttaaaaaaaattcctttgaacttgggtcttcaatgacccactacccatatttggggcttgagtactactaggcccaacgtattgctcttgacgttatcaagttttaacaagagtttgatctaatttctatcacttatgttacaacttacaaagttggtggttatattgtgaaatttctaaatgatttggaagaaaaagaaatcaaataattactactagaataaatcagtatataagagaccttgggaaaagtatttaaaaatgtagaatcttcttggattaacttcaatgttttgtgtggtggagtttggatcttacatgatcatttgggacaaagctagttttcatcaaagggatgcaattgaagaacatactaaacatatataatcgaaaactgatataaaaaaacataaacacaaaggtttgttttgagttttgaccttattatcaagtgatgaaagaatgtaaaacttagtttttaatgatgttgataacctcttttgatttaaataaattctttttaatgtgtgatttatgctcaaaactaaatttttctaatgttttcatattatttaattttgcccttgttaactctcatggatgttgccatgttgatttgattgagctttggattggaatttttttttttatttttttttttttttttttttctttggattggaattcattcggtaagtaagaatatttcgtgattatagaacttctaattatgtaaaaaaaataaaataatgcgtgaaaataataaaaagttgttaccctttttttttacttaggtcaagaggtcacaacacacgccccaccttgaatctgagagagagagagaagtacgtccccacaccttgacatggtcatggagcccaagaagaaccaaaatctaccaagtttcttaaacccatcacgacagaatcaggacaacgacaagaagaggaaacaaacagaggttaaaggtttcgacattgtggtcggcgaaaagaggaagaagaaggagaatgaagaggaagaccaagaaattcagattctttatgagaaggagaagaagaaaccaaacaaagatcgtcaccttaaagttgaaggaagaggtcgtagagttaggttacctccactctgtgcagcaaggatttatcaattgactaaagaattaggtcacaaatcagatggtgagactcttgaatggttgcttcaacatgctgagccatcgatactctctgctactgtaaatggtatcaaacccactgagtctgttgtttctcaacctcctctcacggctgatttgatgatttgtcatagcgttgaagaagcttcaaggactcaaatggaggcaaatgggttgtggagaaatgaaacaggacagaccattggagggtttgatctgaattacggaattgggtttgatttcaatggtgttccagagattggttttggagataatcaaacgcctggacttgaattaaggctgtctcaagttggggttttgaatccacaggtttttcaacaaatgggtaaagaacagttcagggttcttcatcatcattcacatgaagatcagcagcagagtgcagaggaaaatggttcataaagctcaaacctttaaatggcttttaattagatatatttagcgagaatgtgattgctagtgaaatctcaaacttgatagcttattcatagcttattttacttcgatcagcaagagaacaatggttcctaaagctcaaaccttttttggcgtttgctttagattgtgcatacataaagtgagaagatgaaatatggttttgctgaaatctcaatgtgctcattcatagtttattttgctcgacctttctttaatcaatagctttgatgtactgattactttataaagttaagaagtaagttctgctctttaaactgtactgaatggaggcttctctgcataattaagcaaacactctgatgattgagtttcgttgtacaaaggaaagtttttgccttagttagaaattcatcttgtttctttgcccagaagctggcttgctgatagaatttggactacgctacgttttcttgggtgaaaaacaatccgcgtccttccacgagaacagtgaaactgtacgatgttcttattgtattgtgtcaacagcccataatcaatgaaatgggcctcaatgacagtataagccgaaaaatattcgaatgcgatctagaactaatctgaaaccaaacttctcaaatcattaacatttgattagggcctaaaagtccatccgtattttaaaaaaaagttgataacaaatgcaaaaatacaaatatacattactattaaaactcaatctttctgattatatgtggatggagaagctgttttgcagtgtggatttgaattttgaagttcttgttcaaaaaagaaaagaaacttggtcaagcttcaaaagaaagaaagaaataaagacaagtatacaaatacgttgacttcaattaatatgaagatagaagagaaagatatagaaatgcgttttaaattggcggtgggagatatgtgattcccttggtcccgctttctcgtttgattcggtaacctaaaccttctccatccaagaagacacaaacaaggaagaaattaacctacgtacgtacatcatttgaactacttatatctattataaatggaaaatctattttcttcttctctctcttttaaccgaaaaaggaaaagtcctcgaaataactctttaatataattcatgtggaaaccttctatatattttttgcatgcttttttgaaattaagtaatggcatactaattagaagaagacgaaaaataatatgtctaagtaattgagtttcgtggtcaaggcaaatcaagattgcattctttaattaagtgtacaaattatgatgtaagaaccgttatttggcataacctaatatatattaaaaactgattttttttttttttaacttctgtaagaaatggttttcttaattaccaatcatgatctattattgtaaaatgtgtaattttgtgttgcgattgaagtgttcttagataaagatatgtcatatgcatgatatcatctatttgattttgagaaaataaaaacataacatgagaacatcgtagagagtaagatacatgacaaagagaaagaataagctaagaagtcatccaaaaattgggaggcctactctcaactaccaaaaatacaagtgtttgttgtgttaggtcatttattcagtcacctaaccctaactatatgaaatacgttaaaattcatatatagaaaaataaagaagaaatactattagtcaatataattttttttaacaaaataaaaataaagaaagaaacactattagtcaatgaattaaaaaaaaaaaaatccatctttcgatcaagaccgtccaagtattctcctttcacataactcttacgttttacactaaacaagacgagatttttatgagcttgtggctcccacaacaatcctcattgatttctccatatatatcacatgagaatccaactcgacttcatactaacattcatcccaaaagttccattctttttcacaaagccattgtgctgttttctccatttggatcaaaatggtttgtgttatcattcttgtttttgtttcaactaagtgttcaaaattctgtttatttattaagctcacgcttcttttgtttttcaggttgctgagaacaataaaaacaaggacgtaacactctctgcatcaatggacaacaacaacaacaacatcaaaggaactaacattcatcttgaggttcatcaaaaggaaccagctttggtcaaacctgaatccgagacacgaaagggcctttacttcttgtcgaatcttgaccagaacatcgccgtgattgttcgtacaatctactgtttcaaatccgaggagagagggaacgaggaagcagtccaagtgatcaagaaagctctgagtcaagttcttgttcattactatcctctcgctggacgcctcaccatcagtcctgaaggtaactgactagttcgatttcggtctctatcttaatcaaactcagacaaaaacatcatctaatgtctatgatgtgggtgaattcaggtaaactcacagttgactgtaccgaagaaggagttgtgtttgtggaagcagaagcaaactgtaaaatggatgagattggtgacattaccaaacccgatcctgaaactctagggaagcttgtgtacgatgtcgtagacgccaagaacattcttgagatccctcctgttaccgctcaggtctacttttcttcctcctcaagcaatcgttttgtttcttagggttgtaagttttttgaagttgaagggtttgaaattgatttgaattaacaggtgactaaattcaaatgtggagggtttgttctcggactctgtatgaatcactgtatgttcgatggaattggagctatggagtttgttaactcatggggtcaagtcgctagaggcttaccattaacaactcccccattctcagacagaaccattctcaatgctcgaaaccctccaaagatcgagaatctccaccaagaatttgaagagatcgaagataaatccaacatcaactctctttacaccaaagagccaactctctacagatccttctgctttgatccagagaaaatcaagaaacttaagctccaagcaacagagaacagtgagtctctcctcggtaactcatgcacaagttttgaggctttatctgcttttgtctggagagcaagaaccaagtcgttgaagatgttgagtgatcagaaaacgaagcttctcttcgccgttgatggtagagccaagttcgagcctcaactgccaaaagggtacttcggaaatggaattgttctcacaaactccatctgtgaagctggggagcttatcgaaaaaccgttgagtttcgcggtgggattagtcagagaagccattaagatggtaactgatgggtacatgagatctgctattgattacttcgaagtcacgagagcaagaccttctctttcctcgactcttctgatcactacatggtcaagattgggtttccacacgacagatttcggttggggagaaccgattttatccggtccagtagctttgcctgagaaagaagtaactctgtttttgtctcatggagaacagaggagaagcatcaatgtgcttcttggacttcccgctacagccatggatgtgtttcaagaacagtttttacagatataatatgaacaacgacaaaatacaaatatctggcaattattgtcaaaacctattcgttttactctgtttttcttgcttccttttttttttatctttttgatttatgctgaattattattgttatcttcatcttaaacttgtctgtatcttgcatcaagtttcaaccataaatttatattatttcaaactatattgtaataatattattacttgaactgtttcagagatgttgatgtttttaacaaactaaaactcatatataaataaaataacaaaagtctaaagataaaatacagaggacaagaagacagaacagagtgatcctgttcttgtcttaaggacaaagttagagtagaaacaaacaaagacttagattattgcagtttgttctctattacttgccacacaaatgaagattcttctctaaaggtctgaaatttaaagcagtaaacccatagacacagagattagatatcttggacttaaacacaacctgctccgttgtagttctgaagccaggaacgttgcaggaatctttggacctaccgatcaagcttgcttgacaggaagccattagagaatctttctttgcttcagcggcgcaagcaacgccttccagagacgttatgtctagcttgtagagtccaagctcatttgtggttcgatttgcagagaacgtaatcatctctctagttctcgatgaagctgaattgaatctgcagattattctcacttccacacctgtatttttttgttcagttaaaacaaaagtgagagacattttaactataatttcaaacaatgttgataagattctttaccgggaatgaaatagctgtgattggagaaactgttgttggagcagacgtcgcagtaaacaagacccattacagtgatctttccatttggtttggctgaagaatgtttcagagacagagagtttaaggacagaagttgcagaagtaacagaagcattatcagtttctgcttcatgttcacaagtttcagtttttttctttatccttggataaacacttgtttacagatgaggtttcctttttgtttatgtggttgatgaaagaaacagacaaagaatgggccaagtggttaaagacaaaagaacaaacaaagatcaaacagtaactccattcaaacaaagcttcaagcttgtcttttttataaaactcaagactcttgtggaaaaagagatgagtaaagagaggcacaaagagatgagaggccaattaaaggaaaagtagagaaactgagagattggttggttaggtttaacatttattgagctctcatgctctctattttaagggtttttgtctatgaatccccttataaaaaatggctaaaactggaaaatggaagggagaaggtaagccactagtgtgtatatatatgtgtatggaccactgaaagtgaagtgtaaacatcatcaattcatcagcataaacaccaagaaagtagtcagaggatatggctctttaaatatcaatacaagaagccaaactatgatattttcccggtttactctcggttgtggctgaattctggaaagagaatttcaggttaactaactatacaaagataagctcacattatagacttttgttcgtcacattatagaacagcataagactttattgcataacaatttcaggtttaagtgtactagagaagataagcttacattacaagttcatcagttggaaacaatatatgggcttgagctttaaagaaggcccattaagcttgaaattgttcttcatgtaagattgctgcagattttactttaattttttttttctttttttcttttgcccttaaattcttgtaatgcttctaggtgactccatccactttatgtgttgtttcccaatcatttctattttcaactttattttttcctttcacaaattattttaagttttaacattattttcttcaacatacgaaatttatacagtagtttttttttgcaggtacatataaatcaatagttgagaaaaagtggaaaacaatagagataaaaaaaattagatgtaaattcgctgtaaaacaaaatgtttaaatttcttttccgttatcgaatctcttttatgaataacaaggtcgagtactcaaggtaaggaaacagaccattagaaaagtgccacgtcagcttatttcgttcttcacttttagcttctgaaaagtactttacctgaactaaaacgacggtgacagactgactccagtagctgctaacagtcgatttttaaaatattatatttatttgcaggaaaaaaaaaaagtgaaggaagaagaagaagttggagaagccaagagcaaatctaattctctgactactctcattttcatgtcggagacttgccgaaatctaaagaatttcttcaacggagactgaaaagctttctcttttcttctttcgttatcttcgttttagtgttttcccctttgcttacatttgaagaaatcgagagcaagcgatagaaagtgagagagagagatgtatgtggtgacgcctcctcaaagatccggttttggatccgattgtgatttacgggtttaccaaacatggaaaggaagcaatgtgagttttaatgtgaaagctttaggttttggaattacttgcttctgtgtttatacttgagctagttttctgttatttttcctattattgtgtataaattaattattaatccgttcatgggctcagtttactctgtttccaatcttgtaaagcttaaaaattgggacttgggtttgtgttagaagtgtagctttctgggtagttgtctacatttaatcatgaaatctttacctttaatcaataccttaggacattatctgaatatgcttgctacatttataggaatgcttcttcatacaaaggttatatagttgatgctgtctgtatattgctttcaatgtcgaatttaaatctggtttagtagtaacctagtggaattaaacattttgaggtttgttccttaaatccttctacccaaagtgttaacatattttctaaatttgtcccatttctgcagatattttgtcttcaaggaaggtttatcttcgggccggatgtaagatcacttggtctgaccataagtcttattgtggcacctgttacaattttctgcatcttcgtcgctagcaaactaatggatgacttctctgatagttggggagtctcaataatccttgttgctgttgtcttcaccatttatgtgagtacaaaagtttagctttgcattgtaaaacgttttgtgactggatcattcataacaattaatgcttccctcaggatttgattttgctgatgcttacatccggaagagatccagggattatcccaagaaattctcatcctccagaaccagaagttgttgatggcaacacgggctcgggaacaagccaaactccaagattgcctcgtgttaaagaagtggaagttaatggaaaagtattcaaggtcaagtactgtgatacttgcatgctctatagaccgcctcgctgctcacattgttcgatttgcaacaactgtgtagaaaggtttgaccatcactgtccttgggttggtcaatgtattgctcaagtaagtttctcggtttttcgttttcctgtccgttagtttctgacatcagtctatataattcatctcattctccttgggaatttgcagagaaactatcgattcttcttcatgtttgtcttctccacgactcttctctgtgtatatgtgttcgccttttgttgtgtctacataaagaagatcaaagagtccgaagatataagtatcttgaaagcaatgctcaaaactccagcttccattgctctgatactctacacattcatatctacattcttcgttggaggcttaacatgtttccatctctatctcatcagcacaaatcaggtaccctaatcatttgcctctttctgaaaaaacctctctcattcgatatgcgtgtttaatcgtttgatctttctttattctgtagactacatatgagaatttcagatacagttatgatcggcatagcaacccacataacaaaggagtggttgataacttcaaagaaatctttttttctccaatacctccttcaaagaacaacttcagggctatggtaccaagggaaaatccaatgccgtcgagatcagttgttggcggttttatgagtccaaacatgggaaaggccaatgatgatattgaaatggggaggaagggtgtttgggcaatggctgaacatggtgatggcaaagatggcaataacaatgaacggtttcatgttaacgacaatgagttaaacgagttatcaccagacatggggaacatagtgaatggtgatgagcaaatcaataggccaaacaatcacccgaggaacgcaaactgggaaatgtcaccagaagttatggccttatcagcaagaagagcttagaagcaggttaagagaaaattgaaaggtgttttaaatgtttgatgtattgatgtgttgtgtgtttacacgggaatcaattgtgaattggtgtgatattttcagatgttatgagtatttttagttgttcttcagacatttaaatcgtaaatcattgtgtgttagtgtaatctatgacttatctttcacagaatgagaaaacaaaatgaataccgacgattttcatactgtactttgcatatgataaaaattgcagaaactgaattttcagacaagtggaccagaagaccagacaactcttattatagtcttcattgaagcacggctctgtaataaatgcaaaagagctctaaaggcttcttatttgttcttcaaagctctaaagtctaaaggttagagatttaacatcacaagccaacatttttggtttaggaaattgaagattagcaataatataaagtttttttggcattgaacaaagacaaaacacaatgaacataatcaacaaattggtcaaactaaacattaataagtgcctcaaagtatcagactaaatcattttcactaacatttatgaaaaaataactgttattaactgaggacgaaggtaactgaccagtcaaacatcatagacaaagacaataaagagagtcaatagcattgttcataattgttatttgtatgcacatgttataaattatataaaaagactaaccttatttcaattgagatgtcactattactgttttagcatcctcttctactctttatttagaacctttagtaccttaccatgtgagtgaagagttcaaaaacctctgcaaaaactttcttttttatctctctctcttctttaaacttactttcaaacactaaatagccaaaacttaagataccaaatttcaacaggtcggctttttcgtttgtcttctcttaagactttaccaaaagagatttgtggtttctggagttgactttggttgattttggtgtatttacaggggaaaaaatgtataagaatcagcttcaagagcttgcacagagaagttgtttcaacttaccatcatatacttgcataagagaaggaccagatcatgctccaagattcaaagcttctgttaacttcaatggtgagatatttgagagtcccacttactgttctactctcagacaagctgagcatgcagctgctgaagtttcccttaatgtcctttcgtctagagtcccttcaaagtctctaactgctaagattcttgtaagttctctgtcttttcttcttggttttgatcatacacaaaaaaatgcaaaaagagtaacatcgtatatcttcatgtcactctttatacaaggatgagacagggatttacaagaacctgcttcaagagacagcacatagagctggtcttgatctaccaatgtacacaagtgtgagatcaggatcttgtcacttcccaggtttctcttgtactgttgaacttgctgggatgacgtttacaggagaatcagcaaagacaaagaaacaagctgagaaaaacgcagccattgcagcttggtcctctttgaagaaaagtatatataactatcttccaaattgttccatcaaccccaaaaaagcttctcacttttctacttgaaaccatttttctgtttctctactgtgcagtgtcaagcttggattcacaagatgaagagaaggaacaagaagcagtagcaagagtactctcaagatttaaacccaaagaagtaagaagacgagagacaacaaaccaatggagaagaagaacaagtcaacaagattcaaacaaggatttgttgattgagagattgagatggatcaatcttttgaccaatcaagcttcttcatcatcatcaacatcaacaccgaatcaacacaaaaactccagtttcatctctctaattcccccaccaccaccacctaaatcctccaaaattttgccatttatccagcaatacaaagacagatcatcacaagaagctaagacagagacagcgacagagatgatcaacagcaaagccaaagtcaatgaaacatcaaccagattgagtaagcaaatgcccttttccgacatgaacagatacaactttgtcggagggtgtagcgtaaacccttatagtctggctccagcggttcaaatgagatcagtgattccagttttcgcagctccaccaccgaaaccaaaccccaaccttaacccatcatcattatcatcatcagtcaatgaattcacctcatccaataattcctgctctgttctgaatacgccgggattgggaggccaagagaagaagaatctaactcgcgaaatgatcaaacttggttcagaatcgagaattttggatcaaacccatgatagttagctaaatttggttaatgggttaatctcaaattaaatccttgtcaagtgtttgtcacatagataaattatagaccagtatgtttccgtttcttgaatgtgttcttgttttttttgaagtgtttgaattttctaaaagtccgacatgaactttgaatgcttgcgaattgcacagagaacgaaaacaaagagagagcattaattagggaagaagatgaagaagagaaatgggagtttgcaagaaaacaattaatgggttttgttttgtcttcctccattaatgcgccgaatgctctgctctgcttcccactcttcatcattaatggttttgctctgtaacgtcggttccaacaaataaacttaataattcgaaattataaatttcacaagttacatttttctttgtgtaaagattttggaccatataaacattatggtttgcgagaatgacgtttgtgtcattatccgatttagatccgtataatctatgttgttaggaactcaggattttgctcaaatattcaaattggtatattttgactttgatgaaattattttggtcagaccacgagacttgattgcttctcaattatttgggccggtccattaatttggggccatctaacttttacgtgggccgtaacaaaccgaaacataaaactagtgacctacctaaccatattaccccaaccggacaggaggtaacgagttaaccagccacttgttcggcttggaaatttttttaatcgtctgacaatttatgacgtggatccaagtagcaagaaagctaacatgttgttggatctgatctgatccacgaacctaccataaatcaattttctcattatcttgacaggtatatcttgcattattatacgtcagattttcgtggatacaatatttttaaaatgcaatccatatttacttgatttccaaaaatgggttttttcaaaagcacaatttccaaaaatggatcacaatttattaacggattctcaacttgcaaatcaagcttaaattataatcttttttaactcagaatttaatataatctttttttactcagaattgattaaactaacagttatattgatcttgaaatcacctttaatatcttgttttaaatcttgtgtcttgcaaatcacggttcataaatattggagaatcgaataaataaattatttctattcctatattgcgtaattttattttttgactctctattgcgtaattacactcgtcagatttcgtggatgagtactcagtaaatcttattttaattaaaaagcttactagtctaattgctgcaaatttgaccaactatacagttgtgttgcattacaatatttcaaaccattaataaaacgtgtaaaacatatttggagttgaatgaaactacattttcctttatgtcaaacgcacttttcaagatatatctcgaacaatttacgtattattttcacaaattttgttccacaataatttaggttattttggtttttgttgttgttttttgagtctgaaatttcaaatttgtatttttttttaatatatatttaggcaggaatctttaaaatgaaaccaataatatattcactaagtttggaaaaaaaccaaaatttcataattaacgggacaatgactaagctgtggaaaagataacataatctcccaatgactcaatgccacgtataagatgagaaccgtactcttctgtgttcgtaccagatccctcaaaaggcgggaagaaaccatcaagaaaggcacattgctgacgtggaatggaatattcgaacacgcatatccagctccttcctcctttttcctcatatcccttttttctcaatataaatactctgcaaaaaaacacccacaaatcctcacacaaaaacgttttcgaaatccctaatctactctctcttctctatatctctactcttgagaaatggctcttagaactgtgctcgtctccgacgtccctagcctcccggattctgtctacggtttatccgaaggtatttctctctctgtctctctctctctgtttcgtcggctattgagctgttttcgtttctgatgatcttgtctttgattacaggtttagagttgagcaaaccgacgtcgtttaggttaccggggttttcggtgattggacatagaggaatcggtatgaatgtgttgcaatcgtctgatcggagagcgagaggtgttaaagaaaactcgattctttcattcaattccgccgctaagtatccgattgatttcattgagttcgatgttcaggttggtactccgatctatgtaatcaactttaggatttgaatgagacagaggattggggttttatgtttatgtttttgtgtgtggaagaagattctgatttagatatctatttatagattcttagaaattgaaatgaaaaataagaacatgaagatttgaagaaagagagagagatggcacatagagaagcattccaagctttgtgtggtttttcttttgtaggtgacaaaagatgattgccctgtcattttccatgatgatttcatctactctgaagaaaatgtaagtctacattgctttcttcatagatcttggttttatatttctggatcttgtcttcatggatctggtgtttgtgtgttatggttcagggtattgttaatgagagtagagtgacggatctgagtctgtctgagtttctcctttatggacctcagaaggaaactgagaaaatagggaagacactgatgaggaaatctaaagaagggaaggttttgaaatgggacgttgatttggatgattctctttgtacgttgcaagaagcttttgaacaagttgaacaaactcttgggttcaatatcgagttgaaatttgatgatcagaccgtctatgaacgagagtttcttgtccatatcctgagatcagtactacaggtatgctcaatactagttccgtattcttccttctttttcttgttggagtatgaatatttattagggtccaatagaaccatttgttaaaagtgctcacaattaatttgatctcttgagacctttttgtatcaatgctgttgacctaaaactgctggtccaagttggatctagattgattgagacttgttaacttattattttctgttttttccattctgtgacaaaactacaggtggtctctaattatgctaaagacagaccagtaatcttctcaagtttccaaccagatgcagctaagcttgttagggaactgcagagcacttaccctgtatgttccattctcgctcttttctttgataaataccaaaaaaaacttcttgacttcttcatggagaaatcacttaagatttaacaatgtcatatgaactgaacccaggttttctttctgactgatgcgggaaacgagattcacaatgacgagagaagaaactcgctcgaagaagccattcaagtttgcttggaaggaggtcttcaaggtattgtttcagaggtaaaaggagtgttcaggaacccagcagccattagcaagatcaaagaatctaacctctctctcctcacatacggcaaactcaagtaaaccttcttcacttttcttaataaagtctaaagaccttaagtttgtttccttattgctgttggatccgatcactgattaatcagattttaatcttatttcaaatattgtgttgcagcaatgtcggagaggcagtgtacatgcaatatgtgatggggatcgatggagtgattgtagattttgttgaggagattatagagtccacgacacgcatgatgataagaccaccaccatcatcatcaccattaccatcaccttccaaggatgatgatgttgccattacaagacctgagttttcacagaaggagatttcttttcttctcaagcttctctctcagttgatacaacattgatatctctgttttttcgttttcttttatcccaagtttctttttagggtttgattttcttattgatttaattattattctgggtgtattacccaatagttggaattgtaaataattataaatttatttctttttacaaggattaactttctcaaaagaaaatcagctattttttaattaatcgaaaaatttagaaaatatatacgtgattatcttttatataagcttttaagatatgtcacccaaaacaagctaagcccaagatggatctagactttgaaactctcattttagggcaaaaaaatggttttaaggttgtgttatggattatcttttatataagcttagttatatcactaggtgaccaattgtaatgtgctttcggtatagagtcagagtgatatgacgggatacgtagtttgtaagcgagaaggtgtttttcttagtaaagcttttcttatccgcaagaagattgacttcaaacatacagcttatctcttgtgagaggtcaagctttataatggagtgagatatgtattttcagaagtcttaagtatggacataagatattagtttcacatatttcaatttttgaaagtttgcaagtaaaaaccacaaaacaaacgagtctgtaggcacgaccgcacgagtgctaaagtccgctgcatattgatagttcgaagacggtgttttgtcgatattattcactatttacgtgtcgcggattgattagcgactaaagaattagccttaacatatgttttgttgaaatatattttgagtcaagattattcttaattcccaatagaattttgaagtatttgtctttgttccaacctttaaaaggatgcttgaagttccaatcaaactacaactcatgctctctccctcttctgccttaactatgaagaaaacaaaagacattcgtttttatttttctcttcagtatcaaattcaagaatccaattccaatagccacaacataaattctctttgatataataatctaaaattagaaactgattcacgtctctaaattaaaatttctgatctattcaagtaactgttcttatatgagttttgtttccatacatgctttgatttaaacgttttctactacaattatatctacctctcaacactggaatccaattttctttatacggtttatatcaagtattgattgtttttgtccaaaacaaaaaccaagtattaattgatatagctatagtacactcaaattttaatttgctcactataattctgatattactttgaatagaaattcaaaattatctaatcacaaagttcagtttatttataatatggaagctttgagcaaaataatgtaaatataattataaaaaataattagaaataatttaggacaactgaaaaaaatatggatttcggtctataagtttctattatatatcaaaggaagtacttttttttttttgataaaccctaaatatcaaaagtacttttcgtttttgccaaatatgtttaattacttattttcgagatgttatcttccatttttttcagtatcattgtaatcaatgataattataacaaaatcacgatatgaaaaaaaatattccattaattgatgtaaaaaaaaaagtcaaatatcataacattaaaatgtaactttccccttatttactaactaaagctcatgcatgcgtggcgtgatattatctattcaattccttttctaaaaaggttttcctagtcctattaggattaggaaacagaggttgctatataaatacttgattcgctcgcgtttatctcagtcacaaaatccctacttcttcgtaacaacttactaatatataggcagcttggagcttattcattggacgacgaactctttttcttcatctctttctgttttctttttctcttcttttgttctgagaataatgggcccaacatacagagctttgccagtaggtatgaggtttcgtccttcagatttggagttggctgtttactttttgatcaagaaagctttaggacttcccatgaaagctcttactgtgcccgacgaatgtaatgatatcttctcaacacatcctcgcgacttgcctggtgagaatactttctccgatccttttgacaaaacagatttgatagagtttttgagtttcttgatttaactttggctacttctttcttgcgtgacaagctttattttgtgaacttgtttttgctctgttctttcaggctatggaagcgaagagcattggtacttctactgcaagaaacccaagaatcaagttactagaacgaaatcttataacctctggataccaacgggagaaaaaactgatgtgttagatccaaagaagaatggcggcgaattagtcggtatcaagcattcgtttactttcattgagaacgaagaagaagaagaatctgataacaagaacggcgatgaagaagaacctccacaatgcaattggttcttggatgaaatcagcctcccattgacagttgtggatactgattggactctgtgtcatatcttttacgagaaggttaaacctgaatttggtaatttgcatatagtcgaatctgaatccgaatccgaagaagaagaagaagatgaaagtgttgataagcctgcagagagtttggatagtgttaaagagaaagatggaactgttcttcctccacctcctgctacaccttagcttcttcatgatatagtgttttactgttagtgttggtggattgtagattctctcaaaacctgtcaacgtccaaatctttattacctctagttgcatacctattgttttaaagatgcttatttcacttcaatatatcggttaggttttttttctttttctttccacaatatatcgattaggttatgtggctcgagagactcacttgctcgctgatacaaaagttccagaacaaagagatcatccctcatctaatggctcatgttagcaattgtccgcctaccttgctaaattgcgctcctacacctaaagaaaactattgatatgagtcgtagtaataatcaatcgatctctctattccaataattgttaggagggtcataatatatagaagaagatagatgatatatgttatataatatgatatattgatatgtccaaaaatcaaattgttcaaaagccttaatgaaaaagagaaagagatgtttgaccagcttaaaaacttccggtcaaacacctaaaaaccttttttccgcctttgtcataaatctttgactttttgactttttccctctcaacatctcttttcgagatttcaccacgtgtcaaacctctcatctgaaccgttcatcttacacgcgtgagattatctcattttctcctcctccgtctttctgctgtttcttcgatctgtttctttgaccagaaaaacaaaagcttcaaactttttagcttcttcttcttccttcaatgtcgttgaacacatcccacgatacttgacaaaatatctcactctttcgtctctctgttttcgactcgcaaaccatcgaagcgccgattaatcttagaggaatttcttcgtgattagggttttgtttagttctatctggagatatgatgaaagcttcgtttggaaggttaagaagattcgcattacccaaagccgatgcgattgatataggagagctttttcccactgcacaaattgaaggtcttgctcgagccgccaaggtaaattttccctcttttcactgatcttctctcatgattctctgagatttagttttttttttcttttcaaaatcgtgagttattgatcacaagattgtaacttggatgagtttttgtggataaaaatttccgatcaaaaatcacaccctaattggaaatttcaggacttttacagttatagaagtttgttcattaatttctacttttatagacttatcttatggagaaatttggaattggtatttatatcagttatggtaagaaattgatattgtaactgatgctagttgttgattggttgaactagaactggaagatacattttatgacctaagcttattactcaattgttttcaggatatgcaagatatgagagagggttatgatagattactcgaagtagctgctgctatggctaatagcgcatatggtaaataagcattcaacctttatgaatctccacttctatagcttcatgtatgaatttggaaggttgatgttgtcaaacattgtgactgtaaagtgtacggttgcttcatataagatggggcttgctatacccgagctttattggattgaattagctttcattcatattgtttctagcggaggtcttcgataatattatcattttgcgaaatcttcatttttagtgtctctagaatttcccattaagtactttcttaaccttgtgagaaacctttgttgattcatataagaacatcagtatattgtcagacctcatcattttttttttttcttttgttcggtataatcagagttctctgaatcattgggggaaatgggctcatgcttggagcaaatcgcgcctcataatgatcaagaaagtggtaagattttgggtatttagctatcatggacgtttgtttgtcctgtttccatgctgtaacattgtttcttctgcaggtggaattcttctaatgttaggtaaagttcagtttgagcttaagaaactcgtcgacacttatgtaagttgtatgttgcaactttgtacttttcatgaagcaatatgtataattatgaacaaaactgaggtagttcttgtttcattcttttttttctccttcagcgttctcaaatattcaagaccattacacgaccttcagagtcacttctcagtgaccttagaactgttgaggtatgccctagctttggtcttttacagtcagagattatttaaaagccggaaaagttcacggtttgagcaagatttaaagctaaagtgaacaaaaaagcacaaccttaataaagaccgctgattttgtcgtatttccttttcttttcctctcaggatatgaagcaacaatgtgaagaaaagaggtcagtgactttctgcaatgtagttttttattctctcggttttgatttgataaaatcttgccttaacctctgactcttacttacagagacgttgttaagcacatgctaatggagcatgtgaaagacaaggtacaagttaaaggcactaaaggggagagacttattcgccgtcagctagagactgctcgcgatgagctacaagatgaggcgactctgtgcattttccgattgaaatctctcaaggaagggcaagctcgaagtctcctcacacaagcagcccgccaccacactgctcaggtaccttctgaataaaattactattctatgtaagaaaccttcctgcaatttctcaatcaatgtcgcttatactttcttatttttgcatagatgcatatgttctttgctggtctgaaatcgcttgaggcagtagagcaacacgtcagaattgctgcagatagacaacacatcgactgtgtgctctctgatcccgggaacgaaatggattgtagtgaggataatgatgatgatgaccgacttgttaatagagatggagaactcagttttgactacataacaagtgagcagagagtagaagttatatctacacctcatggatcgatgaaggtaatttggattttaaattgaacctgaattgggaaagaacaaatttattcgttaaaaagtaagctcatgtactgccatttctgtatagatggatgacacagatctctcgtttcaacgcccttcacctgcaggatcagcaacagtatgttcttttcttgatttttatgtcagatttaacatttcatgtcttgagaactctcagttagtcaactgtatgagaactgcattggcgattctgtgttgaagtctattctctgatgcaggtaaatgcagaccctagagaagagcactcagtttcaaaccgtgatcgcagaacgagcagccattcagcacctctgtttccggataagaaagctgatttagcagatagatcgatgaggcagatgactccatctgcaaatgcttacatattaccaactcccgtcgactcaaagtcctcaccaatcttcacaaaacctgtcacccagacaaaccacagtgcaaacttatggcattcatctccactagaaccaataaaaaccgcccataaagatgcggaaagcaacctctattcccgtcttccccgtccttcagaacacgcattttctggaccactcaagccatcctcaacccgtcttccagtaccagttgcagttcaggctcagtcatcttctcccagaatatctcctaccgcttcaccgcctcttgcttcttccccacgaatcaacgaactccatgagcttccaagaccaccaggtcaatttgcaccgccacgacgctcgaaatctcctggtttggttggtcattcggctccattaacggcttggaatcaagaaagaagcaatgtagtagtgtcaaccaacattgtagcatcaccacttccggttccaccgcttgttgtaccgagaagctactcgataccttctagaaaccagagagcaatggcccaacaacccttgcccgagaggaaccaaaacagagtagcctctccaccgcctcttccgctgactccagcgtctctgatgaatctcagatcgctgtctcggtctcatgtcggggaagttgctcagagcggactaattagaggtaacggaaacaaaactaacttactgtatttgtaacatatctttaatcatcaatgattttaagacatggtttgtttatattaacgcaggagtaaaactgactgaacactgaccttgtaacggttgcgtttgatcgaaacgttagttgtagaaactagaaagagacccataagtaaatatagaagtcgatatttttgtatttcgttagttgttgaatctcctaatttgttcttaagcctccgatattttggatcttttttatccttgctttgaaagcaacgtcaacggaaaaattactttcttacttaactctgagaaatacgattaaaaatgagaatttaaaggaaatgatacacttttaaattcaagaaatcgataaaccttactataattataactttttgatcaagaaaatagatggatattttctttctaattatggattttgctttacacaaagggaagtgaaaatgacagtaacatgaccagaatttgggtagagagataggaagacaaatacgtttaccttgtcacgtgagcaacccaaactggaaatcacgtgatgattctcactagcaaatgggccaaggttagtaggcccatgtagaggataagtacctaacttctatcttctctcctctaatcttcttctttagtttgattgatttgatttgaatttttgtattcaagagcattattctctttgattgtgtataatttgcatcaaatatcctaatttaaagttttgagatcgtgatttgttgtgaatggcgtgaaactgttgacgaattgacaaatttttttttttaattttttgatatttgtaacaaatcttttaatttattttgccgttggggaaaaaaacgataattatgccaaatgtttctaacacactacagtttccagaaaattaaaggttaaaaaaaaagttaaaaaaaaaggagagctatagaaatggtgatgcgatgttgggatttgtttataaagccaagagacgaagaagaagagttctcgatcatatacattctattcctttttcattttttctctttcgaatcatttcttcttcttcgtatatattcttctccaattcgttcgaattcagtggtgtcgatttttgggggtttctgtgaataaactttggattgcgtatgaaacgtttcatccacagattatgtaattgattgctccatcggtgcgtttgatgatcgattattctcgttttctttgattttggtgttgctctgatgatgatgatgatgatgagattatctcttgatttgattttatatgatcacacaaaatgttctctcctgtgcgatctctcgttcagctcgaaaccttttggttgatcttcaattttaggcggaatttgtggttttgtgtgcttagagatgtttgcttgaatcttatacactgagagcctgtgagaatcattttggtttatatatataaacatctctttacttcttttgaatcacatcatctgtttgttaatctgtgcattattgaagcttatgtactatgttcttcattgattctttagcttaagattggtcctagtttatatgatcatgatctgtttcatcatttttgttacttctacaaattttgttgtggacttgtagtagtgatgcagctcaataatctgctagctaagttttttggaatgtgttggatatgttgttgattcttcttctccatttttgttcatttcaggagactatcagctctgttttctctatcctcaacatatatgttgctccagaaatcggtcacataaattttatgtctcatctctttaatgtggacatcaatggatgaactgtggatgcctgtaacttatgcttagttctttattatctagatcaaattgattcagtggtaatccgtcttcttgaaaggatttggtaggtaattggttggagtagtgtatctcagattagtatcgatagagaaggtctttaagagctcacaggcagctatataattgagtaagtgataaggtcctttgagcattggaatgggtctgccacacactgcttcaaatgagcaagcccatgaagctttgtctgctccaagttgcagcctttctcaaagtctgccagtaaatgccacttcctgtgattcagacggtattaacagagggaacgaaggaagtttccgcttctctattggagagtctgataggaaaacagcagtggaatcgttggagtttagagatgacttatggagattccatgacactcggtctgttacctcattacctgctcacgaaccgacttatgcaatggataaggtaaatttgagtcgaactgaagttagaaggatagttggtttcgaatcaaatgaagttagctcagtgagtaatgaatacacaagtattactgttaatcgcactggtggatctaatgaggtagatattatcggtggatcgttagtcaggaaacgggtaagctctcctctgaataagcttttccctgagaaatttagaggcgactcgcttgatatcagccatagcaaccaaccgatgacttctgctggtcttcctaaaggatttcacattcctgttggacaagatcataaaaaagccaatatctctgggagattgcgtctcttcaccacttctaactgctctgaatgggggaatgacacatcacacacgggtaaactttcatcgactgttttcacggatggtccattgcttgactctaacgatctgcagcctagtcaagatgtacattgcttatattcaccagtacatgaaacatttcaagtacctaataagccattaccatgtcatagaaatatatctgtctctccgccactttctctgtcacctcttgggccaagattttctgagaggatgaaagctcttcaagggggcctaaatgggaatattttcgaagatgatgtttgtttaaagaatactggtgaagaagcagaactcaggactggtcacagatcgtttgatgatactaatggtatccagagagccttttcaatggatagagctattgaatcagttcctacatctccatgtaaaaggtttagtagaagcttgagtggacgtcccattcaaaggtcattggttggttcttttgaagagtccctcttttcaggaagattatcttatgggcaagctaatcaggtctcactctaccaaaacccatgaaactcacaaaacctcgaagcaaaaactctttgttgttaaaaacattaaacatttaagatttgactcacttactctcgttttgttttgttctttgcagaagatcgacggttttcttgccattcttagtatagctggtggaaacatctctccaaaatcacagaagcttccattctcagtaacaagtgttggtgatgattgcttcttactatactatgcctccatagatctctctggaggatcattgccaagcaaattatggggtcagaaattgaaaaccaaccaaaacaagtctgatgctcagaccattaataaacgtcttcggattcctatgaagggtcggatccaactggtacccacttgtctctttgcctatttttcttaagaaaatttctcttcataatgtaataagatcactggataacaaatttatgataggagcttctctgttttgcaggttctgagtaaccctgaaaagacacctctacacactttcctttgtaactatgacttaactgatatgccacacggtacaaaggtaacatcaaaaaccttcctccccttgtttcattcatttgctatcatcccgttttagatttcgattgttgcttgcgtttacatacatttagtgtatattttttcaatgaaccattagccttaagcaaactcgattttcaaaatttacacaaaatcggttatgtactaattcaatatttgatcgaattcttgtgtcatggtcagaccttcctgcgccaaaaggttactctggcctcctctgttccgaccaaagccaaaaaatctgcaaataaaggtagtgaaggatccgagttagtggatgaattgcattcgccgaatgagtgtgggaacaagaattgtcgtgagacgtacagagaaacaggacaacgctgttcaaagtctggagtcttacgctacgcacttcatcttaaatttatttgccctttacgcaagaaagcctccaaattaggtcagaagaaaagcttggatgcaggagatgatggagagcggagattctatttatataatgaattgagagttgtgtttcctcaacgccacacagattctgatgaaggaaaggtatgttagaacaatttgagaaatttattcaaattcatttggtatagagctatttgaacgcaaacgcaaaacgctgatgttgcttttgaaattgcagttgaatgtggagtatcattacccagaaaatccaagatacttcgacgtgtaaccaattgaatttctgcttcctaaaccgtttttctgttttagtttttgttagaagaaaataaaagaatgttgtacataaaatagagaataatcatatctatattgcccattagcagctataatgctccttcaagcagccatactgtctatgcttcttacctattaaagcaaaccacaatgggtttcgcactttctgctggaaggagaaagcttaagttatatataccaaccattttttacaataacacacccaaatctacgtgtttaatcaccacagttaaataagatatcttgtagatagagctacaacacagtaactaaatttaatgatttcggagatcgaaggttgggatttgggaagagaaaccatgagtgaggtaatagagggacctcggcaaaatgtttctgtaaggatcagtttctcttttgattttcaaatagttcatacatctttctacctcagacttgacctgcaagtaaacctcatgagctttctctttattgtttagctctttctctctaccttctgtgtctattggtttcccaaagtatgcgtaaaaccgtcccgggatctttggaactattccaggtagatgtaaatcttgttttcccaattcgccttcttcatcgttcctaaccatatattatcatcactatattatcaaatgttttatcaggttcatgtgactttatctaacagagtcgataaaaatcatacctcaagttaacagagtcttgtgttatctcttctataagattcttcaagaaagggatcttcatttgatcatcataatctaaaaccatctgaatacattccattattgtacaaaggagttactccaaatccgattgaagcaaaaggagttttaagacgattttaacttttaagaatgcatttgatcattgtaatccatgaccatctatgaatcttccattgctcaaacgagttaactcaaaacccaattgaaacaaaatgagttttaagaatgcaggtgttgaaagtagaacggaaaagagatttttttgcttacttcacaaagatcatcttctccaacaactccaaaaggaatgatttttgctccaaatttagatgctatccttacaaactccgaatgttctggccaaaataacttgtattcttcaccctgttataaaatgtgtctttagatataaagcctcaaaaattaaaatgaaggaaaatatggaaaatacataatcacctttctgtgcaaagcttcacgaacacccccagggtacaaagccacgtgagcctttgaacgaagtagtttgtagaaattcattcccgagacgggaactgcgcctataatcctaaataagtcgtacagctgcatgtcagggagttttgagccagtttttttggtaaacatcaatggatgtgccagtcctcgcaatagaatgttcctttctttcaaaaaatgaagtgctattgcatgcaactccataccaagcaacatgtgattgccaacatacagaaccggtccctctgaaggtattcctgcaagcgatcttaccactgcaccattctttagagttgaaagaaagactggggaggtaacagcagttagcaatctggaccagagaaattaaaaaagaatactacttcagtatgtgcttatggtagcagaagcaaatattctattctagctaagttactatacaaaatattttcaagaaatcatttgacagagaaattagaaaagtgataacatctatgacgcacagatattaatgtgataagtgagtcattttacctttgtgattcttcatactctttaaactcaaatggggtaggcagaatgtaatccgaaatgtaatcaagtgacttcccacggcgataataatacgcacgcttgatgatactcaccagatctactccatcctcctgacatgacatcaaatagatcaatcgaactatatgctaattaaccaaacataatctgaaagtttttctgtgccaaatctgatgcaagaagtttctattggctataaactcgtagagactagatttgcttgtgaatttattaaataggagtcatttacacagggaaaacttcttgcatcaggagaaagggctccttaccaagaagaggaactgtccattattctcaagctcacgaacttcacatcttggcaatgcaccacggagtctttcaatgtcttccttgttcattaaccattgatcacgtccactgcaataacacaggcttattaaatctacacaactcagcttccaattaactaaactcattaaaaaaaaatagatcactgaacttccacttatattcagagcagagaagtttactagtgtattaacctcagaagtatcagtgtttgggcgttgactgtgtccatctgagaattagcagacgctgaagcagacttaagcaattgaagcttccatagaagtgtgtccttgggaaagattctaatcagagtctgtaaataatttgtttccgtgagtttatctcatgactagagaaagtaaaatcgaaacaacaaaatgaagaacaaccaagagcacattactagttaaataatatgaactgcaagacaaacaacatgctaatcatttgttctcctaagatagagtcttacaggcagattagatgaagttgcaaagaagtctcctaatagccctctacccatctgcgcggcatcattttcattgagcatagtctcgaacatttctgtcaatggggaagctatgtaataaaacagttagccctgactttgaagcaagaccttacactgaaacccatctttgagacagaattttataaggcacagtctttgcgtctaatttttttttgctttacaccgatatacaaagggttgaaacttcaccttggtaaaacccaaaattctctgttatcaagccgggaactccgtcaggcaaaatttccagtagggccaatacaggttgcaacattaagttggtaaaacgtgtgactgcatcaaacagagtgtattatgagcacaagatgtatacactccatgagatctacccacacaaatcccccaaaaaaagaataactcttttagcatgattagaattatgctttaccagcaaaggttatataataaagtgtgcgctttgctcataacacttttctgagcttgcaacaatgtggtttcataaatggcctaataaatcttaggaaacaaaaaaaaaacacacacacaataacggtttcaattctcaatgatccagaaaaaacgagtagtcttgttgtacctggattagccagaatcaagacaagatcaatgtcagggttactggctgcaacatccagagcaagagaagctccaatagattctccaactatataaatgggtctatttgggaaacggtagtgctctgacctaactgtcttctcaatgagcttcccaatatctgaaaacaacagtaagattttcaccaacataagattacaaaacgctaatgcgacttcagataatgcttaagaagcacctcgagcaggagtacgatcttttactggaaagtgaaggcaccatatgtcaaatatcctatgatcaataaagataatgagatcatcaacaaagagtacatcactagatctctacttctctttctaaagtaacaggagctgtgcacaatgaagagcctatctcaagctcgaaggcaataaataagattgaatcaaacaagacttactctccaagcctcttatgctggcgaatgagccctaatccagttccatcgatccctgaaattttgaaaaactagttttcaacaacaattccccttcagcccaatcagaataacgaaatcaattaaaggaaatatctatttccagccctaaattgaaagaaacagaccaggtaagtagagaagaagaggagattcaggagcacgtgcgccacattccaacggtgagaaccaccgtggcggaccaccatctccgccgtctgaattaacgaaatctccagcttccgttaaaaaatccgtcaaactcttccgttcctcaggccgtacttcctctgtatacgaatacggattcaccgtcaccttcaacttcccgccgattccgaatttcggattcgtaagtcgttgggttgaattcgagtagagaaaatggagattataagcctttgtcgaagctgaggagaagaaggtgggagaggttccatcagtgaaacgaacagtagtagtagtaataatcgccatagacgatcagagaaagttggaagaaggtttttgttgtttagcttcttcatctctgataggtcgaacacgacaagctcgtgcacacgagaaaaacgattataatatgccacgttgattttttcagtttgaatattttcaaatttgataaatttgcttaaattaaacacgacaagctggttcggtttggttaaaccaaatctgggttagtttaactatttattaataaaactaacctcgaatattacacagtttattgtacattgcaatattcttcacccaacactcccaaaagttactcaattctattaaaatagaaaatagtcaaaatacacaaaccttcaaggcttcaacgtaaacgttctagatatgttgtaagaacacaaacttgcatgaatttttaacataacaccccgaacttactcaatttctacatcaacagccttgtacttttagaagttacaataacatatccaaattccacaaagttaattaagtcacaaatccagtaactaaaattattgatttcggaggtcaaaggttgggacttgggaagagaaaccatgtgagaagtgatagagggacctcgctaaaatgtttctataaggatcaccttctcttttgatcttcaaataggtcatacatctttctacctcagacttgacctgcaagtaaacctcatgagctttctctttatcatttagctcgtcctctctaccttctgtgtaaattggtttcccaaagtatacgtaaaaccgtcccggcatcttgggaactattccaggcatatgcaaatcttggtttcctacttctccttcttcaccgttcctaaacatatattatcatcattccaatgttatataacattcatataattacatttaacagagagtcgaaaacaaaacaaagaaacaaaaactaaatacctcaagtaagtagagtcttgtgataactcttttataagattcttcaggaaagggatcttcatttgatcattgtaatcgaagaccacctgagaatcaattccatttttcaaaagagttttaaagaattccagatactgaaacgaaaacgaagaagaagagattttgcttacttcacagagatcatcttcaccaacaaccccaaaaggaatgatttttgttccaaatttagatgcggtccttacaaactctgaatgttctggccaaaacaacttgtatacttcaccctgtagaaatgtgtcattctatgtaacgcttcaaagttaaaacgaaggccaaatatgagatatctaatcattacctttctgtgcaaagcttcacggacacctccaggatacaaaaccacatgagcctttgagcgaagtagtttatagaaattgatatttgagacaggaactgcgcctatcatcctaactgagtcgaacatatgcatatcagggagttttgagccatattttttggcaaacatcactggatgtgcaagtcctcgcaacagaatgttcttttctttcaggaaatgaattgctgctggacgcaattcggtaccaagcaacatgtgattgccaacatagagaaccggtccctctgaaggtattcccgcaagtgatcttactactgtaccgttatctagagttgagagaaagactggggaggttatagcagttagcaatctggaccagaaaaataataacagcacttcagtatttgcttacagtagcagaaggaaatatcctattctagctaagtagtactatacaaatattttcactacatctaagtcaagaaagcgtattacacagaggatattcattttacctttgtgattcttcatactctttgagctcaaatggggtaggcagaatgaaatcagaaacgtaatcaagcaattttccacggcgataataataagtacacttgatgatagtcaccagatctaccccatcctcctgacatgacataaaattatcaatctgaaagtttgctgagctaactactagttataaacagatacaagaaaaactttcttacatcaggaaaaagagcaccttaccaaaaagagaagctgtccgtaattctcgaacttacggacttcacaattcggcaatgtacaatggagtttctcaatgtcttccttgtttagtaaccactgatcgcgtccactgcaatatacagtcttattaaagctacaactcagctgccagctaagaaattttttgacgaaaaaagagatcgctgaacttctacttattgaagcagggaagtttacaagtttattaacctcaaaagtataagtgtttgggctttgactgtgtacatgtgagacttagcagatgctgaagcagacttaagcagttgaagcttccatagaagtgtgtcctttggaaagatcctagccagagtctgtaagaaatttgttttcgtgagttaatcacatgaaaacatagctgaaacaacaaaatgaagaacaaacaagagcacattactagtttaactctataatcagcaagacaaacatgcatctatcatttgcttttctaaaacaaagtcttaccggcaggttaactgaagttgcaaagaggtctcctaatagccctccaccgatctgtgcggcatcagtttcattcagcatagtctcgaacattgctgcaaacggataacctatataataggaacacagttagctgtgatttgaaccaaatcctgacactggaaacccatcttggagatcgaataaataaagaagtctctgcatctcatttgtcttcgactggaagatatacaaggagttgaaagttcaccttgttcaaaccgaaaattctcctccaggaagctgggaactccgtctggcaaaatttccaatagactcgataaaggttgcaacatgaagttgttgacacgtgtgactgcaacaaacaaaacgacacgcttaaatcataaagtacgtaattttctcatgacacatatttgagcttgaaccatcgttcttacataactttggcctagaatatctagagaaacacaataaaggatctcaatgatccagaaaaaacgagtcttgctttacctggattagctagaatcaagacaagatcaatgtcagggttactggctgcaacatctagagcaagacaagctccaatagattctccaactatgtatatgggtctctttggtaaacggaagtactctgacctaactgttctctcaatgagcttcacaagatctgaaaacaacagcaagagtttcatccacataacattaatccatttggtttgggatccgtactgaaacaacagagaatgctgacaaagaagcacctcgagcaggggtacgatcagtgactggaaagtgaaggcaccatatgtcaaatatcctatgatcaaaaagataatgagatcgtaaacaaagagtattcagtagattccttcttcttttgaagtcattttgtactacttattgataaatcgaagttttttaaacattgaaacaggacctgtgcacaatggagagcttatcttaggctctaaggtaataaagaagattgaatcaaacaagacttactctccaagcctcttatgctggcgaatgagccctaatccagtaccatcgatccctacaatgttgaattcttagttttgttaacttccattgttccaatcagaataacgaatcaatcaaacgagaattgatttcagccctaaattgaaaggacgaaccaggtaagtagagaagaagaggagattctggagcgcgtgcgccacattccaagggagagaaccaccgaggtggaccaccatctccgccgtcagatctaacgaaatctctagcttccaccaaaaaatccgtcaaactcttccgctcttcgggctgcgccgcctccgtgtacgtatatggattcaccgttgccgtcaccttcggtccgttccgtagacgtccatcgattccgaatttcgggttcgtaaaccgatcatgcgcgacggaggtcagtcgtcggactgaattccggtagaaaaaagcagtggggtagattccatcggcgatacagagtgtgggaaccgccatcgatcagaaaaatccgagatcgagagaagaacgatttcgtagttgaacttcttcatcttcaagaggtggaacgaacacaagaagctcgtgtacacgagaaaacagcagtgactactccgccattcttttatcgagggtccgcatttctgtttgaattttaaaatcaatttagatgctgctgttggaatttggcacggtttaaatttagggtaacttatgactgttaatattataatttatattattttatattttagaaatataaatatcaaaatatatattttttttttgacattagcttttgtattagatatttgttgtaacatggtcacgatgtaaattattaacaattagaaagggaacataagaatcgatgaaaaaaaagaagaagagagggaacgtaagaatgaaagtaaaagctataattattaggtaatccatatctggctagtgtatctacagtcttgttggagaatgttggatctatgctaaaacaaaaactgacattttttcttggcattggttttcgggtgtaaaaacctatattgcaaaaaatatgagattcaaaagcttaaagtccgttgcaaactaatcgacagtcatcttttcgttttgcgattcttcacatataggaatccaaaagttgtttgcagctatatcctctcaccaattctccaagattttggaagtatactaaaaagggacactggttttgggtgatgatatgttgtggtctgttataaaagggcataatttcaaaacagatatagttggtaaatttgtaaagaatcctttttggatatacaagaagaggcagctcacagttcacaccacctctctaagagtttcaatgttggtaagaagcatgtttgtcatctcagtgatgttaatcccatatatttttggacacttgtaacctttagtttatttgataaactatcaaattttggtatatttgatgaatcgttgcaatatttgccctttataaaatatttttgaggatatcaattaaagttaaatttgttcaattagagttgtatattgtcaccatgttttactcgtgtttataatcacaaactcttcgttccaatacttatatcttttacaaatggtgtctatttaaactttcatgtatcttaactttatatatatattttttattttcttagaaaaattgtgtatatttattattactttttgtttgatacattttcatataaatttgtacttttaactatatagcattcatttatacattttgttatctatatcatcatttgtttcctaaataactgtcaatttttgtttttttgtttttttcgaggattgtatgtcgttaacataacacagtcttaaatgtttgtgtctgtttatcataatgttttaatgagtatatttatgtatttctatcataattgtttaagaaattaaaaattgcgtctactcattttatttttttctaataatttttacttatggttgcattttttcaccatcatggtttctaatgtaatattataaatcttaataaatgcttgagagtcagagtaagctatttgtaacattaagcattttacctttaattttttaaaagatataaggcccaatagtagtaagagctcataagaccgtttgtatttctgaggtttatttcttctctcaaaaagaaccgcggcgattcgattgaaccaaccggttagaaaaaccgaaccggtgaagtggctcaaaaaatggattaaaggtgcttcacgtgggcagattgggttgtcgctcatgtgagcactacttgatatgctcgtaatcattacacatccttttacttattatttattttctcactacatcattaatctatagcactaaaacatttgacaaaaagaattatacattagattcttcatcagagccacactaatagtacagtttgtttaatctttgtgcaaaagaaaaagtagtacaacagtttgtttaatcttcgcatatgatttcatttgccgatttattatatgaactaaatacaaagttatgttctttttttttttttgagcaacaatacaaagttatgttctttatgaaaacatagtaataaataaataaaatacttttgtgtggttttaaccaaaacatcttagattataaaaatatattttgatgattattaaagtgatgaattcaatattactatagtaataaaagtcactagtgttttgagaaatttccaaaaaataaaaaagtcatcaacgttgtaattataaaaataaataaaatcatttccaactaatcctttttaggtatataagtatattcaaacaattaatttgatcggtgactttgtaaaactgtgaaatattgttttataatgtgcttagtgaattatttaccagtcacattctgcatgtctcaagagattagatgagtgacattttatgacgtaacacaataatgttatttatacgtttacaagaatgaaaaaaaaaatatctattcatcatttgtaagcacacatgagaggattaaagctttacagaggaaaggaaatgtcacttttactgtcacatgctgaaagtgagaaatggctgagagagaattatttgttgaattatacttatcttatttctcaagccatcaaccaataataagaattaagaaataaagactagtatcaaatcttatattggtggtgtaatgctgatgacctcttagccactccgtttggcttcttctggcatagagatatcgtgaaatatatatgtagactaatgagtccaaaaattggattggtgcattaattatcatgttaaaaatttaagatgcaacctatctagagtgaaacatatatatactttgatatagaactatggttggtgtggactcgatactgaaacatataaatatgattaattcgattgttaggtttggatggtgcaatcaatatgctaaatgattctagtataagtaatctaattcttactaactttgtagctgcaaaatgtatattctagtataaatatatttcttattatacattctcaaacatgcacatcgtaaaatgttaattttgatatattaagatgtttaaaactaaaggcaccaaaacccaccaaaaaaatttaagagtctataatagattgtgtgtttcacaaatttggtatactgtgtttgattgcttggattaatgcttatagaatattaagacaaaattaacatttatagcaatagttggtgtgtcatgtcaagtaaacttatgttgttagctgtcagattgaagcagatagatagagaaaaatcttttgcgaagcagttaggtatctgacgttggggcactccgtgacttcatttatgatttgtttttatgaactctggtctatggcatcgaattatagtcgatttttagagggaatataatgtacaaacctacaagaaaaattaaacaaaaacacaactctaattattattcaattgtagaatttacaagaagacatttttattaggttttgtagtttttttttaatgaaaacacttaaacctgccctaaaaaccaaacaaacaaacaaatgaaacaaaaaaaaaaatggatataactactacgtacgagcttttttttttttaatacaattacatacgagctatatggactataacatattaattgtttttgtgtagctatgtaaatctttatttagcatatagaagtgcacctaaattaggtaacatatcctcctttttagtttcatacattaaaaaatagtaatttcttaaagatcaaataataaataagaagtccgaaataaagaaaaaatggaccttaaattctatttttcaaatgaaatactttcataaaattaaattcaactaataccacaaagacaccaagtttttggtagtatcccaaaaggcctatcaatgaattattttttttgttattaatttttagttaattttgttgtataagctaccaagaaaaatacagctgcttatataccccacaagtattggaatttagaacgaaaagacaaaataataactataaggttttgatgtcacacatcttatgaattggcatgttccatgtccgatctaaccaatgatggctttaattgcttttgtaaaataaaaaggactggcaaaactatgccgcataattttcgcaatgatcaaatttctaatcgtggttggttaaacataatattctctggtaaatttataaatagttatgatgatatccaaaagtggttaaaaagtaaaaataataattacatagacattaacgttaaagttgactatttccttataagaaaaaaaaatgaccgttgcctattttattgtaccatcatcgagaccaacgaccatgcatacatttatgtaactgactatactacctctactagcccgctttacgaaagtgacattgtcacagcagttggagggcaaacatgtcattacaatcttgattggtcactgttccctccacccaaaacattcatttttcaataaaaaaatgataatattaaataaataaataaagctaattttccactatatgaaaaaaaaattgtggtgcgtaccgtttcagtagagtgtaagatttattattttaattgagtatacaaaagatcttgtttccaaatctgtcggtacaatttttttatacatatattcctattataatttatttatagctaaaattacattaaaatgcaatagtattgtgtgtatattgtagaaacaaaaagttaactatgatcttaatggcggcaaatataattatataaccacaataaacaagttacatactcgacaaatgtagaatgaaaaattaataaaaatgataaaattgaataagcaatattctacaaaataaatactactagttttgacttttgacttttgactcgttacattaaaaacctaaaacctattctctggcactaaaaacagattcgggtaccaccaactagagcagcctattttacaagaaatcacaaaattaattaatgtgataaactaaattactttgttttccgtcaattgataaactgatttaatgatgtttattgataaactaattatttcttcggtttggtgatacaacattactatttatgatttttgtttatctaatgttataaagaaagttattaaaagaaaaaaaacgtatcgtctcgctcgctctctttagatctgcttttcgtttttgtttgtcccatttataaaaaaatcaactggtgggagctaacgctcgcgtcttcttcctcttgacgttattggaattcgtagtcgttccgattcactgagccgactcggcgtagtagtagtagtttactactggtgatgtgttgttctagctgtttgtgatgatcaatttctctacattggactgaagaagagagtagtgttgataaatggctggttctcagcgacaatgctcggagctccggtgagaaatcctgtttctacggcgatcaagcacactcgacggtggagatgtttaagtcatcgagatggcggagcgagaagagcaacaaaatcaaaatcgttttcaagttgcagtttcatgcgactcaggtaatttcactctcggagaattttccgattcccggtcaaatttttttctgatgattttctcgggaaaatgttgcttagattttgaatttccagaaattgggggaaaaattactcaaatctgacatctgatgtgacctgtataaacagtgaattccattttccataattcggattttggaatttagatcttggagatgtgagatcatgttcatcattatgtgattgattgattttttttgtttttgtttgtttgtcaggtgacgcagttgaaggcggagggattaacaatctctgtagttcccggagatgttgggaagtcgacggggaaggcagagaaggctatggtgctcgacggacattgtcggtgggaatctccggtgtatgagacggtgaagtttcttcaggatgtgaaaacagggaaggttaatcagagaatctatcatctagttatgtcaacgacggtgaggaaaattaaactttctcagagttatgaagagatttctgagattacttttctgattagttttgtttttgcagggatctacaaaatctggtgttgtaggagagacttcgattgattttgctgattatgtagatgcaattaagacttgcaatgtttctcttcctctccagaattcaaattcaaaagcaatgttgcacgttagctctctctttctttctctttctttgcattaatgtttgtcatgagacattaagagtgtttgcatccatagcaaagctcacatgattcttgcttctttgtctctttgaactgtgatactgagatttgaactgggttgtttcattatcaggtagcaatacaaaggcagttagaaaatgcagacccacaaaggtataggaaatggtttaagctcttgcaagtctttattcttttagtgttcttattgggagtctctgttttgtctgtgtgctctacagagtggtgaaagaaagtgatagcttggtgaaaaggtcacggggtcaagatttgaaatcccatttgagtattgaagctgatgaaagtcataaaagtgattcacaagaggtataatcgcttttgccatattcttaatttgtgaaaccattgtgagaaattctatttgtgtctgctcttataggagggtccatttggtaaagcttccaggattactgaattgaggcgtcgagcatcaatagaatctgatagtacattatcaagctttgacagtgtctctgaactggatacactgggagaagttgaaatcagaggagatcacattcagcaaaaccactcaacaatgcatcaccattcggttagaaatgtctatgaagagcctcatatatcagaatccgagtggtcaggaagttctgatcaaggaatcagcactgatgactccatgaatagttcaaatgatacaatcccgagagatacaacgaggacttcctcggataacgaggtagacaagcttaaagctgagctcggtgctttggcaaggcgaacggatctttcagaactagagctacaaagcctgcggaaacaaattgttaaagagaccaaaagaagtcaggatctcctgagggaagtaactagcctaaagcaggagagggacttgctgaaggcagataatgaaagtaataaagcatctgacaagcgaaaggaagaggcaaaaattaggaacaagttgcagcttgaaggaagggatccacatgttcttttagaagaaacccgtgaagaactggattatgagaaggatctgaattcgaatctacggttacagcttcagaagacacaagaatcaaacactgagttgatccttgctgtgcaagatctagaagcaatggaggggcaaagaactaagaaaacagttgatcttcctggaccaagaacctgcgagaggaacaccgaagaatcaaggagaatgtcctgcacaagtgagacagatgacgatgaggatcaaaaggcactagatgagcttgtgaagggacacatggatgcaaaagaagcacatgtcctggagcgaaggatcactgatctctacaatgagatagagatctataaacgagacaaagaggatcttgagatacaggtggagcagctttctctggattatgagatacttaagcaggaaaatcacgatatctcatacaagctagagcaaagccaagtgcaagaacagttgaagatgcaatatgaatgttcatcttctcttgtaaacgtgaatgagcttgaaaatcatgtagagagtctagaagctaaactcaagaagcaatacaaggagtgctctgagtctctgtaccgcattaaagaacttgaaacgcagatcaagggaatggaagaagaattagagaaacaagctcagatctttgagggagatattgaagctgtgacacgtgctaaagtggagcaagagcaaagagctattgaagccgaagaagccctgaggaagacgaggtggaaaaacgcaagtgtagccggcaaaatacaggacgagttcaagagaatctctgagcagatgtcttctacgttagcagcaaatgagaaggtgactatgaaagcaatgaccgaaacccgcgaactgcgcatgcagaagcgtcagctagaagaacttctcatgaacgctaacgatgaacttcgagtaaatagggtagagtatgaagcaaagctcaacgaactctcgggaaagacagatcttaaaacgaaggagatgaagagaatgtcagcggatctagagtatcaaaagaggcaaaaagaagatgttaatgcagatttaacacatgagatcacaaggcggaaggatgagattgagatcttgagacttgacttggaagagacgagaaaatcaagtatggaaaccgaggcatctttgtcagaggagttgcagcgaatcatagatgaaaaagaagcagtcattaccgctttaaaatcacaactagagaccgcaatagcgccatgtgataatctcaagcattctttatccaacaatgaatcagagatcgagaatctcagaaagcaagttgtacaagtgagaagcgagctggagaagaaagaagaagaaatggcaaatctagagaacagagaagcgtcagctgacaacataacaaaaaccgagcaaagaagcaatgaagatagaatcaaacagcttgaggtaatgtgtctaacactagaacattcagtatttggctaattgttttgatgttgatgccaaattttggtaatccagggacaaatcaaactaaaggaaaatgctttagaggcctcttcaaagattttcatcgaaaaggaaaaagatttgaagaacagaatcgaagagttgcagactaaactcaacgaagtaagtcaaaatagtcaagaggtaagagaattaacattttacaatttagatatacatttcctataacctcaaagatcggaacataactctggttttatgaacagactgatgaaactctgcaaggtccagaagcgattgctatgcaatatacggaagtattgcccttgagcaagaggtatgttcaagaactagtataaacatagaaaacaccaatgatttctgatagttttctacttttacagtgacaatcttcaagatttggtaaatgaagtagcatcgctaagagagcaaaatggattgatggaaactgaactgaaggagatgcaagagagatattcagagataagtctaagatttgcagaagttgaaggtgagagacaacaacttgtcatgactgtacgttatcttaaaaatgccaagaagcgttaaaaaccatattctcagagtcagaagaaccaaatggcgcaatattgtacaaatttctcttattttcgatatatagctttattttttgttttttcacatatatatagtttctccttttttatatatatttttttctgagagaaaagtgagtttcgagttttggcttttttttttttttttttttggtgtatgtactacttgtaatagataccctggatataattattgatgttagtttgcttattatattaaaaaaatattctttctaaattcaccatttcaatatttgtttcaaccactccaaataccaagagtgtaaccatgaaacaattttaaaatacaatcaaagtatgctcactagtttaactgttacaacagatcaatcaactcataaataatcaaataaagaatctaatctacaacaaacgtagcagatgaacaagaaagaactaagcagctttgtgaatgagcttctaaattaataagtgttacctctctcttcatagcaaagtcggatacttggcgtcaagaaactctctgagacttttagcaactttgtgaccacccatgagttctgctaatgtctcaacaggcaaagacgcgagctcagccaaactcttacatttctccataatcgatctgtaattcgcatccgaaactccaggaagccttctcagaaactcaactgcagatgtgttatagttctcggctctgtttcacatcatgagtcaatttcgatatttacaaaggcaaattaacaaaactgatttttgcagtttaagaaagagagttcctttacctgatgtcattttctatgataccttcttctgaaggcacaccaactcttattgctcgagtctcgtcaggctcgtcttggttggattttaaggtagtaaagatttctgcggttgcatgtagacttcgagaccacaataaccttaaccgaggaaaatgcagaactagcaatgatagttttgatatgatgttatatggagtcacatcatctgatatatcactcgaagactgcaaaagcaagaaagaaccgatccaaactcaatgaagaacagatcaaaacatgataagacgaaaaattattttgaccttggaatgtgagagggtacctgaaaggagaagcttttgtcttgtgagaactcgatcagaagaactggtattctgtaataacgggacatcatttcgacttggtgaaataaacgacctgatgtgaagctctggaaaagatcttgaatactctttctctctacgcatattgaaggagatagaatatagtcgccgacctctagtgtaactggtattatcttcatgcctttctggtgaagaacatttggtagactgctcatgaactccctcatgtcaactataacctggtgaaaaacacatttccataaagtgaactctttagcaaatctagtcaatcttgggaaaaaatatcgttcttgagatatgaacctgtgtctctttctccagttcctttcttccgcctgcttttcgggttaatgagttttgtgtacttgaagctggaaactctgtagaagaattcgaccccatgcagagcccatcctaattccaagtttatagcacagtatggatgagaagaaagcaggaaaaagaaactgaaatccagaagataacgtaaaattctggttaatagtttcatctacttggtctgattcagtttaataatattaacttgttttagcaacgctatcactaattgagttgttctaatgtactttcaaatcaaaactgtatactttaaagcaggaaacaaaagtcacacaggcttcgtttcatttgaaatgttgggaattgagtttcaaacctgatcaacgggaataatcatcgaagacttttgcctgatcaatgattcaaacgcttcattttctcgacgtatgcttgcttcaaacttctgcacttctgtggactcatcatagaaaataaaataaactttcagctttctgagagggttctctgctttgtaaacctcaagttctctgacaaaacccatgtcaggatggtagacaatgatcacagagggtttcaagatatctagtataggttgatcgctttctaaggcataaaaatgcacaggcggtagctttttagcaccgctggggcgaacagcattggcttcttgaggggctgacgtgctagcttcattggctttttcttcattctctgggcctggtaagatttcaggtttactgttcgtcgttttcttattgcaacttcttaaggatctccggagacttgttggatcctttttagcttttcctttggtacacgaagccttatcaacatgaggctctgggttgttatttccagaagccatatctgttgtctttcctagcttgcgaatagaagacgcagcagccataagagcctcatgctcttgtctgccaacactgctaccttccgagttctgtattgtagttaccggaacaactccatcaagaatcccaaaacccttgggagtcttttgtttcttcttttgcggtgtctgcatactgcggagctcaattttgctcagcaggtacatttcccattcttcccgcattacctgcacacgtgtaggtaaaatgggaacttgaatgctagtttctagtgacagggtacatatcggttgttaatgaatgatgtaagatctagcaaaacggagttatctgactggaccttctgtggattgtttgtgatgcaatcttcaagctgcatgcaggaccgttcatctttgcaagccacaagaactattccattgttgtcactgttatcttcctcagaaaaagcctgctttagtctttcttcttgtgtctcctctaaaatttcctgtattaatcacaggcataccattacgtttaaggctaatccatgaaaacatagagtgtggcgaccaaatcaaagaggtaaacaacaaagaacagatatggtcactagctaaaccaacttccatcatcaaattaacagtaacagagatacggcattgaaactgaaactcactcagtcactcacacgtaagactttccattttggtgcctcttccagaacttcttctacaacaacgccagtagccacatttgttgccgtttccccaccaactgattcaagtccaattatcaggaaatttttcgaatgcttataacacacatgtcactagatgcaaaatacaaccattatagatcaagaattagttacctgcttctacagagtcagtttcgcccttcgaatttctctttttaccactcttattcttaacatgttcttttgacttgacatcacttgccttcacgagacgatacactcgtttctttgcaaaatcaaatattttatagctggactctgcaaataaccaaacagaccgatagctctctgatacccttagtgtatccaagaacttgagaaaactcacagcatcatacctacacagaaataccaacttgaaggttttgcataagaacattactgatctacagagaagagagacagagctattattacctaacaagataatcaagcaacttccttaaagtcttcaaatcagaaacaagctgttttgtccttttccccaaagtatgccaaataggatcaagctgcctcctcacaatctcatcaaaggacttaaacaaaccactctctacagtcaaatcatcaacatcaactttattagtcttcttcatctccttgagacaagcatccattacttcaatgatagctttctgtattcccaccatgtaattcgacatcgaaaccctaatatccacaacctcaggtggttctcgctccaattcctgagacacatccaactgaaaccttggccatagatggattttacggaggaagagagcacgcatggtgcgttcagtcttggcgaaaccggaaaccatagcttgcggtctatcggaaaaagcgcgtatataagcagagctatttagggatttgacaattcgtataatgaatgcttcagtggaggtttcggaaatcgaatgagcattgaggatgaagattccggcgagtgaagaaactggaatccgttgagtcaacagatcgacgatgagaatccgcggcgtgatgaagaaaggagaaccggaggtgtaaagcgagtaacgctgattcgccggaagatctgcggtgatttccgtcggagtaggagaatcaagagaggagatgtaatggatgattctggattttagagattgagcggcgggggagaggaggagaagtagagttccttgcgacggagagtgaaggatgaggagagaagcgattaatttagcgagggagagaccggaggaaaggattaataatccgccattagagtcctcgagaaggtctgatatgatctgttggtgatatttcagcgccattgaagaagacgacgacgcaaatcggagaaactgattgatgaagagtgaagacgatagaaaaaacctttcctgggtcaaaaacgttcaaacttcaaaacggcgtcgtttaaataaagtatttttcgaaaccggtttcgatatttcctatattaattctttcttaaccggtttaggttagctaagaaaaagaagaaaggtcctgagacttgtcttataatcctcaaccagacttgatccattagtcaactcttctcttcacaatgggtaaatctctctaattttcctcatttcaatttagattctagaaatgtagtgaattgtgtaatgatcaaaacccaattcccagattcttatcaaagttttcataaaagggacaaaatttcttgaaagatgtgaacttttatgtgttgtttttgttggtaacagatgaagaagaagcaatgttgctgcttaaggaagaagatgaaggaagacgaagaactagtgttcctacacaactcatgaaactaaatagaagccaatggtggattcttgttttcataagcatcttctttctcatctctgctcaagccatttctgttcttcttggtcggttttattacaatgaaggtggaaacagtaaatggatctctactcttgttcaaactggtggctttcccattctttatctccctctttctctccttcctgcttcacaatcttcttcttcttcttcttcttcttcttctttcaagactctggtttggatttatctttctcttggttttgctattggtttagataattttttatactctgttggacttttgtatctctctgcttcaacttattcgattctatgtgcttcacagttagctttcaatggtgtcttctattattacatcaattctcagaaaatcacttgtttgattttcttctcagtgttgtttctctctatctctgctgtgttggtttctcttgacgatgattcaaatagcccatcaggagattctaagtggagttacttgattgggtgtttctgtgcagtttttgcttctcttatctattctcttcagctctctcttatgcagttttctttcgagaaggttctcaagagtgagactctctctatggttctcgagatgcaaatctatacgtcgcttgtggcttcttgtgtagcggttatcggattgttcgcaagcggggaatggatgttgttgagtgtggagatggaagagtttcaggaaggtcaagtcatttatgttttgactttggtcggggcagcggtttcgtgtcaattgggttgtgtaggagccgtgtcgcttatatttctggtgtcttcgctgttttcaaaccttattagtacgctctcactcattgttacgcctctcgcggccattgcggtgttccatgacaagctgactgaggttaagatggtggcgatgcccatcgccttcacaggattcacgttttatatctaccagaactatcttgatgacttgaaagtacaaagagcacgagaagctcaggccgaatgatttattaaactctactaaaaaagctctaaagattgacattgagtaatatttctcggttgcatgtctccaaaatatacttaaatttgtcgttacgtaatacagttcaatctttgtgcactgtctaaaggaacctatactgttcaataacttatgaatttgtaacttacaaattgtggtctaccaactcatttgcttctctgcacattctttacgaagtctttttgttcaatacactgtctggaataaacactattcaattagtcattcttcattttcactaacaaaacaacctcacagcttcacgaaaccctcgcttcgcaaagaccgtgtaaactgctactacaccatcattctctgtaagttgaagaagcatcatcagagaatcctcaacactatgatcagttatgctatggtgtcacctaattatgaaaccccatcttctttcattttcctaaacaacacatgagcttcatgctttaacccttccctaaacaatcctgatatcattgtagtatatgttacaacattaggcttcactccttttgaaggaaggctacaaaataaattaacagcatttttcactttaccagccttgcacatcccttgaatgatgatggtatatgtaataattccaatatccatctctctctttcgcatatcctcgaataccatcaaggctttctctagcttcccattataacatagaccatgtaacaagacgttgtaagtccaaatattgggagcgacaccatccatttctctcttttgcatatcctcaaatatcatcaacgctttctttaccttcccgttataacatagacaatgtaacaaaacattataggtcctaatattgggaggcacgccacgagaaaccatatgactaaaaacttcttgggcgacattaggtttgcccacttgaccaaaaccttggataagagtagtgtaagtgatagtgttcccagtcaatcctttttgggacatctcgtagaagattttcatcgcatcatctaccttcttacacttgcaaaacccgtttatgagagaagtataagccactacatctggaaaacaacccttggtttccatcaaataaaacatttgtctggcctcatctacacaaccttccatgcaaaacccattgatcaatgaagtataggtgaaaatattaggagctatagacatacgaatcatctcattgtacaattcttcagcatccaaaaactttccttctttcacaaacgcatcgatcaatgcattgaaagtgattacatcaggtttgattttcctcttcgtcatacccctcagcaatgaatcagcatctctccatctaccagagttacaaagaccgttcacgagagaggtgtacataacaacatccggtctaatcccgtagttttccatttgatcgaaaaggctcaacgcgtaattcacatgcccgtttttgcaaagactatcaatgattgttgtatacattacaacatcaggtttaatccccatctccaccatctgattcaccatagacatagcctcctccattctattcccgagacagaacccattgatcagagaagtaaacgtgacaatatcaggctcaaaaccaagtttcatcatcttcccaagaaaagatgaggcaagataaggctgagaagattggcagaaacaattcatcaaaagattgcaagtatagagatcatgtgaaactcccattatctgcagatggtcgcagagattgatcacaacatcaaacttcttcattttggcaataacattcaataacttagtgaaatcgataattgaaggaagaggacgagactcaaccatgtgagtgaacaaatcgagagcttcattaaactgaagagagtgaagaccatttctcaaaatctctcggtaattacaaaaagctcgaacccagaaactaagatctaaaaggcggctaaaggagagagcttttccagaattacctttcacaagacgatttcggtgaagttgaaaaaatctcatcgccattaacgcaaatcccagacgaaattgattatgccgttgatcgatttactacaaaagctacaaaaaagtttggatgagatcgaaggtcgttgtatttaagaagcctaattttcgtttacttggaagatacgaagaagatgaaatttgagatttgagtaaagaagcggcggaagagaagatggcgaatatttgtacacgtgtattggtttgacttttgtataatatcgttgacttcacgtaaccagtctacaacgaccggttaactaaatcggtttgttcatttacagatccctagaccaagacttcatgttatgcctgattgcgatcacttgcagaagaattcctcctattattgaaaggaagtataaattgaaattttgtctaatttggtctcaattttgattttagttttggattgtgttctttgctattcaaaattcttaagagtaatttggtctcaacaatatcttaaactttatatgatccgatttaatccaaaccgttcaataaaattaatttctatcaatctaaaccgttcaacaaaaataagtaaataacaaccaaaaaaaaattaaacacattttaacacattcctcttatcactagataacaaaaaaaaaatctcaattattatttagttatgtttgattaaaaaatttatatttataagtttagtatatcaaatttattcaaatatttagtataaaaactaaataaaccgattgtacgcggtaaactgcgggtataattttagtataaaaccaaaaatgaaaggaaagatcttcacaataattaaactctatggcttaagaatcttattaaacgctaattccgtaagaattatatgaaacgctaattcggtaagagtttagtaaaccagattgtaacaaacgtgtaaatatttttctggttatgaattttttaatgaaccggattaaaccaggaattaaactgtgcgtttaattaaatatgaatttaagtactcaatcagcaaattggtattgactcaacatgatggacataagaggtttgtgacttctcataagagctttgtattttattgatttgaacacttttcttagtagtaaattaaattcatggtcgaatctttgtttatatatgagtagttttatcacatagccgtaccttgcctttggttggttttgttctgcttttctaacgaaccatattaaaaccatgtatttagttatatattaaaaaggtttaagtataattaaatagcaagaagattaccaaatccggcccaaaaaaatggtagtgactcagcttgatcagagagtctcaccaggattcgaatagggatattgatattcttaacttaattataaattatatttaggacaaagaactatatcttaaatcttaatagaggtggagctatggagtgacttttgggcgactcaatcaactaggttctcgagtgagatctcttttcacaaagagcccttatcaacataacccaagactttaggtgaaagtaacgcgtaccacaaacaccggtgaaaagaaacctatatcttaagggtttgtgacgtgaatatgatgaatccaatggagcatcctcatagaggatttaatcaatcagcattgatcacgccagtacacttagacgtgatgcacctcatggatagaaggttggtcttatcgctgctaggaggactggtcgtctcaaagtcaaaggtcaagttgttgcttcagccgccaaggtcgacaagggttcttaaacataaactcttttactatttttttaaaggttttaactagactatccatagtagctcaagaaagagagatagaaacatggaacttttgcaaattgtagtcccaaatatcttttattttaatatttgtcttttatccaaaatatgaatttgtaattctctgttaggaaattgatttgcagtcatataatttacatgaattttttaattatatgttacgaaatatacattttttctgtatgtgttgcacacaatttttttaaaaatatatgaatactttaattttgttgatatataagcgatgttatgaatcaccaggaataaatataattggatacaacatttagacatattgtaataattcatttagaaacaaaatcgaatcccagactgactgtaagaaaataaacatttgatcaactattaaactaaatgattttcataatcattacatagatttaaaacagtaaagagttacaaatatttggtgataaattggtaacaaatagtctattcatttgtgttaatgttattgttgtaacataattaaaaccgcatattacatgttattaaaaataacaaatatacttttaatagatagtgatatttaaaaataagaaagaaatctagagtagttacagtagggccttttttatatattctaatcctaatttacttttttttttgtcaaacaatcctaatttactttattaaactaaatgataaagtttaagaaaaggtgcaaaaataataattaaaatattaaaaataaaataaagaagaaaatataattcttgtgatttgtgttaacctttcttttatttgtttgccaacaatgattgtaaattctaattaataaaaaggaggctatgaggaatataaccacttttgaaaatctgtttttttcctctataatgaatgatgagttagacttttattaaacaaagttgaaatcgccgacaaaaaacaaacaaaacgttaaatctttcatcagttgagttaatgtgatatggaaatttttcaaatagtttaatggtctaaaatgatattttaattattatatatatcgtctataattcataatatagacataaatcaaattgaaatctacattacgacatagctacaacactaacatttttttatccaacacttaaaatttattggaaacgtatatattttgtttttatttaatgtaataatattttgtcttctttcacattttaagcaggttatatattgactataaatgtttcacagatagatgcatgttgatacatttttccttgtatacaaaatacacattacagttaaataaatttatttatttctggcttacaattagagatattactgtgaagtgtgaacatgcattagatgggaaagaaatataaaacaatttcattacataaaattgggatctattactaattaaatgtggaataatcttaattttagtcaaagttatagggacacatatttaaataaaagtgatatctttcttttctaaaagacaaaattgaaaagcaaaatgtcttcttctccgtttagaatagaacaacaacaaaaaaaaaactgtctttgaatccaagtctctctcttttgtcaccatctctgttacttactaagaaacttctttttctttaatggtttttttgctaaatacccgtaatattattaattaaagcattttcctttttctgctaaatcttgctttgctctttaagctcttgtcattgttgttaattgtctcctggaggctggaggctggagattatttggtcttttgtgatgactataatgtgagaaattctgggttttgctagaatttgaagaaatctttgagcaaggaggaaaaaagaatgagactttacttatcttcaacgatgcagctttctcttatgagtcttgttctagggttcctctttgtttcctgtgacgcgtttgcctctaaagaaggtattttgatttctccattttctccaatttttggatgctgagaaagtttagtctttttagcctctgtctgttaacacttgctcattgagttgatctagaaagttagaaactttagttttgttactgatcatttagaagtatttgatgttttgctgttttgtattcagttgaagcagttagaagattcaaggaagccatttataaggacccattgctagttatgtctaattggaatgtccccaatttgagtccttgtgattggaatggcattaaatgttctccatctaaggatcacattatcaagatgtaggaaactttgatctctttctatcagtaaaatcagttatgtttagtatgatgatgatttggtatctgtttcatgctgtgaaacttgcagaaatatatcggggacatcgatgagagggtttcttgtgccagaacttggtcaaataacctacttgcaagaactgtatggttttgattcatattgacaatacctgaagatataagtttgatgattggtactgtttgtaaatgtttagatgactttgttttttctgtgttgaatgcttctttaggatcctgcgtgggaacattctaatggggacaataccaaaggagataggaaagttaaagaaactcaagatcttagacctgggaaacaatcatttgacaggaccgattccagcagagatcgggaaattgtcaaggattaagacaatgtaagaaaatctttaagagaatgtcatctatccgataatgtgctgagataaccattttgtgtctctttaacaccacagaaaccttcagtccaatggtttaataggaaagttacctccagagattggaaacttgaagcaccttaaagaacttcttattggcaggaataggcttcgaggaagtattcctattgccgcgaaaacatcaaaaaagtgagtttagctaatagtccaaggtagcataagatggaaacttaatgtttatgattgaaatgttaatgtatcttctttttgtgttggtcaggtatgcttcaaatccaagtgcaaacatcagtggtttgtgcaagtcttctctatttaaagtggcagatttctcttacaactttttcgagggaagagttccgagttgcttggattacctcccaatgtatttcttataagaccctttttctagctttcctttatttttctcatttgataatatctctctgtatcattgaacatcattgtagaacgagctttcaaggaaactgcatgaaaaccatggatgttaagcagagacctctttcagaatgtggtttgtagaatatgagtttcactttcttgatgctgataatcgtttctttatcttgtttttcattttgaaattgtttcaattggttagctcgcttagctgtaaccgtggccaagaagaagcatcgagcatcgagacaaacatggcttcggaattttgagatagtcacgggatcatcagttggcttgctctttctagtcgtaatgttctctgcatgtagcttgtgcaaaataaagcgctctctcatcgttccctggaagaaatctgcaagtgaaaaggagaagttcacggtctacgttggttagaaactcttaaaaattctaagatttcaatacaaataactgaaagagcttccagagatgaaaaaattactgataaactgtttttctacagattctgaaatgctgaaggatgtttcaagatatacaagacaagagctagaagtagcatgtgaagacttcagcaacatcattgattctagtgcagagagtcagatttacaaaggaacgatcaaaggcgggactgagatcgcggttatctctctctgcgttaaagaagaaaattggactggatatcttgagcttaatttccagagagaggttcttcttcttatggttgtttatcaccaagtcacttgcaagaaaacatcagtattaaacttgattttattaatattcattgtttcaggttgcggctttggctagattaaaccatgagaatgcggggaaattactgggatactgtaaagagagtacaccgttcacaagaatgcttgtgtttgagtatgcatcaaacgggacactatacgaccatctccactgtaatatataatcaaacttcttcagagctctttctttggtaggactgataatgataccaaatgatgataaaaatttgatgcagatgcggacgggagtttagtatcgtgggcaaaacgcatgaaaattgttataggcatcgcacgtggtctcaagtaccttcatactgaactccatcctccatttacagtctctgagttgagctcaactgcagtgtatctcactgaagattttactcccaaagtaaatttgatcctcttttttctatgcggttagctaagctttgctactatctctatactcttattttgatcctcttatttctatgcagctggttgatttcgaatgctggaagattattcaggtgagatcagagaagaacctgaagaatatctgtaatgaaggagcaatatgtgtacttcccaatgcaatggaacaccgagatatggatttacaagggaatatctactcatttggcatacttttgctggaaattgtaagcggaagaccttcttattgccaagacagaggttgcttggttgaatgggtaagaatagcttttctctataagcttaaagctgagtacttataataagtctctctctctctcttagcggtttacgtgttttcatgcgtttgatgctgaggatttgattcaaactcctaaatattgcaggtaagggagaaaaaccttggtgcaccagatgtgatggctagcttggtggatcctgagctcaagcatttcaagcaaaaagaacttgaggcagtatgtgaagtggcaagccaatgtctgaacttggaccagaatgaaaaagacaaggataagctttcttgttcgattcaagcgctttgtgagacactagagagtagaatcactgtgtccatttctgcagaattcaaatcgtcttctctggcgtgggccgagctagcgctggcctcgccttctaacgaagacgacgatgataggagtaaataaaattggctttgttgttatgacattgacatacacttgttcgaacatttttgcttcaattttgcattcggttttgatagcaccgaccatgccttggataagttatcaggtaggttgttacggtcggtctattgttaataccaataaactggaggtgtaatcttgtataccaagttcttgacgaatgaaattgtgttgagccaaaaaagaaaaaaatgacaggtagcttgaaactagaggaatacatctgtgaaccgaataaaaagttataaactctcaccttttcaaactagttttggacttcaaacaacaatcagaaagaaaaagtaaaagtacaaaaaagagacaaaatcgttggcatctgaagtacaggagatgtttgttgtgtaggagaaacaaagatcagtgcatagaacgagagtaatggttgtcattagggtttcttttctggctgaaaaccgacatagcttttctcacaggaggctgcaatggcgcctttctatcactatgatggttcaagaacacatcatctgatacgaagtactcatcaccctgcaaacaacagcataatttaccttaagatttcaatcaaagttacagatttgagtttgagatagaagacacgaagagactaaccggtttgcttgctttcttcttggtcctagggtggagaagcttttgagggagttgatcttcccgtagaatcagattcttggtgattgcctctcttcctcctttaggcattggtatcgaatactgcacagaaagaaaagacacatgtatcaggagaagtttttatctgtgtattaggttgcagattttaaaggaaacaagggtttaagtttaaaggcagtaacaaatgacaaattgatcatatacatgccggaaaacatggtggttctgttctcatgctatttcaaataaagaatacaagattcttcactaatacaggaatttttggtgttttggttagcttctgcttataacaagttacttacttgggtccctcgaagtgtaattcgtggtttacatgcagctatgatggcgccattcgcgcctattgtaaccgctaccttgcgtagagtgccaccattcccacatttgggacagaagattcttccaatttcaggagttactgtgtagcaagcatggcattttaagatccacctgaagatgtcaatgcaataaagtgtaagaattgtatctttttcagttaatgacccttgctaaagaaaagtgtctgacatttgaacaaaaaaaaggaagatctgatcaatttagagtacctatgcagttggcgaatttgcattccgccgggtgcaagcaatcgcaaacccatttgaagaataacattctgcattgcatagtcaccagttatacaagctacactggactcagataaagctctcaatgaccaactctgctcgctgctaccatcatctccaatcgatgatgcctcgaaggtatcctcagcctcactagcaatctccaagttctctagcgcttgatttgcaacatcgatcccctcagcttcgacttcaatatcatgatcaatatcatcctcaccattgatcaaagttgcttcagcattcgtctcttcagtctcttcttggagagcccttaatgactcttcctccaacctcatatctttaaggatggaagatatatcctcaccattctttccactatcttttgcgtgggtttcattggcctctttagtgtgtcgagctttgtcagcttcttgatctttctgaatttcttgttcagccaaagcattgtaatgttcccaccttgcctttcttctaagatactttgagtgagtacttctactgactgcgggtctccaatcactagcatcatcatcatcatcatattgcccctgggatgcatcaactccctccactaccatcttaccctcaagcttaatctctgttttcttgggcgggtatcgcctatgcttcttcccaccttcctgcacatcctcttcatgattctcagtatgagagacaacagaaccaacctcagaaacattgtctgaagcaataatattcatgttaaggtctttcaatggaaggattttggagttagcgttggatttttcctcagtctcgttttcaagtgcctcccactcctccaagttagccacattggagccccaaccaggtaaatccttctcaggtaatctcttaactctaacagtttgaatcggtggaggaacatctctaagatttttggtgccataaacctgagcctcaagcgtgtatgacaaagcaatcaacttcagatcaacatcagacagagattgcaaatcaccagtagctcttgcaaatttgataactgcagaaccaaaaacaatcaatctcagagatacaatacaatcttttctccaacacaagaatatacaaatacctacttaggtacaaatttcacaatcacaagaataagaatcacaaaactaataagtgtacctttacttagagattcaggagaaggttccatggtatcaatagtgaaagggatgaaagcgagacgacggcgagaagcagggtcacgaatctcagagagaacctcagggacagttacgaatttgtcggcgaagtttgttaagctctgacgtccttcaatgatggcgttggcgtcaacaaccgcaatagatattccttttgtggatttgcagtttccgaccatcccgagaatcgctgccggagctccgtcgttaaccggaggctttgaaggtggatctttcttcacaattgagctccacatcgaggttggtttcggatccatggttttcgttatttgccgcttcaaatgtgggtgggtttaacgaagagactgagagatggagagaagaagaagagtgtaaacaaaaacctaggtcagatccgagacgacgtcgctttttgtccataattttaaatgggcctcacaaggcccaaataattgcgtagatgtataaaatactatctgattagagctagaatttgaagactagtattaaccaaaccaaactagatcatatcaagggttaatgatatcaaattatagttgtgtttcctttttatcaacccttaacggctctagaacgtaaaatctatggaaatcgaatctatgcaaatatatggaaatcgaaacgaatctatctatgcacacatctttacgcgtttttttatcaccgatcatctataaatatatctaattctttctaactatttcatagttcatcatctttttcacaaagccaaagtttgtcttcgtgctttctcttaactttgagcgtgaaaaaacacagagtttgtctttgcaatcaacaagaagatgactatgcgatcatcttcaccttcgtcctcttcttcttattcactcgctttcacaagtttgagcaataggcttgagaccatcttcaagaaagcttcagagctttgcactctttgtgatatcgaagcctgcgttatctattacggaccagacggagaacttaagacatggcctaaggagaaagagaaagtgagagacattgctcttaggtatagtctattgaacgaagcattgagacgcaagaaaagcgttaatcttcatgggttcctgaacaagaagaagaacaagggtttgaagaatccgaacaagaagatgaagacgagtcttaagaacgtgaatattttaaagtatccactcgctgatcattaccctcccgaccaagtttctccactgattcagtccttggaactccatgtctctaaattccaagaaaggcttcgatttcttgagtcgcagaaacagaatcagacaaaaccggatcatcagagtttaacaccatcctctctgaatcattacacccaatctttgaaccctagccagttctcgctgtttatgtataaccatggagacaatactctgtctcagatcccagtctctgcatcaaatttcaatcaggattatttctcagcgttacttgaagaatctgagttgaagaatcagttaatgaagccggagatttgtggttatgatcagaatcagaacatgagcatgggtgacatcacaaacaacaaatttcaagatccttgcgtctcaaacaaagaagcggtacaagaatctgtcaacaactttgggttgaatcaattgatgtacaaggagttttatggttgtgatcaaaacatgtctatgggtaacatcaatagcaacagctttcaaaatccttgcgtctcaaacacacaacattactcggcggtagaagaatctgtgaagaacccctggttgaatcagttaatgcagaatgaactttacggttacggttatgcaggcttttgttaaattcttatgatttattaagaacatcttgaatcaatttgatgtgttgttgttgatctgtattcagctattgtaataaatttgaatcatcatccctagaaacattaattactaaaagccaattttatctatttctgattgctctctatcataataaagccaaatttccaatagactctcaacagagcaataaccgtggctgagttctgattcctccactttgtctttgtcttttctattcacagatataacatcctctcttttcaaacctgtttcagtgattctctgttctaagaaataataatcatcgcatgtttattaaacggaacaacataagcattacagtttcagtaaacatgagaacagtgtgtgggggtggggtgggggggggggtgggggtggtgtttggacactaatgtttgcaagcttaaagataaattgtgcaggtgactcttcacactactgttattttttgtcttgtgatgatgattccttccctaccataatgtctgcactctgcagcaacttccctctcctcttgacctttatcttgtgatagtccctccccttccattatgtcagctgcagtttcccacccctcttggcctctatctcctgatggttccataagtttccatacttccattatatttccaccttgctttcctttgagttttagcagtgcagctacccacttttctcgacctttaccagctaaaaacgatcctaacagtctaaggcccaaaggaagtaagccagtgagatggacagcacaaactgcgagctggttcaactataatttacatataaatctaaaccttcatgttgtgatgttcaaaatgctcgggttcggtaaaaacctttgataaagtgattattacatatagttcaaaaaacaagtgattattacattccttatttttcttacaatggagaataggagataatcggcttttcttcaacgaaccagtgactgacccctgaaaccggttttgccaaagttttgttctaagttcttagatcttggattgaagacccggtttagataaggttcccatctctcgccgcttctggaatccttctttgactttgaaaaggatctcatgggtctcatcaaagtgaggcattgttgcttttttcgtattctcaatccattgttcaactttcttatgagtgctgagcaatctaagacgatctttgtcatccaaaacctacaaaattgcataaattttacaatcaaaagccaaaacatagcaaggattggtatttcgatgaattaaaaaaacgcacaaaacagtgaaattaagtgagtacctgcagctgcataagttcgcatacaaggctgagatcagctatagatggttggttgcttccgagcaagaatttagcattgcccttaagccaaaaagtctctagagtggacagagactttgttagtaactgctcagcttcagcagctgctttcggattcagaggaagaccgagagctggacctagtacactattcagaacatatccagctgcaacagtaaaaacaaccgtaatcagaactatttgactctataacttctcaacatcgatgaatataatgtacaatacctgcaccacgacgtaaattggtgtgatgccaatccaaaactgagtgaatcttggctcttttggatagatcatttggatacctaaaagtaaacaaatgaacatcaaagcaaaatgattacactttgtgtcaaacgaagtagaaacttaccaatgatcagcaacacttggaaacgccgaggatagatatatcaggattgcgtgactacgaaaagaatcaacggttaagattcataaaaaatggtcaataaaccaaagcaagaacccaaaagagaatgaacttttgtgttaacctctcaaagagcttaagcctgccatcaacaatagctggaactttccccaatgggttaatatctgaagaacaagacacatttcttaacaatatttacattaagaaacaacactaagcatatatagccttagtctacactaatctacactaatgatctcatatacactaaacataaatctaccaatactcagatttgaaactttgttgattatttgtacgaacctttgaattcaggagataattgttgacgcttcgccaaggaaatcaagacctcatcgaattggattccattaaccctgcaaaggataaaatccaaacaaaacaaagattctcatgtattagagaaaacaaaattggctgaatctggaattaacaaggaagttcaacgaaattacttgcagaatatgataacagcacgtgatggctgtgacattcgatctgcatacactttgagcttcatcatcttctttttcgtctgattttgtggatc

SEQ ID NO: 807 - DNA, 25275 bp, Arabidopsis thaliana
actgaacggtggtgataatatggacaagaagagaagtgtctctacagtagcttgctgtttctacagtagagagtaaaacaccgtgccgtttttgtttctctgttgtgaccaaagacctctctaaaccggttggttaggctaattgctccttcttcaccatcaaagcaatacaattacaaggcagaaccggcccttaaccagaaccagttgagacttgagatcacaattttttttgtttttctttgaaacagatgcatcattttttggttatctagagaactaaataccattaagttgaaaattgtatcataaagttgacgttaatgaaataatcaacattacaaaaaacttataataccaacctgttgattttctcaaagaaactttcaaaagtaatatcaaaagcatctcgaaatctttgaaacttagcatttgagtgagtctccatagaccaaaccagccaaaagctgatgaaacaataggggcttttctttcatatgctctgatcattccttttctttcctaacgtttcatgatgtgaattggaaagtgaaacaaatgttgaacatagatagtgagataaacctagagaaaatacagagataaatacaatgaaacatagctaaaatacagagatgaacatagagattagagcatctcatcaatgagcttgttcttcaaaatgtcttctttttcagaaagttgatcagttgttcttccaagaagacttttaaggacttccatccttgttagtttcttttgctcttctatgtctttctccttcagtgcccacaagttctcaagtcttgatcgggaatctgcctccctttcttctttctcctttagtgcccacaagttctcaagtcttgatcgagaatcggccgcctccctttcttcaatcgttggtttaggagcaactttattctctttttgctctaatgacttcacaccaagaggacgatccataacttgctcctcttcatctagtacccacaagttctcaagtcttgatccagaatcggcctccctttcttcaatcgttataatagtagcaactttcttctctttctgcttcgatgacttcacaccaagaggaagatccatgacttgctcctcttcatctagagctataggcacactctccggattagagcttgaagaatatacacgatctccattattcaactttgttctctttgagcttccaccacccttagaattttcaaaggggtacaaactacaccattttttactgtgtcggagctccctccatgcatgctcaagtgtaaaattactcttgtaattgttcgtgtagacttggtatgcaacttggaaaacatcatcttcagattgaccactacttctttgattcaaagcttgatcataacatccaacaaatttgcagactttgtcgttaagtttactccatctttgcttgcagtgactcggctctcgctttggcagatttgcaagtgaagcgctattgttaaaatatgcaccaattctcttccaaaaagcgcatgctttatgttcattatcgacaattggatccttgctagtatttaaccaagcactaataagaatggcatcttcagctcgactccatttgcgtctatgttttctacgatcggttgtgttttgaacgaggtttggatcatcactcttctcaccaatagtactaaattggatactgtattatggaagatccatgaaattggatgagaaattaagttttttcttcccccgatgaaagtggtcaagttttttgttcttacatcttagattgaggacccggtttagatgcggttgccatctctcgctgcttctgacatctatctttggctctgaaaaggacctcatggacctcatcaaagtgaggcatcgtcgcttttctcgtattctcaatccattgttcaacatttttatgagggctgagcaatctaagacgatctttatcatccaaaacctataaaattacacaaattttacaatcaaaagccataacagagataagaaggtaacttttttgctccacaatgtttgataaagaacatgttttttttagtacctgcagctgcgttagttcacatacaaggctcagatcagctatagatggttggttgcttccgagcaagaacatggcattgcccttaagccaaaaagtgtctagagtggtcagagactttgttagtaactgctcagcttcagcagctgctttcggattcagaggaagaccgagagctggacctagtacactattcagaacgtatccagctgaaataaccagaaacatgaaactgatcattcctatttgactctacaaacttctcaataccgatattgttatgaatatgaaaatgtaatacctgcaccagggcgtaaattggtgtgatgccaatccaaaacagagtgaattctggcccttttggaaagatcagtcgggtacctaaaagtaaacgaacgaataacaaagtaaaatgattacactttgcattttgcaatcacgaacatgcatgtgtcaaacgaaaacttaccaatgatcaactacacttgggtatgctgaggaaagatatatcaagatagcgtgactgcgaaaacggttaagattattcataaacaatggtttagatacaaaggaagcaactttgtgttaagaaaaaacctctcagagagcttaagtttgccatcaacaatagctggaactttccccattgggttaatatctgagaaacaaagactcaaatctcactgtaaagaccaaatcaagtttcaacttttatcgaaatccgaattcacccatgtcaaaaaaaaacctttttgctgattatttatacaaacctttaaattcaggggataattgttgacgattcgccaagtaaatcaatatctcatcgaattggatttcattaacccttgaaacaaaaaaaaattagaatcaattttttttttgtgctgaattgcgaattaacaaggaagaagaagaaggagtttacttgcagaatatgaggacagcacgagatggctgtgacattcgatccgcatacactttgagcttcatcttcttcttcctccgattttgtgtatcggaaaaagttttctctgaacgaacggcgataatctggcgaagaagacaagtagtgatctcacagaaccaaattagattgctgtttccacaatagagagtaaaacatctaaaccggccggttgggctaaatgctccttcaccatcaaattaatgaagtaacaaatcataaccggtccttaaccagaagagttgaaatcacaatatttttctttctatgaaacacatgcaatataccaaactacaaaatgttttatatttatcgtatttttttttatctaatgaacaaataaacatggaccggagcaaatcataatgataatcacatccatgagagccaacattacaaaaaatctcaagtaaactatcaaaagtaatatcaaaagcatctcaaaatctttgaaacttagcattagagtctccatataccaaaccaggcaaaagctgatgaactatgtaacttctaatatcctctttctcctttagagtctttaccttcacatcttcttggcttatatacacttaagtatttttgatgattctccggttagtgccaagcgtattgataataagttgtgtatgaattaaatatcactggaatgcaacaggagttagtgaatcgaaaaccgaccgattttttcgttggactatctcctcacggttgtagacagtactctaagtcttgaaatagctctatgacattctcaggcttctcgcaacttccgttagtacagtttaagaaccgactatgttcagaaaatgatgtgcattgttcgattagcgttgaccggatgctattaggattaccaggtcttgaacctctagcaaaacttattagattcttgcgaggttttttcatcatcttgacttgccagctaacattattgagagggttttaggcatatgttcgtttgaagagtttaagaaacgaaagagagagatttgatagaaatcaaaggggatggtaaaagggagacatgagagaaatcaaagggaagtgatgataaaaggagacagtttcaagtttcctaccttaagttaaagtgaaacagagagggaacagtgaccttacagagaaacagagcgagagtgtgaagttacaatgttcgacttcttacggagaaacaaagagggaacgtgtttcctacctgaactggagagtgaaacaaacgttgaacatagttaaggaagattcagttagtatctatttctagaaaagccgtctatagcctgtcactaagttgatagtgagataaacatagagaaaataaagagataaatacaacgagaacatagagattagagcatctcatcaatgagcttgttcttcaaagtttcttccttttcagaagtttcacctgttcttcttccaagaagacttttaaggacttccatccttgttagtttcttttgctcttctatgtctttctccttcagtgcccacaagttctcaagtcttgatcgggaatctgcctccctttcttctttctcctttagtagccacaagttcccaagtcttgatcgaaaattggctgcctccctttcttcaatcattgttttagtagcaactttcctctctttctgcttcgatgacttcacaccaagaggaagatccataacttgctcctcttcatctagtacccacaagttctcaagtcttgatctagaatcggcctccctttcttcaagcattgttttagtagcaactttcttctctttttgctttgacgacttcacaccaagagggcgatccataacttgctcctctccatctagagctataggcacactctccggattacagcttgaagaatatacaccacctccattcaactttgttctctttgagcttccaccccccttagaattttcagaggtgtatgtactacaccattttttattgtgtcggagctcccgccatgcatgctcaagtttgaaattactcatgtaattgttgtagtacaattggtatgcaacttggaaaacatcatcttcagattgaccactagctctttgattcaaagcttgatcataacatccaacaaatttgcagacgtagtcgttaattttcctccatctttgcctgcagtgattccactctcgctttggtagatttgcaagtgaagcgctatttgaaacatgtgcaccaattctcttccaaaaagtatgtgcttgttgttcatcataaacgacaactttacgatccttactagtatttaaccaagcactaatgagaatgacatcgtcaggtggactccatttgcgtcttcgagctttacgatcggttgtgtcttgaacgaggtttggaccatcactcgtcccaccaatactactaaattggatactgtattatggaagatccatgaaactggatgagaaattaaacggagtgtttggatctcgaatgacttatctttagggggaaggagtctctcatatagagaccctgatgaaagtggtcaagttttttgttcttacatcttagattgaggacccggtttagatgcggttgccatctctcgctgcttctgaaatctatctttggctctgaaaaggacctcatggacctcatcagagtgaggcattgtcgcttttctcgtactctcaatccattgttcaactttcttatgagggctaagcaatctaagacgatctttgtcatccaaaacctataaaatagaataaattttacaatcaaaagtcataaccgagataaggaagcaacttttttgctccataatgtttgatatggttagttacattggtatttcgatgacttaataaaacaaataaaagttggtaaagaagatgatttttttgcgtacctgcagctgcataagttcacatacaaggctgagatcagctatagatggttgcttgcccccgagtaaaaacttggcactgcccttaagccaaaaagtctctagagtggacagagagtttgttagtatgttctcagcttcagcagctgctttcggattcagtggaagaccaagagctggagctagaacgctattcagaacatatccagctgagagattgttaaataaccgtaatcagaaacatgaagccttatttgaatatacaactaattaacatcgatactgttatgaatataatacatgcaccagggcgtaaattggtgtgatgccaatccaaaacggagtgaatcttggctcttttggaaagatcattcgggtacctaaaagtaaaatgattacactttgcaatcaagtacatgcatgtgtcaaacgaagtagagaaacttaccaatgatcaactacacttgcgtatgctgaggaaagatatatcaatatagcgtgactgcgagaagaagaaacagacaaacggttaagattattcataaacaatggtgtttcgatacaaaggaagcaactttgtgttaaagggaacctctcaaatagcttaagtctgccatcaacaatagctggaactttccccattgggttaatttctgagaaacaatgaatacacactttaagatcaaatctcactttaaagactaattcaagcttcaacttttatccaaatccgaaatcacccatgtccaaaaaaaactatttatacgaacctttgaattcaggggataactgttgacgtttccccaaggaaatcaaaatctcgtcgaattggatttcgttaacccttcacacaaaaagtaggtcatgtataagagaacaaacaaaaaggctgaaatcgcgaattaacaaggaagaagaagaaggagtttacttgcagaatatgaggacagcacgagatggctgtgacatcctatccgcatacactttgagcttcatcttcttcttcctccgattttgtgtatcggaaaaagttttcagaacactgatgaacaaacagaacggtgataatctggggaagaaccaaattagctttgctgtttccacaatagagactaaaacgccgtgccgtttttctagacttctcttaaccggctggttagaccaaatgctccttcttcagtcttcacgaatcaaatcataaccggtccttaaccagctccagttgagatcacaaatatattttattttctgttctttgaaagtttgaaacaaatacatcataccaaactacaaaatttattttatatttatcgtatttgttcatcaaataaacaaataagaatggaccggagcaaatcataatgataatcacattcatgagcgcaaacattacaaaaaatgttataccactgacctgttgattttcttaagtaaacaatcaaaagtaatatcaaaagcatctcgaaacttttcaaacttagcattggagtctccatataccaatccaggcaaaagctgttgaactatgtaacttttcatatcctttttctcctttagagtctttgccttcaatatctccaccacatttactctcttttccttcacatcttgttcgcttatatacactgagtacttccgatgatcctcaggaagatgccacgcgtactggtaataagctgtgtacggagtaaagatcaccggaatgcagccggagattagtgaatcaaatactgatctccttgttgcactatctccaggcggctgcagacaaaactctgaatcttgaaacaaatcaaggacattcttgggattcgtgcagctttcgtttgtacaatttaagaaccgacattggttggaagatatgcattgctcgattagcgttgatcggatgttattagggttatcgggtcttgcacctcccgcgaagcttactagattccggcgaagtttactcatgatcttgatctgccagcgggtgatatcatcatctgttcgcggatggaaataagttgggtgaggaatggcgatgtcgttgacctgccatggctgtctttctatgagtagcttggtagggttttgcatttcttgtagctcaaggaaccttgagccccaagggtccttatctctcctaaaatcccaagttatttttcctagaacgaacacatgatctttcccggcgtttctcctccatgattcctttgaattaagccattttaaaacctcgatccccaaacggtccttcacatcttcagaaacattcctatagtgccatctcaaaacatcatacccgccatagtaagggacaaagaagagcttagcttgggtctcgttgtaaaccctacaaggatgcttcaaaaccctagagtgtaagatgggctcaagagaatacatgtgtgtagcaaaccaacctttgccaagattcttaatagcttctccaaagccttcattcttgaagtagctacacaagttaacccctggaagtatatcgttgcatcctaccaacaaatcgctgttgaattttgacggtaaatcataaacgtaaactcctttaccttcacacgatcgcggtttattgaggttttcatctcccggagatagccatgatctttgtaggtaaagatacttgatggctgcccttaacgcatatccctcatcttcactcgtaggtttgatgtatttgctgtattcttcctcggcttttagttcaatgagtgaattgagatcaaccttgttctttgttttgtgttcttgaacaggaactgaattaagaatcttgttgtgatccttagaaactctatctcctgcgatctctccggcgaaagttacattttcttcagaaattatttggaaaccgggtttagaaccagccgtgttacaataagggtcgttgaactttcgagagaagatacacatatggaagttgttgtaggagattccggtggtgaaagataaacaaagataaagaagaaagaagaagagaaataatgcaggaagagtatagtacaagaatctgaagaagacagaacatagatggatacaagaatcttctatagtctttgaagttcttgactttctctttgaaaccatttttctgacttggtcctttacttcttcactttggatatttataaaaactcatttggttacctatgggatttatattgtttactttattttaaccaaaaaatatattttctctactaaaaatagcatagaaaattaatgaatagataaatttaagtattaaattttctaagaaagtagctgaaaatattttcctatctatgtaattttaatattttaactaggggaaaacttactgtttattttatttttatttctattttttcctttcctttcctcttatgttaaatgatgaatttatgttgtataatcagaagagttagaatgaaaatggaaatatatagtgtacaaaattatactaaaacaggtcagttttgttaatatacattatacttttaaacatagaaatatatagtgcacaaaaaaataagggactatattacttttcaaatgcaatagtatacaatgctatttatgatatgtatgccatcaatatatattttagtctagctacatttattgaaatttgcataacttatgtgctacagtacttgaaagaaatatattctcagaaaattatatattcaacatattcagttttataaacttgtgagtaattccaaaactaattaattttgctattagcaaatatgagttgtttctttagaattttcttttttgacacactgttgagttgacttggatactctgctttgctgtgttcattttggatattaaaaaagatcagaactttattttgttaacaaaaaaaaagaagaattatctggcaaagtgtttaatttccgagaaagttgaagcagagaagcagaaagtttcagaattctcttttctccaagtttaacgcttttttagctcaaagctcacacacacgaccactctattcctcctttaacctttgtgtttgtcaatttgtgtttcctcttttgtcgactcatttctcgattcaatctcgattttttttttttttttttttatggaaatctaatgaactttttttatggatttgatctgttaaagtttcgattaagaagatagtggtttaggtttacggttttgtaattgatttattatctgtaatgggttgtgaggtttcaaagttatctgcactttgttgtgtttcagagtctggaagatcgaatcctgatgttacaggcttaggtaagttatagccgttgatgagtttatcttgttagggtttttgatgattgagatctttatgttaatttctgggtttattcagatgaggaagggagaggtgaatcgaatgatttgcctcaatttcgtgagttctctatagagactataaggaacgcaacttcaggatttgcagcagagaatatagtttcagagcatggtgagagagctcctaatgttgtctataaaggcaagcttgagaatcaaagacgtattgctgtcaaaaggtttaaccggaaatcttggcctgattctcgtcaattcttggtaacccatttatttctcttttggttccattgttggagcttctgttctgcaaacaactttagagtcagatttggcttcttggtctagtgtgttaattaagtggttatgctcattgcgactgacttttttagctagtactaatgaggaacattgtagtttgtagattctgttcaagtgtgtagtgaaaaaggttaactaggatgctgctcctatatattccttgttcataggttgttatctactagatgcaagcagattagattctggattacttattttctttcatacctatttgtgtttgcccaaagctaaagagttgctttgattctgtgagattaggaagaagccaaagctgttggtcaattacggaatcataggatggcaaatctacttgggtgttgttatgaagatgaagagagactacttattgcagagtttatgcctaatgaaactttggcaaaacatcttttccactgtaagttcctaacatactcggtcagtattttctcctatttggttatgctgctaacaagtactacttgatagtttgaatgggtgcttaacaaaaaatgattatttatgtgtttaggggagtcacagccaatgaagtgggcgatgcgactgagagtagctttgcatattgctcaggcgctagagtattgtaccagcaaaggacgtgcactttaccatgacctaaatgcttatagagttctctttgatgatgtaagtttgatacagatttttttacctttggtttctgtcaagtgtatatgagaataattttatgtttttgtttcttaggatgcaaatccaagactttcatgctttggtttgatgaaaaacagtagagatggaaagagttatagcactaacctggcattcactcctcccgagtatctgaggacaggtatattttgacaaaagattgtgcaaatacctcatcgagtctttcactacctaaattgtttcctgggattatcaaaattttcttgcaatttataattttccagctgacagctaaggtttcatgaaaacatgaatgctttatttggattgtggctgcttttctgttttttattgggttatgtgtttatttctacaggtcgcgtgacacctgaaagtgtaatatacagctttggaactctattacttgaccttctgagtggaaagcatatacctccaagccatgtaaggtttccaaatatccttttgaattggtaatatttcttagtgtctgttactggattctgactaggaagcattctccctgagcttgagagaagcatgttataacttaatatccttgaatagtatagtattttgctaatccattaccttgtatggtgtattctaggcgttggacctcatacgggacaggaacattcagatgctgatggattcaggtttggaaggtcaattttcgagtgacgatggaactgaattaataaggttagcttcaagatgcttgcaatatgaaccccgagagcggcctaacccaaaatctttagtctctgcaatgattcctcttcagaaagatcttgaggtgcttttcactatcattaaccagttccgttttgcttataattagcaagcttttattattaatgatgaatattgaatcgcagaagcttatatctttctgttaccatttttactgctaccatacggcaaacaattgcagaactagaaagataagcttgatgcttctttcatttgaaaagattattcccgctgtaacacgaacatgttaatcatgtagattgcttctcatcaattgttgggcgtacctaacagtgccacaacgacagctctttcacctcttggcgaagcatgcctaagatcagatctaactgccatacatgagatcattgagaagcttggatataaggatgacgagggtgcaaccacagaggttcgttgcgtattttcaaccttgcgttatactatttcggtcttctaatgtttgattctaatgtcgatatttgtaattccttggaaataatgcatctgtggtatctttgactgtggctatcatgttccttatattcaaatctaaaacattttcacttgtttctgcaacagctttctttccagatgtggaccgaccagatgcaggacacattggtcttcaagaaaaagggggattctgcattccgacataaagactttgcaaaggccatcgaatgctattctcaggttaaactttttatgctgtagtaagttttagttcctgacaacaatctatagttcagtgctggtggttttcacggaaagggtagtgatcaagatttttcattagcctctcatattcacttttatgcttctgaccgaagtatttgtttgcagttcatcgaggtaggtacaatgggttccccaactgttcatgcaagacagagtctgtgttacctaatgaatgatatgcctagagaagcactaaacaatgcaatgcaagcacaagtcatatctcctgcttggcatatcgcatcgtatctccaagctgtagctttgtcagctctaggacaagagaacgaagcacacactgctctaaaagacggtgcaatgcttgaaagcaaaagaaaccctttgtgattataagcaacacaaagaggagaaactggagtacaagagaaatataaccatcctttacgctaacccatacacccgaagaaccactgtcgcaacattgtatttaagatcaaagcataacaagtctacagcgattgttcctttccgaagccttgatcatcacatcacattactggttagtctggtttttatttcagtttagtgctccattttgcaagatccgcggttcaagccactgtgattattcgattacagcgagtggactgtgtttattgttgttgtttaagttcaatggtgcagacgtgtttcgtatcatagagaagaaaagaagtgtctatggagatatgatgacaaaacttaaaaatgtatgattgtgacattgtgtattattcgctttaatgtaattcaatgtttgtattattgtatagaatgaagtatgaacctctctctgctataatgttattcccctccttttttttcttgaattttgcaaatgttgaaacgcttaaagatcttgaattttcagagaaacatattcaaaaaaaaaaaaatatgttgataaaaaagggctcaaccgggttcgaaccggtgacctctcgatctgcagtcgaatgctctaccactgagctatgggcccaactgataaaattatgataagtaaatgatatatacaaatgtaaaacctgattgggtattcgtctccgacttcttaaaatcccaattctttcataacaaaacactgctcttccttctctccgccgccgcatcgttaaatctctccgtcatctgtaaccggttaaagtatttccctcaggtcgacctgaaaacgatgggcaaacgaggaccgaagaagcttacaaacactcaaggaggaggaggacctaatctcaaatctgtactgagacatgagcacttgaagaatctcgctctctggtcttccaccggagatactcctatcccgtctcttgcttcattactcggtcgacgtctcgctgccgacactgaatccaccggaatcactactgatcccgatctcgtctcttgtcaaaggtatttaggatctctgattatgacttcaattgcaaaattaatctaaaaaatcgttcgttttgcttcaatagttgcttctggttcatatagtttgcgatttttcaccattgttgcagaattggttgttttgttctgtgtgtttgtgatgttttttttgtatatgctttcaattgcttagagaggttctttttggcaattgaatgtcaaaatgatgtaatgattcaaatggttttgtggcaggtgtgagaccattcttaagcctggattcaattgcaatgttagaatagagaaggtttctgctaatgtgaagaagaaacgtaataggtgcaagaagtctaacaacatctgtttccctcagaacaatgtagtttaccattgcaatttctgttctcaccggaaccttaagagaggtactgctaaaggtcagatgaaagagctttacccgttcaagccgaaaaccgctcgttcgtcgcgtccgaagatcaagaaagagatgacgatgcctcaagaaatccaaagtaacatgctttcttcaccggagagaagtgtgaaagatcaggtggaggagaagagtgttggggatacaccgaagccgatgatgcttacattggagagggataggagaatacgaaaacccaaaagtaagaaaccgagtgaacctcaaagtgttcctgagaaaacagttggtggatcaaataagaggaagagaaaatcaccttggacaagtatgaaggagatagctgagacaaacaagagttctaaagctggaaactttaaaataccttttctcttgtaatctttgagaggttcccaactgatctttcattgttaactaataaaacctcacgagtcacgacgggtatagcttcatataacaatcgtagagatcttgaaggcttcatccgggtacacgtacggaaatataccaaatttaaagcgcgactaggtgaccaaaaccattcaaacccaaaactctcccgtttagaagttactactgaccaaagcaacttggttaatttcaaacaattatttaacacaactgctcatcgtgcgtaataattttcgaagtaatcaacaaatcatattgttaaaaatatttctaaacttctaagttttcacatgtcggcacaaccatgtcaccttgttcaattaatatatgatgacattcatatattcataggtctcactaatcaccttatattaattggttttatgatcatttcatacattatttttacatagtaattggtttcacgtctcttagttaatttgtccctttttttttaatccccaacttgaaatatacatatgttctcatccataagtcaactcttttgggagaatccaagaataaaaacaaagaccaaaaaaaccaaaacttaaaacaaagaccaatctagcaaaataacaaagaccaataaacttgttaaatcaacgaccttctctctaatctctatatataatacttcattttcttttcttttatttcataacctctaaaaagattaaaaaacatggaaacaacaaagaaactctctgttcttctctgtctcttcttcaccatgaaccaagctatctccgaatccgattctgacgagcacatggcgactttttgcaatgattcatccggaaatttcactcgcaatacaacttacaacacaaatctcaacactcttctctccactcttagcaaccaatcatcattcgctaactactacaatctcacgaccggtttaggttcagacacagtccatggaatgttcttatgcataggagatgtcaacagaacaacatgcaacgcctgcgtcaagaacgcaacaatcgagattgccaaaaactgtactaaccatcgagaagcaatcatttactacttctcttgtatggttcgctactcagataagttcttcctctccaccttagagacaaagcctaatacttattggtcgtctgatgatccaatacccaaatcatatgataaatttggacagagactgtctgacaaaatgggagaagttatcatcagatcatctttgttatcttcttcgtttacgccatattatcttatggataccactacgttcgataacttgtatgatctagagtctgttgttcagtgtagtcctcatttggatccaaaaaactgcactacatgtctgaaacttgcgttgcaagaactcactcaatgctgtggtgatcagctttgggctttcatcttcactcccaaatgtttagtgagttttgatacctcaaattcatcgtcattgccaccgcttccaccgccaagtcgcagcggttccttctccattagaggtaagcatatatatcaaataatgatgggttgttaattttttatatatacttttatttatatagattagatgatacgtaccttaatttgaggctttgacatgttatgcatgcttagaaaaattcaaaatctattagaatatatattgtagtaaattttcgattatatataacttatgtttcaatgtaacacattttgtttttttcaaataaatttagaaataaaatgtatttaagacaataaagaacaaaataactgcaattttagttctctcttgtatctttattttagcattatggtcaatcttgttatgttttgatttttgtttttcttttacaggaaataacaaaatacttgtgggaatgattcttgctgtttcggtgtttgcatttttgggtttatgatcagatctacatatactaagaaaaaaagtttggtttttgagtttgatttggagtttttctaagagcaaaataaacatcattgtttccgttaattatgcttcatgcttatgtttttcctcgttttatgtggttatacattcagttgttgcaaggattgtcccatttttatacacggaattgttaatgagtacagctttctgaagaaaagtgtcatgtaaattcactttgtgaaaacatttctcacaattctttcgatttatcgttctttgatatccattaatttgtaattacttgtatatcaatgaccatgtataactcttttaaatgtaacccaaattaaagttttaactactagagtatcttataatgttttgttgggttagtttcatgtgtaaaataccattttatatgtataatatagaaaaatattttatttcatattattattcaccaagcaaactaattttttcataaatactccactattgactcaaaataattatgaaaataggcaaatagtcatgagtaaaaaatatactaacctcaaataaaagacaaaaatacaacaatgtattgtaatttagagaaaaatatgaaataaatactaattacacgaaatccaaaaataaaaataatcaatactgaaatattaacgacgtaagagaaatatccaatgagaatcagaggaaaaaagatcatttaataaaatagcatgtcaatactaaaacatttaggaataacatgttgttgttatggaggtgacgatggtggttgttaatggttacagagatggtgatagaaaaattattataagggaaacatattatattatataattaatatgatatatttttatttctctaagttactaattaatattatcatgaatagttatcaattaaatattttatcatgtgtcatgatttaaagggatttagtcaccattgatcgatcatctttatagttttaacgtgtctaatttaaagttatttttgtttcattcaccaattttatgatgaaaatttttaattttaacttttatataattattcaaagagttattattatgcgatataatttttattcatatataagttattattatataatatatttttcattcaaataatttttaatcaataattttagttgtgaatgaaacaatgcaagagtaaaatatatttccttttttatctttgaaagacaatttatgtttagaacgttgttaattcttacttttgttaaatttgatcggactggttcgtgtctagtatatatatatagattgattggtttaagatcatttcatacattacttttacattgtaattggtttcacgtcttttaattcgtccccctttgtttttttaatcccccacttgaaatatacatatgttctcatccattagtcaactcttattgggaaaatccaagaaaaaaaacaaagaccaaaaaaaacaaaacttaaacaaagaccaatgaacttgttaaatcaaggaacttctctctttctctaatctctaattctctatataatctttttcttcttcttcttctctttttttatttcataacctctaaaaagactttaagaatatggaaacaacaaagaaactctttgctcttctctgtctcttcgtcaccatgaaccaagctatctccgtatccgatcccgacgacatggaaactttctgcatgaaatcatccagaaacaccactagcaacacaacttacaacaaaaatctcaacactcttctctccactcttagcaaccaatcatcattcgctaactactacaatctcacgaccggtctagcttcagacaccgtccatggaatgttcttatgcacaggagacgtcaacagaacaacgtgcaacgcctgcgtcaagaacgcaacaatcgagattgccaaaaactgtactaaccatcgagaagcaatcatttacaacgtagattgtatggttcgatactcagataagttcttcctcacgaccctagagaccaatcctagctattggtggtcatctaacgatttaatacccaaatcatttggtaaatttggacagagactgtctgacaaaatgggagaagttatcgttagatcatctttgttgtcttcatcgtttacgccatattatcttatggatacaactagattcgataacttgtatgatcttgagtctattgttcagtgtactcctgatttggatccaagaaactgcaccacatgtctgaaacttgcattgcaagaactcactgaatgctgtggtaatcaggtttgggctttcatctacactcccaactgtatggtgagttttgatacatacaattcatccttgccgccgcttccaccgccaagtcgcagcggttccttctcccatagaggtaagcatattatatatgaaataatgatgggttatatacttttctttatattgtagatgatatattcgtaccttttatgctttgacatgttatgcatactttaaaaagtttcaaaatatattagaatagagattgtaaattttcgattatataaaacttatgttttgatgtatcagttatttttcaaataaattaaaaaataaaatgtatttaagactataaagaattgcaacattaattctctcctgtattttttttagcattatgatcatcaatgttgtaaagtttttgtttttgtttttgttttacaggaaacaacaaattacttgggggaatggttcttgctgtgtccgtttcggtgtttgcatttttgagtttggtttgagttcccatttgtaaacgtttggtttgagtttcgatttgtaattttgctaagtgcaaaacaaaaattaaatcgttgtttccgataattatgcttcattcttatgttttattgtccccttccaatgtgggttgttgtaagaattgtcctttgtataatgattttctgtttttaattcatttgattttgatccatgcatatccatgtggggatcaaaaacattgtaaaatttctattaggagagcaacaactgaacaagtaactgataattgtatagaaaagttgacttaaaaagatagtatgatgatatatcctcagtttaagatcgaatacacggaattgttaacgagtacagatttccaaagaaaagtttcatataaattcactttgtaaaatatttatcaaaattcttttgttttatcatttttaatatctacttatttgtaactaggttatcaactccgcgatatcgcgggaaactcatttttgtgatgatatattcaaatatttgaattgttacatagattctaccaagttttaacattataccgtaaatatattgttttcgttaattatgcttcatgcttatgtttttctcgttaatgtggttatacattcagttgatgtaagaattgtctcatttttatacacggaattgttaacgagtaaagctttctgaagaaaagtgtcatataaattcacttcgtgaaaacatatatcacaattctttcgatttatctttctttgatatccattaatttgtaattacttatatatcaatgacactgtataactcttttaaattaagggactagagtaacccaaattaaaggtttaactactagagtatcttgtaaattttagttggcttagtttcatgtgtaaaatacccttttatacgtaaaatagaaatttagaaaaattacgaagaaataataacattccacagttgattgagctcactagtttaaaaatccgaaagtgtcactacttacatttcatacattacttttcacataactatcggtttcacatcttaatttgtacccttaattaatccccacttgaaatgtattaatttgtcattaaattgtattctccccattagtcaactctttttggaagaatcaatggaaaataagaaagttataagatatacatatcttagagaaatatcaaaaactaaaacttaacaaagaccaatcaacgaacttgctaaatcaacgaccttatctcataaaccatacaagaaatttagacatgtaaacatcaatgaaactctctgcttctcttcgcattaattcattaatttgtcattaaattaattcccacttgaaatatatatattcacccattagtcaactctttttgggagaatccaagtaaaaaacaaagaccaaaccaaaaaaaaaaaaacgaaacaaggaccaatgagcttgttaaattaacgaccttgatcttcttctcttttatctcataatctctaaaacaaaaactaaaagaaacatggaaacaaccaagaaactctctcctatcttctgcttctcttctctcttatgtctcttcttcaccatgaaccaagctgtctccgaaacagaccacatggacactttctgcattgattcatccagaaacaccactggcaacacaacttacaacaaaaatctcaacaccatgctctctacttttcgcaaccaatcatccatcgttaacaattacaatctcacaactggtctagcttcagacacagtctatggaatgttcttatgcacaggagacgtcaacataacaacgtgcaacaactgcgtcaagaatgcaacaatcgagattgtcaaaaactgtactaaccatcgagaagcaatcatttactacatcgattgtatggttcgttactcagataagttcttcctctccacctttgagaaaaagcctaatagcatttggagcggtgatgatccaataccgaaatcactaggtccgttcaaaaagagattgtataagaaaatgggagaggctatcgtaagatcgtctacgttgtcttccgctctcacgccgtattattacttggatgtaactagatttgatggctcctacgatcttgactctcttgttcagtgtagtccacatttgaatcctgaaaactgtaccatatgccttgaatatgcgttgcaagaaattatcgactgttgtagtgacaagttttgggctatgatcttcactcctaactgttttgtgaattatatgatcacaacttcaccattgccgccgcttccatcaccgtatcaccatagcggttcgtgctccattagaggtgagcatatattcatttttgggtaacaattgtttctttttcttttttttttccttccaaaatctttattagaaactttaagaaatatccatgtttacaagataagaaagaaaatatggacatgaatgaaatagagaccaatgagaccaatgggtaacaattgtttctttgcgtttttttacttattatcagtataatatatgttgtcttaatgtttggattattttgttttcaggaaatagtgaaatattttggggaatgatcattctggcagctttggtgtttacattttaggtctatgataagactgcgtgtttaagggaaaaataaaaattcagttttgttgttgtaatgtttcatgttttattgcttgtgtgtgtctgtccctgataatgtgtttattcagtcatttattgaaagattattttaacttgtcatagtgtcgagtgtcgacattgcctcacttttattcggttttcactatacatatgctttgttctcctctctttatggacattgtggactgttttatcacaaggtttaatccttaatagatttatatgaagattttttaaaaaagatgaaatatgatattgtggttaaatcatatgttacacattgaagtccccttcaaggttgttatattctgcttgaaagaaacactaaataaatcatcataagcattttccaatgatatcaaaccggagttacttactttccacgttcggataaacaaaacaagattacttgatctgaaagaaaaagaagcttttgggcttagatttaaatctacaatgaataacgttatcgaaactaaaaagatctttatctctttctgttaagaggttttactgaagatgaaatgccagtgaccggtcttttagaacctgagaccaaaagagaaacacattatgatcttgtaggcatcaagttcctaataatgttagacaaaatttgatctaatctttgtttactttacaaatagacagaagattaaaattgacaaatactttgaagtgttgatagtgaggttacttgttaaagccttagatgaggtagtggaaatcgacagacgagaaggtttacttatgtctggttttggtgtatgtttcagtggctttgatggtccaactccaacatgagctctgcaattagtaaattaaataaaacaatgaactctaaacacaatgtaactcttatttagaaatatgattcaaaagtgaaagtaattaggaactatactcacttgtcattttgttcagattgttcaaacatttcaggaggatttgaggtttcagggaagagtgtcaactccattgcaccgctactaatcgagccatcagtttctgttcccattgaaagacaactatctgagatatcactcaatctttcctcattatttgattcttcaaaacctaagagttcagtatcctcaaatatattattgtctttagccccaccagaaaacttagacgatgatcgagattcattttgatgtcgatgtatatctgaagttgttcttccaagtaaaccaggtccttgtcttcttcttggagaatttgttaaagctcctcctaaagaatgccttctaggaggagagacaattcttagtttgcttaatccacgtttttggataccatttatgttttgaaacttttgaagttcttcgtctttcttggcaatcatatctttcaagttcgatacctgcatgcaatatcaaaataccattacatctccacaagtgataaaactttgacatgaggaaactattgtgttgtggagtataatatatcttagagagaattgtaaaagctagaaagtgaacgtagctttcacattaaggtgaaccactactataaactattaatggttatttcacattaagctatcacttttgttggccccaacatgaataatgtaagcacctgttccatgagttgtctaacatctcttccttccttatagcttctagctgcacctaactcgacaccagaaactctttccgcaaatttcaaagtacttacagtctcagcatatgaatcttcatcaggattaatttgaacaaacataagagttttcgcttgccctcctaaaaaattaaaaagaggagtaaagaagcaagcaacaatatcaagtaatattttttttattgaagtctatcttatagtacctaaagaattctggaggacttgtgttagcttgctgtttctataaggtacatgaggattcttatgtgctagagcgaatataacatctccgagagcagacaatgatttgtttatatgttgagcttctttgagtctctctccggttacttcagagcgaccaactctctcacttccagcaagatcaaccaaatgcaaactaccacgcaagacggattccgttttaacatcaacaccgcgtacatgaaccgaaagaacactacaaaaaatggacaaaattaaacaaatgtcttagctcaatatagaagaaagatattaaaccgtaaaaactttattcagacctgtgtgatctactactcttttcattaagggttgtggcgccaacagttctattcatcaacccaatattcatcagttcaagaacatcttcagttgatcttacagaatgcatgcttgcatcaggaactgcgaggccatttggtaaagaagtattccaaatcccaagtgtatgcaagttaaggaaatttaatatttgtaacataaaaaaaatgatatcaataaaaatgtcaaatacttaattagattagagaaggatatctcttattaggaccatcctgagaaagtaggtcacgaacttgctcattgtaaatctcaaccatttgaacaccaacttcatacatcactgagttttgtctactttgagttaagtggaacaagtcattcaaagctcgatagttaacaccccgatcttcttctgaagttatgcttggtccactctgtgttaattcactaatttttaacttatccactacaagatagcatgtggaatttcgaccaagtttctaaccaatgaaatggtcaaaaacatttacgaaaaacttttgaccaaattaagatgaaaatttaaaatgatcatatattggtcgaaacttttaaatcaatatatttggttgataaatggttagagattcgagactctttttttttttggcatcaaactttttaaatcaaactttttttttaaatcaatatatttggtttataaatggttagaaattcgagactcttttttttttggcaaagagaaattggagactcatgatgcataaatatataaagaacaaaactagacatgtttcttaccatcgtataagtctttccagaacccgtctggccataagcaaatatacatacattgtagccatcaagaatg

SEQ ID NO: 808 - DNA, 82315 bp, Arabidopsis thaliana
gatcgaatcataggtcgagtatctaagaaaacttcctctgcacgcatatatacatattaattaattacaagtccaaaactatacattttcatatatgaaataaaataagtggaagaggcttgaaccttgagttgattcagggccaaagactttgttgaatttgaataaacgatacgtatctttgccttgctttaagggatttgcaaccaccagttcaccattctcacctgtgtactctattgatgtttgtttcttgttttgtccttgaaggaatggtcttatccggcaatatactctaatatttcctttttgcaagcaacaaaaaaaagtacacaagaagcaaatcttaccgtctaaaaagctataaggctcaaataaatgaagtagagttagggcagtcttttaaactggtttttggatgttttttgtttgcaaatatgtgaaatcaatttatttcaaaatgaaataaaaatatatgctaataagttttcattgacgattttttgtcatgaacaaattggtttaataatttgatataatattttaatgaaataatcatcacatttatttttcaaaaggtttagtttttagatgcaagcatttgaggtttataatatataaattttaatatttgttttcaaaagaaatattttctaataacaaaaaaaagctaggttcttcgaggtatagtgccccaacaattatttttgtaattatagaagttcaacgtgaggaacctatgattttgtgattcgacaatttttgtgccaagtgccaaccatgtttcaatatcttggcaccaaagatttatttcaatatcttggcgccaaaatacgatttcaaaatttataccttttaattcttgcacttcattgtaaagtcttcgattctcttcaattattatctggtaattttttgctgcatgagccactcctctgagctttatacctaagaggtgaattaaaagttcaaataaacatatgaaagccaaactcagttgataaatatatacaaaatgcacaaagccaaaactaattaaccaaaagaaaatggattacaacgatcaatcttaccatagtaagttagatccaggaagtagttctctcctatctttaatacatcatgttttaaagacatagaagtagctttcaactcctgcagaattcacacaactcgatgatagtaaatgaattaccatagctttatcaccacatttacaaaactatcaataaattaaagtcaattaataacctgcaaagcctctgtctggtggtttataaacctcttatatgtttgttctttcttctcccatcttttagttttagtttcacataacttctcgagttcttttgcttctactacacgtaactctgaattctttacttgcctctccaactcaactttagctttttgagcatttagttttagttccaaaaactgtttttcatgtgtctctttcacaatttcaagttcttgcttcaacttagaaagttcagcattactacgctcttttccttttctatttggagcacatctttttcttctgacctaataagctagagagcacagcatagtaaaacaattgcaaattttaacaaaagtggcaacaaaatgaaaaggtatatgcaattagagacatgaattgagaattagtacctcattctcatctgttgttccagatgccaaagtttctaaaacatttattcttgatctatatttttcttcacgaaccctaaagagtatattttgctgcaccaaacatatttatgatttttaaaaacaattgttgtctaaagaagtatgatattgtccatggaaaaatagaaatttcttttgagtaaatcatacgttttttaggttctcagcttgatttgagatccgttgctcaacaacttgcacaatgcctctcaagatagatacataaacctgaagagcagagcaagcaaagagaaatgatgactgagaaaataaatttcttatgactaacattgcaaaatcatttccttacatgagacacattcatcttctgcgagctctcatcaagaagcctatccagcatgtcaaacaacgatcgtgtagaagtattctaccgagagaaagaaaaacgaagttcaaggtttatggtttaagaaaattaaacctgaatcataatcaaagttgaaacaaaattgactaaacattatgttagaaaattttacttgtaagctgtgatgagatgtattaatctcagatgcttctataaactgtgatcctccatcattaaagttgctatcaactccctttgaatggtccgcaggcaaactccatcttcttcttgcagaaagtgtattcttatcatatccatcatcagagaaactagctttaagcgccttaagagactgtataactcgaatcatatccccctgcatcgatatccgagtttggattagtatatttgtgtatctagaacattttactataatgctacattgaacttatatccatgtgatatattgaattcaatctatttgttaaatcaaaagtggcaatgcaaccactctagcaattattttcttttgattatatttttaaacagagaaaaaaacaaattatatttataattagaacaatcctgttctaggtctgaaacctcaaatctgggcaatgtcatttcatccatagctgccaaaaaccgctcaatatttacacaaccaggctcgaagcttcctccctacatgattactccaaatagagtaaatcaaagtaaaaacaaatcacataactagaactctagaagattgagacatagaaaataaaagaacgaaaaaaaccaataggtttacacaaaatctagtaccattcgcatcgaaccgggactaagctgatttaagagattgcacaagacagtaccatccaccaaacatgctctcaattcttcctctgaagcttcccatggtaaattcaaataaggaagtgtctcatttaaccactctactaaactttgatgacctagaagccaaattaaatttacaatggttaagaacaaagagaagacgaataaaatatctgaaaacgaccattattatgcaaaaaacacatttaccttgcttattgtcatctatactttcacgactttcggatccattagaagactgaatgctgcttgatccgtctgatcttccataaacaccaatcatgctggatccttttttgattcgatttttcatatctggacatgtaaattaaagcaattacatcatttcatgagcattagttatcaaactttcataagataaattttcaaaaatagctgctgcatgacgaaaaccataccaaattgagctgttataagttagttttcgtattcttattgagtaattaagtaggtttgtttgaaaatataaagaaacttgcctagaaatctacaaacatcaatttacaaaagaaagcaaagcctatagctaaaacatatttttttcgtgaaaccggaggcaaaaaatttgtgaaatgatgaatctaaattacaggaaacatataaaatactgctgaacaaatcaacggaaaaattcagctcgaattcacgaataagataccaaaatttcgtagagacgtgatgagaaacctcgagagagacttcttgaaaggccaacgatattgaatggtctcaaagaaactcaacagagaaattcagacggttgattctttgccagaaaagaattcaaaaaatccagttttttttttcttttctttggttctcaagaaaaatacggggaaagagttgggatcctttttttatatatatttagtaaaaaaaaaaaagtttattgagaactaaaaaataaatggaaactttattttacgtttgagtttgtttttacgcaaattcttcaaagacattcccgctttatttttgtggcttttgagttttgtcattgttttaataaaaataattgaaaggcaaaaaacgttaaacacgaaaagagtattgaataaatgggccaaaatattattggatggcaaataaaatagacaattttgcgggctaaagggcccaagttccattgacttttttttttggcaaaactaaaagtttttgtcaaaaaaaagttttggatgcatacaatagttcattgccaaaaatatggaccggccactagggctaatttttctgcaatacttttttttttggataatgagtaatgactttttggcaatacttgaaaagatgtaaactatcattttcaatataatatctatcaaaccaaataaattatggtcactttatacacatcaaaaaacatcattcgttgtatggagcagaacctgaaaatttatttggtttatatagagaactgcaagtattatcagtatgaaccaacagctttaaattttcttattccttagttagactgtataactaaagaatatttacttttatcatgtaagcaggaataaaatattaacatattacgttcagaaactgttagtataaacactgatttcatttaatattcgatctaaattcagagatattgtttagttgtatatcagtgaatccgttggtatttatgaactcttcagataattgtttttaaatagttttgtttgttcatgcgtggcgccacgcagatcatccatagatcgtggaaaagagtggtggagtaaaatagttgtataaatatgattaatattaaatgttgaaaaagtaagagaatgtgctttcgcattaattatatatactataataagaagacataattcagtattcttttattaccaaagcacgtggcgtatactgtaacgcaaatgtcaatttgtcaaaacgaaaggttgtcttattcatctaaacaaaactgatggtattttaatggaagataatccctgaaattgaagaagaaaatcatcgataattattagtacagattaaagcagtatctttactccctaaaacgtggaaaaattagggcaccgtttaaatttacggaacaaaatttagcaataatttaccgaaattaataagaagaaaaaatagaataagaaatcaaagtttagagtttattttcaactgttaattaaaaagaaaaaaacagtattaaaatgtttggtaaattacatcataagaattgtcggaaatagaaaaccaaaatacaattaaaatcgagtatatgctattttctatatttttggttattgattttaatcaataatatactcgatttaaaatacaattaaaatgtactacaagaaataaataaccaaaactatttgtaccaggaattttaatttatttctaatgagaaaaataaactgaaaggcaagttatcacgagactcatgatcaccaaactcacacatgtgtatatagatgcaatttgatatacgcgtaagagtgctcgagtacgtatacatgagggacaaagcaaattaaatgagacaatgacatgcaattatctccatgcacacatatacatatttatacgtgtgaaatacgtatttacataatgcacgagctttttttttttttttgataaccacaggaggttacaagagacaacttatttcttcccattaatacccaaataaaatactcccacggaaaaaatatatgtccaatcaaaccgagaaaactagtcggaaaagtgttcaagtggccaaaaccaaacataagatcatatcatccacattatccttaataaattcgaaaagaaaagtaaccaaaattaaataagaaaaaccaaaaacgtaaaccgattaataaatgctttaatttttttttactaaaattgaatcaatgataaaccaattttaattcgttgaagaaaagatttataattgttatcaggattgagtatagtaactaaattacgtgtggaaaaaatcgaaaaacatttttaagacattatgtttttgcatttctttataggcttacactttatacatcgaatgtacgtttttattgttataactaatgctatttgatgaacaaaataattgagattggctcgacctgacacacttatcaatgctaattaaattagtggaccatgaaaacagtggactgttccattcaatttattggttggcgagtctctatgagcaagaagagtttagttttaatatgttcagctctcgattccttgatattactcctttttatgcttctctagacactagactatcatatcaatatgagttatttggtttgatagcaatagtaaacatgaattttggacaaatgcatgtcattgggttttaaaaagttgaggaataaagttttttattgggtccaacttacccttctcatagaaaaatgacaaatggttatttgttagcttgagattgtttatacctatattttctttgtataaaaagaaacatgtttctgattttccacacaaatgaagaattagttaaatgatttattttttaaaaataaaagatgatttattatttacctagacaaagcagaatacaacgggtgtaattaatacatttaatttgtatatcattaattataaaaatatgattagcatatagtttattttacatgtttaagttattacaccatacaaagaaaatagatttttgtattaatttatagagttaaaaagtgattttttcttagcaatcattcaattaataagaacgtttaaattcttcaattaacagctactttgtttgctttttgaaatattgaattgttttgttcgcaatcaaaatcacttttaaccattattcacaaggttttatctgcaataatataattaataaaaaaataatattacagttgcaaattgttattttcttaaaatggagctgatcattttttcctagttgttatatgctacaaattgttattgtatagtaaaatatctataaattaatattagaactaaaaagtttctatttaaaaattagattttttagttagtaacattcttctagaactaattacaaataagaagacaataccaaaacttttcgatgcagtaaaaatattaggaacaaactctaacaaaaatcaatgcagattcaaaaaatgaaataaatatatatatatatatatatatatatatcatattccactaaattttcttgtatgtaatatatatatatatatatatatgataaatttatataagtattaatttatcaaaataatggaattatatgtctatatataactaaactaaaataatatattaatgttttatcgaattaattgcatcaattttgtacactaatctaatttaagactataaatatttatagtaattattaatttatcgaatattaatttataaaatattttgtttttaaaaatattattttattgattgctaagagaaaagaaaaatatagagattgaggaaacttaaacgaagattgtacaaatttatagtgtagtatttaaataacttcacaatggtagatacaaataggtagctaaattttactttaatattagtagagtctaagtaaaataatgctataaaaagcaggataaaacaaaagaggatacgggcttaatgatataattaaataaacgaggtctaatgttcattatgattctcatggagacgcaacaagtaataacgacaattttgggaaatgacaaaattatatagttgatggcttaattaacgtcgccagtgacaatattgactcttggtctcttctttattaattgtttcattaagccaaattaagtataattttttgaattcccatccaaattcatgtgattctctacctcctaagatccaccatgatctttgaatcaaatcataaacaagaagcaaatcaaaagcccattatttacatagtttgacttccattgacttagatgaactatcttacctttttctgaaccttgagaattgagatacatataagatgatgataatatgccttatgaggtggaaagtggaaccacttatgtttcattgttaaaccaatatagtatatccaaattaaaatattattttctcagctatatccatatgtcatttagtatatgggaaaacatacagttttttaacatagaagagaggatacaaaccagttaatagcaaaatagtgtcatgcttccattgtcctatacatagcattgaatctctcacatcttctcgtacatgcccaaaagtttatgattttaatggccgtgtttacaacattatttcttctgtgccgtctatgtcaagaaaataacaacatagtatataccctatatatatatatatattacttctttttttaattagttccgtttatatatatgaaagaggtcttacagaggagccttaatgctcagatacaatcaaataagataaacatatagagacgagtgttctagtaagatcagtaaagatgtggtctaattttgttggaaattagcaaaccatagcgaaagataggagtcaggagatggagttgttgaagtgaagatgacgtcttgatccaaaccagcaaggcttcatcggattaggagttgaattccccatttaacttgagttagtattctgattgaaaataacaatatatattagtgttacataagtttggatcagacaaattttatattgttgtatcgaaagctataccaaatttcctaaatattaccctcaaacatcaacacatccgattaatttaccgaaacctccgatcaacagcactacgaatgtttagactttgatcttgtaggggaccgaacgtgtatatatattttaatgttttctgacgtcaacgtctctctcttttctagatgtcagaaaaggaaaataataagtactaatggtccatttagcagggttttatttaaagttatattttaaatagttgcataaatacttcgaaaatataggtttaatagtataagagaattttgaaatataataatattgtaagtatatgactatagggagaatcaacgtcgaaaatgtccataacatttttattcattttaaagatgtgattgcaaaaattaagattgtgtctgtacgtattgggggaactcctcgaggccaaacattaatttcgtgtctttctttgtgtttcccaattttagtaaagactgttcttatattatctctttcctcctcaatttatctattattgtgtttgtgactataatttagattcatagcgattagcttcgttttgacaccaagtaaaaagctgatgattttactattattatatatgttaatcatatactctgatttgagacattatacttttggtcgttttgtgtacttttggaaaattcataaaacgatgttactcaccgacaataatatatttcgatcactcaaatagtaataagactgattagattatacaaaatgaaagaaatcatacgatgctggttagattggacttggatcacatgctaatggtattctagtcaacattgcttcaaagatctaatagtcaaggaaacaaattttttttttttggtatcagtggggatattaagtgagggaaacattttttttcaagaatagatgggtgaaaagttcagccttgacgtgataacattttaactttaaaatcagtgttggaagagacacacaatgattcaatattcccaaaaaaaagagatctctagaaccacaaagagactgaatagagaatttattgaagacaagaccacaacaatggacattgtagttcattgtcttaaaaaaaggttgttcttcccaaatgaggaactaatcaatcaacttcaagataaaaagaggaacaatcaatcaacatcagcgttttgcttttttcctctacttttgtatcctttttttttctcataaatcattaaaaaattataagtactttttattttcgtcataaatgtcttgtgttttgttctgtacacaacaaagatgatatcgtcatattcaaagaaaaaaaggattcgtagacagttcttctagtctttcgagttcaagctcaaacaacaacaaaattaatattcaaaacaacattaataaaaaaaaagtatggagtgaccaaagaaaaaaaaaactctcaaacatttctctgtttgttccggcgaaaacggcaactgtttcatcaaatgacaaacacaaaaaccttaacatctagtttgtatcctctctgatacttcaaaaaaaatgtaaagagttacaagtttccctttttctttcttttttaggctataaatttaacatagtatcttatttctttctaaatcaggacaaaaagtttgatttttttcttttcttttctttttccctgtgtgtggtttcatgggatatagggatgaagaaacaatggctaccggacaaaacagaacaactgtgccagagaatctgaagaaacacctcgcagtttcagttcgaaacattcaatggagttatggtatcttttggtctgtctctgcttctcagtctgggtaagtttcttaaatcatattcattgaacactagatattggagattttgaaagatattgatgaagtaaatttcttgattttaattggaaaattagataaaacttatgtgttcacttcaaatcaaaactagtgtttagttctacaactcaagacaaggttctctaggtttttcttgattccattgattttttcttataaactcatataaggtttcttgatcttctttaaaagttcaattttttttctcttcttcttgaagttcttgattagttcaagaaaatgttttgtttgttttctttattcgatttgatatttgtttttgtttttctatatataaaaagagttttagaatggggagatggatactataatggagatatcaaaacgaggaagacgattcaagcttcggagatcaaagctgatcagcttggtctacggaggagcgagcagcttagcgagctttacgagtctctctccgtcgctgaatcttcttcttcaggcgttgctgccggatctcaagtcaccagacgagcttccgccgccgcactttcaccggaagatctcgccgacaccgagtggtactatttggtttgtatgtctttcgtcttcaacattggtgaagggtaattccgtcttttcctctatcagcattgacatttattatgtgtcatgatcgtgttgatctttgccagttttaaacaacgtgccaaaatatacttttaatactagtaggtccaaggatttcgacttttatggttcagtttaggtttgttagatttcagggttctgcaggaaaaaagtatgagctagaaccaattttttagtttcagtttggtttcaaaatttaatgtccggatttggtcggtttcagattacaaaagaaaaagttaaaacataattaattttaaataataatgtgtatatatatgcattagtatgtttaactctattctacatctaataaattttattaattcggtttggttgcagtatatttgtgttcgattcgagtttagttcggtttatttatcatcacaaaagtttgtttctgtccggattaattaaaaaattcgtttcattttggtctttatgaacacggctaattaactttcaataattatgaatatgttaggaagaaaaaatgtggaaaaattaagcttagaatgcattgctgctttctaaatgaacctgtctttttgcagaatgcctggacggacgtttgcaaacggtgaaccgatatggttgtgcaacgctcatacggcggatagtaaagtgtttagccgttctcttctagcaaaagtaagttgtagtattgatgtagttgctatgtaacacttttttgcgatttgaaaacactaaaatcgttcgtttttgtttgcgttttgtggtggtttagagtgctgcggttaagacagtggtttgcttcccgttccttggaggagtcgttgagattggtaccacagaacatgtaagccaatatttgtgttttctgcttccaatgttttagaataattattatgaaaatcctttattaagaaaaaaagaataattataaaattaccacaatgtattctaacatttcaatttgacccttcaatctgtcgaataacggtatagacaccaagaacacacaaactaatattttagtagtctcgatttttaaagatttccacggtttggttatgacaaaacgcgaaaatacggcttttgtactttttactagctcgttggtatagttataattgaaaactttttcaaggctttttcttggtgtgtttcgtctcgtagattacggaagacatgaatgtaatacaatgcgtgaagacatcattcctcgaagcccctgatccgtacgctacaatattaccagcaagatccgattatcacatcgacaacgttcttgatccgcaacagattctaggcgacgagatttacgcgcctatgttcagtacggagccttttccaacagcttctccgagcagaactaccaacggtttcgatcaagaacatgaacaagtagcagatgatcatgattctttcatgaccgaaagaatcactggaggagcttctcaggtgcaaagctggcagctcatggacgacgagcttagtaactgcgttcaccagtcgctaaattccagcgattgcgtctctcaaacgtttgttgaaggggcggctggacgggttgcttacggtgcaagaaagagtagagttcaaagactagggcaaattcaagagcaacagagaaatgtgaagacattgtcatttgatccaagaaacgacgacgttcattaccaaagtgtgatctcaacgatttttaagaccaaccatcagttaattctcggaccgcagtttcgaaactgcgataaacagtcaagcttcactaggtggaagaaatcatcgtcatcatcatcaggaaccgccacggtcacggcaccatcacaaggaatgttaaagaaaattattttcgatgttccgcgagtgcaccagaaagagaagttaatgttggactcaccagaagccagagatgaaactgggaaccatgcggttttagagaagaagcgccgcgagaaattgaacgaacggttcatgaccttgagaaaaatcattccgtcaatcaacaaggtatatttatataatcgattcttcaaaatttcaaatccatatatatcgcgaggtaactaatcttatgtttaacattttcgatagatcgataaagtatcgattcttgacgatacgatagagtatcttcaagaactcgagagacgggttcaagaactagaatcttgcagagaatcaaccgatacagagactcgtgggacgatgacgatgaagaggaagaaaccatgcgacgcaggagaaagaacatcagctaattgcgcaaataatgaaacaggaaatgggaagaaggtgtcggttaacaatgttggtgaagccgagccagcagataccggttttactggtttaaccgataatttaaggatcggttcgtttggtaatgaggtggttattgagcttagatgtgcttggagagaaggagtattgcttgagataatggatgtgattagtgatctccatttggattctcattcggttcaatcctcgaccggagacggtttgctctgcttaaccgtcaattgcaaggtatactctctaacctacttttggcttaaccaggatttggttaacctagattgacatgaaatgtgttggtttcagcacaaggggtcaaaaatagcgacaccaggaatgatcaaagaagcacttcaaagggttgcatggatctgttgaagactacttagttaaaattgacagcaaagaaaaaacattcccggtttggtttctattctttggttttcttctaaccgggttttaggaattaatgttatgtttatcatttgttttttgttttttttttgtgtctttttttccgttgcttaacgtaggtgaagaggaacatacactatgcgtattttgtttgaggtagattattttaagggtattagtaatagtaatagccagtttagatgattttgtgttcttttgttgtttaagcacaaggttgatgtgaaattacggggaaaaaaacattaatgtgtaaatgaaaattagtggtcaaaaagcttcacacgaaacgggagaagattctgcattttggcattttcatggataacaaagaggtaaagtttatgataagaaatccagattaatttccttaactgggtcataaatgatttcattgaaataacatagtgaaaatcaacaaaaataaatgctgtaatatcttatttttacaaatttagaggtgttgaccaaattactttctaatttgctttatgtaattttacctatctagtcatgtcttattatgttttacttaccaactcatgttattcttttcgtttaatatcaaggatatttcaaacccaaactgaaaataatcttcatatattaatggaaaaccagagtactcttatcttatcatttaaaatctttgtgttgacaaaaaaatcttaaacaatagtataaaaacatgaatcttattcctttaaattctaaggtgaattctaatttactttctaatttgtgtaaaaatataaaatatagaaaaatgggtaaacttgattatcaagaaaaagatccaaattggaaagctaaaatattgttatttagaaggtagaaccaaaattaatgactaaaaatatttttctttgaataaaatatacctcatatggaaaatattttttcagacaaaaacataactcctttcctttttaacagcaaaaccgaaaacataaattcaaagatacatgtcgattttacacacaaagtgtgcgatcagacaagactcaagggagagatcgagaatggtgaagatggcctgaaaattcttctctccggtaagaacttgcatttacatgtttttatatatatctcggatatttttcttaactatgtgtgtacttcttagttctcgaaaatgtagtttacaatagtttctcttttgaattaagtcgagataatcgcaatactactcgggttttactagatgcattctctatttacctgtgttacagagatgaatccttaatcttgtatttatggatatgctttaaacagttttccaattaatattggtttatatttgttatctcctcgcctaatattccattgtttagaagaacactcccatctttttacaaagttgatgatgtgctgatccgtaatccatttcgatctacaacagacttgtgttgtttatagttatccatgttgtgtttttttattcttgcagctgtatgaaaaatctttgaaagaaaggtgcaatctgtaagaacagagtgaaattagactgaatctttaagaatgggagatgagccaagattcagtgagaaatgggatttcagaaggaaagagaacgactttgaagattcttcaagcgatgatccagattcaaactcgacccagcatcctatcattcataacccaaatcttgagtcgaatcagattgataatggaacaaaaactgtgactagagaacaacctgtgaaaacccggaagaggaggagcaagaaagatgagactaagcctgagaaagttaagcaagtaaggaaaaggaaaccgaaaactgtttgtgtggaggacaataagaagaaagatgaaacagttatggggacggacggtgttggaacgtttatggagacgttgcttgatgagcttacggcttctagagagcgtttaatggattgggtgaagactgaattgtgtggagcacccaatgaaaatgtagcttcccgtccgcctcctaataagagaggagttgctgcggtagcagcaaagagacctgtgaagaagaggatgacaaagaagaagaaggaagaggaggagaagatgaagaagaaggaagaagaggagacgaaggagagtgaaaaacagagcaaaccgggtgagagtggtctagagatgtatatacctgaagagaaaagttcagagattgctcacaacggtcgagatcgtgaatgtaatgctgggtcgttggataggttaatagcgagcggtcaagagatgaacacacctaaagagaaaagtccagagattgcacaaaacggtggaagttttgattgtaatggtggaccgttggataggtttcttcatagcggtcaaagtggtttaggcagaaactactttcagcaacaacaagagagtcaagaagcgcttgttgcgcaaactgagatggataattcgaagaacgagaccgtgaagggtcagaaaagtattgttttggccattcaagctccaaatctgagtaagaaactaaagaagacaagcgaagctaataccaacaagaacagatcatcaatagtggagataacaggacctgaaatgcagaaagatcataactttgggacaccttttgcgtcacaactgtcatcatcatcgttgcagagttttccggtacattcttcgttgtttccaaaactgtcttcatcatcactattgcagagttttccagtaccttcttcgttgtttccttcttcaagccaagggattactccttcagcaagtaacaccaactttcaaatgagacaaccagtagctcagactcctgatctttctgaatttcagacaggagtcacaggaggacaaggatttgagaattctctgttgcacaacaatggttacttttctggttttccggcagcttttcagtctaatctgatggcaggtggttataattttccagcacaactgaattctgcgacttcttcacagcagagagacgacaacaatatgttcggaggtctgatgatggcaggtggagccataagattttccggtaacagatttcctgaagctgaagtaagcaactgtaataacggcctctccgattacagaactagccctggtagataaaggcctgttccagagacaacagcaacagtgtgatctatttgttccttaattagatcgaaaaatttgaccagattttcttccaataaaatacaaatgtctctatcctcgctaattttagtggaattatagatgtgtcttttgtaactcaccgtttgaacccgaaaggtgtttccgcaatttgatattttgccaagcatcgtcatttgcttctctctgcagtacttgtataaggtcatgtcgttagaatgcaaacatccttcacagcctcgtctgacgaacgatgtaagtcctttttataagattatcagagataagaaattcatggttggaatagcttcatcaagtattgggattaagatcattcattcttctttaacacaatgtaagtcgctaactagtttttgttggattcggctttaagcaactcgtgatcacctcgaaccaaagcttaatacttgctcattagatagatattccacgactaggactttgccaaacctgaacagactgctgatcctttcgggtcacaaacattctatttcctccaaacgccaatcctgttatcttgttttctcctgaatccgctaattttcccaacgaattcttcctaaaaaccctctcttccaatacatcccggcttgcattccccaccaaacccgtgatcacttcagaccaaagctctatcccacttcctttactactgcaaaacacatgattcccatagctctctatcttagacccaactcctcttctttcattcaagtttctcttcttctcttccccaagacaaacccatggatccttagttcctaaactcctcaaatcggcgtagaaaacttcccctgaagtcacaccgaccttgaacaccgccgagagattatccgagacagtaacatcagagaaacaatcttgtgcctccttaatctcccaaaccatattccttgacctaacatcccaaaaccttatgtgaccattgacaccagaaggactagtatgagaaccagaaaccatcaacaaattacaactctgaatccatttcaacttagtcgatggaatcgcagaatcaatatcagcgccatagatctcacaatgatcaatctcagacacaggtaacaagctagaaaggtcatacaccataatcgaattcgagttccttctactagattcaaagctagtgaacaaaaactcatgagaagaacctatggcttgaaccgttgagctagacctagtaacgttttcccaattcagagtcgtacgaacgaatccgccgttatcgagatcgatgatttgcaaaccagggaaatcggtagctccggcagctaaaactcccggagatatctctagaagcgaatccacggcggagaaattagtcaacacagtcgacttttgcctcaacgaccaatcaaacgaagtgattttgctaccgtgcgccacgtggagacctccgccgattacagtcggtgagatactcgacggagaatctcgaccgttcaattgaagaatcctagatctacggagatcgaacggctcgaactgcgacgaattcgagagagaatcgattaagaaagactcgattccatagtatctagattcatcgatgagatcacgaacatcgaaggcgcgtgatctagcaggtaggtttccggtacggaggatatagagaagaacggagaacaaatcgggatcacgatcgacgaaacgagttgtctcagtagcgagttgagataggagagaatcggttccggctaggcttaaggtttgcttcgttgtttgaaagattcggcctccgacgttgatggagacaacgttcgattcatgagggatcgtcggaaaattcatacgagcaaatcagaagacgttcttcgctttttttttttttttttttggcagaggatgataagacggataaacagtgaaacttcagagaagaggaacagtttttacttgtacaaggctaacacggccactgaagtggatgagatcatcaaatcaaaacgaacaatgcgtttagtaaattttggctattgagacggatatgtacaatgcgtttataatctaaacgatgcatatagccttcaagaaaagaaattaccgaatcaataaccggtataaaccggtaagagagacttatttgaaattgaaaagactaacaattcggttcggtctaataatgtacacaaacgtccggtccgataaattaaacaggtgaacaaagcacaaagggagaaatagatttcacagttgagttataagcagagataattcatgatcatatacaataaaacaagtcccctaccaaagctggttcaaggatctggtttgccagcaattgcaacatcatcatcatcatcatcctcattatctgagccgtattcctcttcacttagttcttcatcgctagacttatcttctgaaccttcccctggctttgcatacttctcacagtattctgaaaccgcaaacccaacaaagccgagcaaaataaccatcacacttcctcaaaatatccccaaaaaccgtaatatccccataacattatcaagaccttgtaaatgcctaagtctttaaaatgatcagaaacttttatcttcatcatgagattctaatgaataaatcacttgcagatcattacattagctccaagatttacgaaagttcagttcacacataaaccaaacaaaagctctaattcattaaaacgaaaaatgactgagaggaactcttagtgttaagaatggtaatctcgaacgcacacattaagaacaggtccaagcaaatatgtgtacctcacatcaagcaaataaaagaaaaagagaaagaaactaacagatttgtcagaatcttgatatatctcttaacatgagaatctgagtcgacttacctttaactcgttgctcataagcaggacgatcacgcatcattaacgcagcagcttctccattcaatggatctgatgggtttggatacagaagaagctgaggaagaaatgtctcaaacacattcacaaggtctgaaaaaaagaagaaccaaaaacataaagttaaatcacaacagcaatcatttgatcccaaatattcaaaataaaccacatttgatatcgcccttaccgaacataggactccaagtttggttaatcacatctaaacaaacagaacccgacctgcataaacaaaggagaccaaagatgaaaaagattgaaataaattgatccaaaacatctagtggattgaatttaaaaagacttacagttcatcaacattaggatgataaattttagtaatgaaaccaacagatggagatttataaggataagcatctggaagctcaactcttatcttccacacacctccttgatagagacctatcaccaacacacacattaaacccacaaataatagtttaacaacagttcttcacaactaacacccgagtatcccaaccgaacttcgccgaagcgcctaactaatcccgtggtgagcaaactcgcaagcccaccacgagtaagtaaaccacacacagtgtgtaaacatggtggaatcgaaccgccgtagatccgaatccaccacaaataacggattgcaattttgacactaatatgaacaaaatctaagaaaaccaggaagaattacaaatacccttatcatcattttcacaagtaacagaatcaaaatagcacactagtgactgatttagagacaacaatcaacgaaactggggattattctcagacaagatcaatcttactgtctttgggaccattgaattcaacatagaattcttgcatgccatcgttgatcgtttccactttataatcgctcatcatcctgcaatataaaatcaaatcaaatcaatcatagaaacaaaaaactcaaatcaaaagtaacaaatgaaaccgacagagaaaaaaattagaaagttattacagcttcatcatatccatttctctgcgtttgcttggcgaagacattttttttctctgtcggttcgcttatgtttctctgattttctgggttttttttttggtttttgttcttcttccggattcgagtggagatgaagaaaaatgtgtgagagaaaaaggaaagattttcgtttattgattttttatttatatattttcacgtacatcgatgatgggagtgaaccaccgaaggagatcgtatctctaaatatatatcctttgttagaaataagaatctcactcccttcactagtaataaattttgtgattttgttttgctttttcaattactttctccctaaaaatttttaattattttctcccaaagttagatcatatttttgttatttcttttaaatctataaagttttatagtaattattattaaattttagaaaaggtttttaatcacatagttaaactatatttatagtctaataataaatgacattgaaacaatgaatcaattgaacgtaaaataaatatttttcgaacacgtagatattttcggaatatattttataaaacttgaatctgtaaagtatttagttcaaaaaaataatttttaagaaatttttaaaaaacgtttaatatactatttatgatgattcattaaaatcagtaactatttgtatacctcattatttattagtataatctatttaactaagaatattaaactctcattattacttccctaatttttcctcttttttgtttctttttcttttgtatttgagattgtaatggcttaagataacatatttgaatagtcaaatagtaaattttcagtcaaaatattactcgatataagtacctaaagtatctctaagtattagtgtttataattcttaagaatatgttaattagtgttttttacagcaattactttacttggtgttatgttttgtatacaaattagtaactagaaccctaagaatatttttatacaaattactttacttggtgattttttttgcacattttattcgttgttcgcttatgtttatctgattttattatttttaaagttttcaattttgttaaatttaatttttcatttaaaccaatggcgtgacaaaaaaacctctattttatactgttttacacagtaatggtcactcaaaacgcttttctggcgcgttgaagttgttggtcgacaaaaatagttggatggtcatgcccgattacagtctaaaaacatgaatctgtataagtatttaactagaaaaaacaaattagacaggaaattttttaaaaaataaaaatatttgtccaatataccattagcatgattcactataattagcaactattcatctgtcacttactcacttgtgacaaatattatttattaaacaaagcaatgactaatattgcatctacatgtaacaatatcatttactagataagtctcatttaatttgacgtactcatgtaagtaagatgtacgacaatacgacatcacatattcaactaatgagacaactaaacaaaccaagtttcgaaaatgtgaagaactaagaaatctaaaacataaacactacaaactagtaagtataaacaattttcatattacatatcacagaacaacataaagaaaataaataagcactaaaccaaactaaaatcgaaccgtaataaacccaatccatacataacaaactctcaatttcagtttgattaatatttttcttaaactcaagaaaaaactgaatcaaacccaaattgaaaccccagctttaaaacactcctaaaataacctataaacaagaattaccaaaattaaaacatctagaagaaaaattatcagttttgtctcgttttttattcacagaagtgaatctaaagcacaaactctaattcttaatctccgtttttttgtagacgatttgaaacgtctgtacacaaacatatgtatatcaacactgacatgtttcgtaaatccaactttgtgatcagctattagtgtattcttacccattttttctttttaagtttttctcttgttctccaatttctttcttctgatacagagagaattgagccttctaagatgcggcatttgcgggttgctagtcaagagtagagtcaaataccatttcctgcagaacaaacggatcctctcagacatatcccgggaattaaaatgaatttgtaaacaagctaaattggaactactcattatttacggtttacttagagattagagtttttcgacatacaccaaagagaagtgaataaaagaatgtaccttgttgcagacggggcaggtttcacttctctccatccattctagaatgcatgcaaggtgaaaatggtgatcacatttggctacaagtttcgggttctcgatatcatattctgaatcaaaagcacagacaatataataaataacccattctcgcagtcatgtaaggtacgattatgtttatatgtttttgagatgtgggaaaggcaaacaagcttttaccttccaaacatatgggacaatcctcctcttcctctattggtataaaaacagcttttgatagcttcgggtctatttcttcagtagattcaagatcaatctctgtttggattttgctatctgtctctttatgtgagcatgtagttggaaccccgagagtaataccatcaactgtttcttgagcagactcggtattagcagagtccaccgaaacctctcttatatcaacacaagtagcctcttcaccactagctggtgtttgaggaatccctataggcacatcgaaaggggtaggcagtggcggtggtatataagcatcaggagatgatgtctctaagtttgtgtctactactacaacaccagtagagattgcagaggaagtcctgttatgagcggaagataaaggcacacgctcttctgttgcccttgggtactgcaaaatacaagtcataaaacaagttatattcccatatgaatctcgaagcccgttggggcttttaactcatttagtgtcctgaagcacatcaagattgatttatttgcagcctatcaaagcaaggacacccaaaaaaaacgaggaagtgggagaagtatcagactaacgtagtagtacgcaggtccattatctacatcagctcttcgtgaagaagaacaacaacagcaacctcccatctcttcttctctttttttttttttctgttttacaaaaactacaaaacccgaagactcttcatctatgctaacctacaagatatgtgaagaaacaaattacattctgagatcagtaggagaatatttatcatctatatgcaagaaactcaaacaagctttatcgttttcgatatcagtttgagctgtctactaaagtctgatcagactcatcatgctagtagcaacaataaaacaattcagctactaacagttcaaattcactctcaataatcaaagatacaataaacatcaaccattaaaatcgagacaacagtgttgcgactacaagcctatgtgaatctcctacaattctcattctctttagcaccatctacacacaattgcaataaattcaaatcagttttacactaaaccccaaaaacttaaaacaattctactcagaatttaactccaacacaaacaatgaatccacaaaaagaaccaaagctccattaagagcaagctaatccgtaaaaccctaaaccgaaacttataaaagcaacaataaacatcagaattctcagaatctagcataaacacataggagaaatacggatcaaaacagtaaaaaaaaaacccacagaatttcacacaaaaatcaagctcaaaacctaaagaaaagcgatcactagcaagaacaaacaccaaagaagaaccgatcatcttctcgagattgaatcagagaagaggaattaaaaatctcaaaatcatagagagaattttactttttgttcttgggggaagctttttttgttttgtcttcgtctttctctgcttctgtgctttttgcggtgctgtgtttatcgtgcgctctatcaaaatgactttcctaagaaattacaaagactctttttgggctcaatattatatttacttacctgatttattaaattcattaatacaattattaattagctgattaattattttattttttccgttacaatgtatttttcaaaatttcaataatgaaattacataactgaaaatcggctgaaaagtgtcgaccaaaaaattataaattgggaagtaccattttcagtaaaattattactattttttttccggcaaataatttatcgatgtttaaaaaagaaacatgggctcaaacttaagaataaagcccatttaaagaatcctattaaaagcccatatttgatctgttactgcagcctttatatatgaatcgtgttcttacgtttctgcttaacaatttccttcctccgcttcaaacgagtcaccgactcgacacaggaatccgaattcgccggagacgcagcttgcttcgttgaatagcttacaacgggaaattaccacgaagacggttgtatattccctccgtcgtacaatttaggttatgtgcgaattcacaaattgaaaatacaagagaaacaatccctaaaatcgatttgattaagaggagcgaaaagaagaaaatcaatatgggaaacggtaatggtctcgaatctcgatcgtactgagttttgattcgtttattgaattatccggtgaaaagagtatgctaatactggggaaaatgttgatgtttagatgaaagaaaacgacctacaaagaagatgaagtacggtgggaaggttcgtgttgattcttctccacatgactttttttatttattaggctcttcacttctagttagtgtaattgtactgtaaaaatctcaggatgatcaaaagatgaagaacatacaaaacgttgaagattactatgatgatgctgatgaggattctcgtgatggtaatattgattactctcgtataattaacatagatacattgggaacaaaattgaaatagaatttataatggtttttaaaggtgaaggagaggagaagaggagagattttactgatttggagttgaagccggatcatggaaataggcctttgtgggcttgtgctgatggaaagattttcttggagacattttctcctctctataaacaagcttatgactttcttatcgccattgctgaacccgtttgcaggtttgattttgatttgattattatatcaatgtacaagttatgatttttgttgttgattttcattcatttgttactatttcaggcctgagtcaatgcacgagtataatttaaccccacactcgttgtatgctgctgtttccgttggtcttgagacagaaactatcatctctgttttgaataagctatctaagaccaagctacccggggagatcattgatttcatccatgcttctactgctaattatgggaaagtgaagttggtattgaagaaaaatcggtattttattgaatcaccattcccggaggtaagttcaccagactgatcctctttctctagttatgcgtatgggatttttgtgtagtttctctgttggttttgctcactcgttaaatataaacaatcttaggtgttgaaaaggcttctcagtgatgatgtcataaatcgagcaagatttacttctgaggtatgttgaactcctcaatttagtgctttatgtttactattactggatggaaatacataccatgatctgttgttctcaacagtttttgcatcttttgataccaatgcggcagagagatctatcctgattctcttggggctattggtttcgtgtttaaattctaattttttcttgaactatttaatagataaataaactcattatccttctttttaaactccttggttcattgaatgtgaaattgatatctcttataccattgtattctccacagtatgttgaaccaacttattaactttttttctagccatattatggtggtgatggatttacgatcggcaaaacaagtggtgaacttgaagcaggacctggggagttgttgaatgaagcagaattggcagcagcagcagaagagaaagaaactcactcatttgagatagaccctgcactggtaaatttcccctaatgcttctgaaataaatcgtgttgatgactttgttaatgttatatgatctttactcaactcacggtgtcatgttcttctgctcttggtgtgtaggtggagaatgttaagcagcgttgcttgccaaatgccttgaattaccctatgttagaggaatatgacttcaggaacgataatgtgagaaataattatcacacttcaggtcaatttttacttatcagatgatatgaactggatgttcgtgattgttaataacttgatggtgtctgtcaggttaatcctgatcttgacatggaactgaagccccatgcacaaccaaggccataccaggaaaaaagtttgagcaaaatgtttggaaacggtaatacgatataactgtctacgcccgcatttattttccttagtaatttgtttacagcgactgctaaattgattgtgaacttctcttagatatatagatttgtactttcatacactgttctgatctagcttcattgtgaacttctaatagataagtatctttgttatttctcctgaaagcttgtgactgatctagactcctgattctgcaggacgagcaagatctgggattatagtgttaccttgtggagctggtaaatctctagttggtgtttctgcagcggctcgtataaagaagagttgtctttgtttggcaacgaatgctgtctcggtggatcaatgggcctaccaatttaagttgtggtctactataaaagatgaccaaatatgccgtttcacttctgatagtaaagaacgattccgtggaaatgctggtgttgttgtgacaacctataatatgattgcctttggtggtaaacgatctgaagaagcagagaagattatagaagaaatgagaaacagagagtgggggttgctgcttatggacgaggtaatcaaattgttcttagtgtgatgtgcctttgaattgaagttagtgtttactggtagtttacattgcggaaaagttatatgtggttcatttagaatgtgtatccactatccagtgttactgggatctacaaataacaagtttccatccaatgcgtgacattttaagagttatgtttttcataggtgcatgtggttccagcccatatgtttaggaaagttatcagtattacaaaatctcactgcaagctaggacttacaggtaaatgaaaaattcattttcacatacctttttatttgttatacttcagttgcagaagctaagtctcttttttggtcttttgttcagccacccttgtgagagaagacgaaaaaattacagatttaaacttcctcattggcccgaaactctatgaagccaattggctagatttagttaaaggaggctttattgcaaatgttcagtgtgctgaagtatggtgtcccatgaccaaagagttttttgcagaatatctgaagaaagagaactcgaaaaaaaaacaggttaatgcgtctaagctttctccgcattgatctttgttttccttggatatttttactggataaagatcttaaaataattgactatcttattttatgtttgtttgttttgatacactagagtccatgaatttgatgtagtctagaaccttataatatggtaaacatcaatattataggttatttgtgtatgtcttataatttggcaaatgcttctaatagatcaccctgtaatagaaactaggaaaccccttcaattgttctgacatttacatatcttgtcttctggtgtctgcaggcgctttatgtcatgaaccctaacaagttcagagcctgtgaatttttgatacgtttccatgaacaacaacgtggggataaaatcatcgtctttgcagacaatctttttgcacttacagagtatgcaatgaaactccggaaaccgatgatttacggtgcaaccaggttcgttaaagaaccacctattgagagcacaattttgtatgtttcactcagtttccaatctgatagttctctttgttcaatatgtagccatatcgaacgaacaaaaattctcgaggcgtttaaaaccagtaaaaccgtgaacactgtattcctgtcaaaggtattagcgttgtttcctttccattgacctgggaatatatagagacttgttcattccattttcatcaagtaacttagtttcggtttcttttattgactacaggttggtgataactccatagatatccctgaagcgaatgtgatcatccagatttcgtcacatgctggttctagacgtcaagaggctcaacgtttgggtcgtatccttagggctaaggtgtgattttaagtattataactcatcacattttgcgtctctcctagagttcctcttggttgttggatccaacacgttttatttctccgtgatcaaaaacagggtaaacttgaagatagaatggctggtggaaaagaagagtacaatgcattcttctactcgcttgtttctaccgatacacaggtaaatcactttattgttgaagtagccataaaaactgaaattcatcagaccaaatcagaaccaaaatataattcagttctagtccgcactcgtttccaaaacacagaaaaaattttgctttccagaacccgtgacttgaattcctgaaccgataaaaatcgaatgactgattgaatggagaatgactgatgtaaggatcgtgaatgttgaaatgcaggaaatgtattattcaacgaaaagacagcagtttttgatcgaccaaggttatagcttcaaggtaataacaagcctcccacctccggacgcgggttcaagcttgggctaccacagtcaagaagaacagttgtctcttctcggaaaggtgttgaatgctggagacgatatggttggtttagaacaacttgaagaagacacagatggaaaggctctaaagacgcgacgaagcatgggatcgatgagtgcaatgtccggtgcaaatggaagggtctacatggaatacaactcaggtcgtcaaaaatctggtaaccaatccaagaaacctaaagacccaaccaaacgacacaatatcttcaaaaaacgttatgtttgagacaagagaactcatattcggctatatgttttgagttgtaactttggtgcaaatttgtttcaggcacaaaatcaagaaaacctaaacgaagacaccctaccttaaaagaccgttaacatttgatatttgttttattatgtgaattgattaattgatattagaaagttctttccttttttttgatatttgttttctagcatatcatgatatcgcctcgagaatacctttgaaaattattttgttattgtcaactgtcatgatatctcgctgaaccaacatataaaacacgattataatttggttgacagatcctgaacaacagtaaaacgtacttagttttcgaggttaaaaaataattacttgtcatgatttcgaattaaaaataataatgggctcaatttgagattaaagaaagcccacgctaaaagaggcctactaaatgcccatattggatccgttattgtagcctttctatatatgaatcgagtttgcatttctgctataacgttctctgcattcacatgatcacatcaactcagtaacggactcgacatacccggacctggacccgacaccgaatccgaatcataatgcgacggagacgcagctcgcttctcggtctagcttacaacggaaaatatttacggtaccgtttgttttccctctgtcgtagaatttctgtcttcgacaccggattgatataatcgattgaaaagacaagagataatgtctaaaattgattcgatgaagagaaaaagatcaatatggggaacgataaaagtctcgatcttactgattttggttaattttcatattaccctgcaaaaaaaagtattgtcaattctggggaattttgttgttcaggtgaaagatgaagaagacccgactctgtgtgttttttcttttaagtgtcgtactgatgaagaagatctgggtcaattagtcatccgttatggcccagttgttaagatgttatccaaatcgtaagaagaaggcccgacatgtttttgagacgttggtaagaagaaggtcttgcttcttttgtgcatccagataatgtctatatgaccaaggtaagagcatcctcattgcacatcctccaatgaatgtctttcatattaaataatattaaatttaaagaccctctctcttttgacaggtaaaatgtctactattaagacacatccatttattattttccacttttttaagtagtttaaaagtttaaagacacccataaaagatatgcaatgaggatgctctaagggaccgagattatatactgctgcagatggggtaatgtaatgctatttgtcttgtgcaggagcgttggatgtacattggtctcctcttggttcatactttgtgtcacttgagaaggagaagaacgtggcaactctttgggcattgaatcgtctcccattctcagaccatgtacattgcacaatttttatgagtatcataagcccaaaaatattaaattaatgaataaaataactgatttgggtttaagtagtatcactggagtgatttctttgataccagtctctgataacgtggcgggttatgattagttgggaaaacatgtttttgtgtgaaaagagagaaattttttttttcgattagtcgggaaaacgcatcttttcgattttgcaattttttttttttaatgatactaatacgatttcaccggtggaaacagatttattatcaatattataaaaagtttcaaacaataaataaacattaaaattaatagtaaaatattattaatggtactctatgagtaccaactatgtgcatgctctcatgcgctttccttcctcatcctatggtttgtctttcatctcccattttgcatatgtaagaataatcttagaggctaaaagaaaaaagaatgggctcaacgtgagaataagaaagcccacattaaaagaggtctattaaagcccatatttgatccgttatttatttgtagccttttgaatcttctactttacatttcccttccttgacattaatgattaaaccagtgatacccgaacccgacaccgaatccgattcaaaatccgccggggacgcagctactccctccgccaaatagctttcaacggtaaattttcacggcgccggttgtcttccttctttgttcttctcaggaatcgctaattgataacttcaattggaagatacaagacaaaaaaagaagatcaatatgggaaacggtattaagcagctcgatcttactgatttttgcttagtttatcttgccaaacaaaagtatgccaatactgtgaagttctgttgttcaggtgaaagaggaagacctaacaagaagatgaagtatggtggcaaggttcgtcttgattcttctccagatcaattttttattttatcaattagggctcttcagatggtagttagtgagtgtaattgtactgtcaaatctcaggatgatcaaaagatgaagaacatccaaaacgctgaagattactatgatgatgctgatgaagactctcgtgatggtaagattgtagcatacttattacttacaaatggatacatttggaacaaaattgaattgaaaagttataatggtttttgaaggtgaaggagaggagaagaagagagattttactaaattggagttgaagccagatcatggaaacaggcctttgtgggcttgtgctgatggaaggattttcttggagacattttctcctctctataaacaagcttatgactttcttatcgccattgctgaacccgtttgcaggttcgattttgatttggtgattatatcaatgtacaagttatgatttttgttgttgattttcattcatttgttactatttcaggcctgagtcaatgcacgagtataatttaaccccacactcgttgtatgctgctgtttccgttggtcttgagacagaaactatcatttctgttttgaataaactgtctaagactaagctacccaaggagatgattgagttcatccatgcttctactgctaattatgggaaagtaaagctggttttgaagaagaatcggtattttattgagtccccattcccagaggtaagttcattaggctgatgctctgtctctgctcttgtgtatttggatattggttttcgtttttccattgcctttgctcaattgtaaacacaaaacaatctcaggttttgaaaaggcttctcagcgacgatgttataaaccgagctagattttcttctgaggtatgttgaactcctccatttagttcattatgtttgctttcaagattttatgctggatggaaatacataccatttttggttgttctcaacggtgttttgcatcttttgtcaccagtgtggcagatatatatatattttgattctctcaggttcttggtttcatgtttatattcctaactcctaagttccttggaacgatgtttcagttggtaaattaactcataatccttttttcttaaactcttgattcattgactgttgatttatttaatctaataccattgtattctccacagtatgtcgaaccaacttagattaacttttttggtagccatattatggcggtgatggattctcggtcggcagaacatgcggtgaacttgaagcaggacccggggagctattgaatgaagcggaatttgcagcagcagcagaagagaaagaaactcactcatttgagattgaccctgcacaggtaaatttctcctaatgcttcttaaaagtaatcgaattgatgagtttggtaaagttgtatgatctttacttaactcgtggtgtcatgctctttttctcttggtgtttaggtggagaatgtgaagcagcgttgcttaccaaatgccttgaattaccctatgttagaggaatatgacttcaggaacgacaatgtgagtaacaaatattacacttcaggccaatttttgcttaccagatgatatgcaccgcaggtgtgtgattgttaataacttgatggtgtctctcaggttaatcccgatcttgacatggaactgaagccccatgcacaaccgaggccataccaggaaaaaagtttgagcaaaatgtttgggaacggtatagctgtctgcatccacattatttttccttattgatggtgaacttctcatagatatgtccacttgtacttccacgtgactgatctagctttatggtgaacacctaatagataattatctttgtaatttcttgagaaatattgtgactgatcttgaatcttggatttgcagggcgagcaagatctgggattatagtgttgccttgtggtgctggtaaatctctagttggtgtttctgcagctgctcgtataaagaagagttgtctttgtttggcgacgaatgctgtctcagtggatcagtgggccttccagttcaagttgtggtctactataagagatgaccaaatatgtcgtttcacttctgatagtaaagaacgattccgtggaaatgctggtgttgttgtgacaacctataatatggttgcctttggtggtaaacggtctgaggaatcagagaagattatagaagaaatgagaaacagagagtgggggttactgctcatggatgaggtaatcaaattgatgttagtgtttgctggtagttattttgcggaaaagtcatatgttcgttgagaaggtgtatccagtgttgagcccatgaatgcgatctacaaacaataagtttccattctatgcttgacttttcaagatttctgttttgttttaggtgcatgtggttccagcccatatgtttaggaaagttatcagtatcacaaaatctcactgcaagctaggacttacaggtaatttaagggttcattttcacatacatttacatatgtatacttcagttgcagaagctaagtttcttttttggacttttgttcagccacccttgtgagagaagacgaaaggattacagatttgaacttcctcattggcccgaaactctatgaagccaattggctagatttagttaaaggaggctttattgcaaatgttcagtgtgctgaagtatggtgtcccatgaccaaagagttttttgcagaatatctaaagaaagagaactccaagaaaaagcaggttcatgaatatatgcttttttgcattttctgaaaataatatctgagattgttagatatctgatctttatgttagtttcatctgatgcactagagtccatgaattttatgtagtctggaaccttgaaatattgtaagcatcaatataggttctttttttagtgtgcttttctaatttggaaaatgctctaatagaaccaccatggaaagtctatggaattggagctagtaaaccttgacagttgttctgacatgggtcttctggtatctgcaggcactttatgtcatgaaccctaacaagttcagagcctgtgagtttctgattcgtttccatgaacaacaacgtggggataaaatcattgtctttgcagacaatctttttgcgcttacagagtatgcgatgaaactccggaaaccaatgatttatggtgcaaccaggttcgttcaagttctattgataacacacttttttcgttttcactcaatttccaatttgataattcaatttttttttcaatatgtagtcatatcgaaaggacaaaaattctcgaggcgtttaaaaccagtaaagacgtgaacactgtcttcctgtcaaaggtataaacattgtttccttcattatataaatttgtccttcctccattccatgttcgttagggaacttaatttccgtttggtttatttgactacaggttggtgataactccatagatatccctgaagctaatgtgattatccagatttcgtcacatgctggttctagacgtcaagaggctcagcgtttgggtcgtattcttagggctaaggtttgaatttcgtactcatcacttaagtgtctcttttagtttctcttgttggttggatcaaatttttttgatatttctccatatgatgaaaacagggtaaactcgaagatagaatggccggtggaaaagaagagtacaatgcattcttctactcacttgtttcgacagatacacaggtaaatcactaaagtgaagtaggcataaaaactgaatttcctcagaccgaacccgaattagaaccaaaatatgattcagttcttgcccgacctcgttttctaaaacccgaaacatgaaacttgaactgataatacaaacacccgtactcgtatctccatgtgaatggctgatttaaggattgtgaatgttgaaaatgcaggaaatgtattattcgacgaaaagacaacagttcttgatagaccaaggttacagctttaaggttataacaagcctcccacctccggacgcgggttcaagcttgagctaccatagtcaagaagaacagttgtctcttcttggaaaggtgatgaatgctggagacgatctggtcggtttagagcaactcgaagaagacacagacggaatggctctacaaaaggcgagacgaagcatgggatcgatgagcgtaatgtccggttcaaaaggaatggtctacatggaatacaactcaggccgtcacaaatccggtcagcaattcaagaaacctaaagacccaaccaaacgacacaatctcttcaaaaaacgttacgtgtgagagaaacaaagagaagctttcaagagttttcggctgtttgtttcgagttgtatgtaacttttgtgcaaatttgttgaaattaacaaataaattacttaaattaataaaaaaatgtatgatgtatcatgtatgtaagtattttttttatttttattttttgtaagtattatgacattgtttaaatatgtaagtgtatgtttctatttcgaggaggctactttgcaattgtggaggaagttggtaagatagtaagataccctcaccaaacacaaacatgcacaacagcaaaaatgtataaagataaatcgagataaaatgaattatcaatgttcgtcccacgtaagaggaatattatttgttaataattctttctttttttattcctatgtatttatatgtataccttttgtatttttataagctaaacctacaattaaagttctgtgtaggtagcattttgaccactttttcagttacattgatttacttaattttttgtctatttagtcctaacggattgatattctttatctatttctttgacaagcttcatgatcacaaatcttcaaatggccaactcccattggttgcaaattataatgctctatactatcatttgaagcatcttatttcattaaagtgtactcttataaaaatcataagtgtggaaaaaaaaacgaaaaaaaaacataattattagaaatacaagatatttgaatccaaagttaatattaagattgtaataaatgtggattatcataatctgtatgttgaatactttagaaatgtgttgtaaatgaaattatagataaatattgcatctaaaatagaaaaaatatatggctttgaatgaatgcaatggaaaaaagcggacctgacttatatttggaacagacaataaaccgacgcggcggaccaagtttttctttacgtaatatcggtccgtagttagtccgtcgaagacttgttctattttttttcaatccgcaatactacggattatagtttataaatgataaataaaaaacgatataaaccgcaaacggatttatccgttctaaccgccgtaattattcgaaccttatatactatttctagtcatgaattttaaaataaaatttaaagatttttctgaattagaaaaaatagtcgatataattttcagttttgtttctttgtgtctccctttatctctcgtcaagtggagtacaaagagaataagtaaataattttccgtaaagaaagaccagatttgagctcaaatcatcattgcttcctttaagatcacacaattcatagaaagttatattttgacacatcacactcacatatgtcaaaaaaaaaaaacatcacacatgtccaaaaaaaaaaaaaaaaacatcacacatgagccactccctttttgtcaacaacaatgtataacatgcaaaaaaagtttccgaatccaaaatgctacattttatagagcgattattagtaatttatacgaatattatgaaatgaaggtttcaaaacctaaagagattaaaaaccaaagtagggaattttttttctttcaaagtagggaacttctcgattgaataagaaaacaaaaaacaatacaaaattttatggttttcgtaatgttcacgttcactgaaaagctttgatcgttccaattcaaaatttgcaataatttttttagccttgcttgctcgaatcttagaactgacaagtatgaatcctaatatttagacttattattatacggacaatcacactttttactctgttatgaaatgtaattgatcaagctgaatatttttgtaagggcttttgcaattgatcaattctaatatcaagctcaaagccgtacatttatacaatttatctttcacctcaaaaaataaagaataattctataaagtttaaaataatatgcactataacccgtttttgctattttcaagttttaaaaaatttaatcaaagtcttcgagatgagatgcttaagtcaacctttacattttgaaaagtcaaatgtacgtgatcgtgaatacatttatgtataagaactatattatgtattatttttaattttataatattattctatattttaaaaaaatgaaaagtaaaattgtaaaaatagatgattttaagagtttttttagataaaatcatttaaaaaatattgtgtttttcattttcatgattaccaaattacaaataatatattttctcattttattttgttcacatgtaatatttgatggagaaaaaaactatattagcacgtacggtcacaggagaaaaactaactaatggaaatatattgcggttggtcaaaaagattaaactttggaatcatgctttggttagttgattatatattacccgatatataaaaataaaaagtattactattttcctccattaactatatggtacacgaagaagaatcattagtagattctttaatttttttgtcaacaattagtagattcccttgtaccactaactgaaagttaaaaaaaaaaaaaaaaaaaaacttgcttcatattaaccttacccggaaaaccaaacttacaaaaaataaaaataaaatcataagatcaagatttatcactacatgtcaaatactctgcatgtacattaagacacgtgaaatataagataaggagaaaaaaacgaaatagaagcctttcggttataaaatttaattatatgaaaaggaatatttagcaactaataacctagcataaaagttgtaaaccgatgattatgggaaaacacatggtaatgactaatgatgaaatgcccattgccattgtgtgtgtgtgtgtatttttgtttttatttacactatagggcatttgaaaaaggcatagctaatcatagccaaagaggtatggaacatgttcgacttttatcgttgtttatactaatctctcttaaatatttttaagcgacgcatactacaaatccaaatgggatttattgattgtattaaattgtgtcatatttaagatccataatgtatataattgacacgaatcccatgatgtaatggatatatgtatatataaatgttacaatattcgaagaatgtttaatgcttcatattcttcaatttctttttacttatttttccatatattgctttgattgatgagattgtacaagtgtaatttcctcttgtcatggcatctcatttattcttttaagctttaaagattaaaaacctttgttttatcttgtttcctcgatcttccacaacatgatttgtagaaatatatctgactggaattatcgagaaaactgccttttaacaaacgaataactaagacaagaaagggtaatgagaataatttcccttatcttaccaaaaagacagaaattaataaatgtgtaaggctttttttatttaatagcttacgggaaaaaaaacataatttaaaaatgaagatttcaacattaataaattaaaaggaggaaaaaaactaataggaaccgatgaacaagctagtgctatatctttaacccaaaaaaaaaaaaaactactgtgtcgattagttccaaatattacaatttttatatgaataatgtggtaacttaacatgtacctaaattcaatttttatctcaattaatcgagccaaaccaaaccactgtttttttagaaagaaacaacttgaattattttaactcaaatacttaatatataaaagaagagggcataatatattaaattgatgattattaagctattgacatatatatatagggggaacatgctgcccaatacttgaatctttttgaaacttgaagttgctttgtgtgataggtgattagtaatactataatttatttgtattattgttgttgttttctaatttattatcatggtttactaatgtccgttggatttgacatcacctttcatattaccaaaattagattatttatgctccttggaagtgctatttttcagtccttttgaattttttgctccacaatggaaaagaaacaattttaaatacaagaaaaacacatgtgagcttctccgtttcttcttctgttttatttctcttttccgattagagggttttattcagtcaaattaccaattatgttaaaggcgtatttcctgaagtgttacttaatgataagagttgatttactagaataatattatttaaattggggaaaactgaattgtgattggcgataggagaaagggatatattatgatatcatagtttaacatttatattaattttgtcaacaaagtttactggtctttttctccaattttacagagataaaagtcgaattcgagcacatcaattaccaacacgcgggactgatcaaatcactcatgcgcacatcttcctcagtattgcaataacattttggtttttttttttttttgggcaaaaagaagtgagcatttttttcattcctttggtttgggatcattcatgcacgttcatttgtagccgccatttatcaatatatcgttcatcataattattcatgctctttatactaaacatttataattaatatatcgctcattttaatatcatcatatataagtcaaactcgtttatcatttgtttgaaaacgaaaaatagaaaacaaaaagaaaaattctttctaatgcccttttcatgatgccccttttcaactctacctttttgttttatccatttttatttctaccctctttaattttttaatgaccattttacccttatttggaaattgttttaggttaacaaaatgaaatattaatatttttcgcctcaaatattccaaaacaaaatttcccgccaaaattttcccgccaaaaactttcgaaaaaatatttcctgcccaatttttgttttcaaaaatatttttcccgccaattttttttttagcgggaaatagatttacaaggaattttaaaagagctttaaaagatttacaagggatttaaaaggggttttataagatttacaagggattttaaaagcgtgatttacaagggattttaaaagcgtgatttacaagggattttaaaaggtttttaaaagatttacaagggattttaaaagggttttaaaagatttacaagagattttaaagggatttaaaagatttacaaaggtcttttaaagatttttaaaggatttaaaattgttttaaaaggattttaaaatatttacaagggattttaaaatagttttacaatatttacaagggattgtaaatttttaaacccttttaaaattccttgtaaatcttttaaaagtcttttaaaatctcttgtaaatcttttaaaatctttttaaaatctcttgtaaatcttttaaaacccttttaaaatcttttgtaaatctatttgccgccaacaaatatttataaggatttttaaaatcatttttttggctgaagaaaaatttgttacgaaaaaaaaatttggcgaaaatttttttttttggcggattttttttttttgcgggaaaaaagtttggcggaaaattttttttggcgggaaaaaaaaatttgacgccaaaaaaatgacgggaaaagttcaattttcaattacatgtttctattagatgagggtaatttggtcattttgttccagaaaaagagtatttttaaaaatggacgacataaaagggtattgttacaaaagggtagtgaaaaaagggtagttttgcaaatcttctaaacaaaaaatggttttctaatctacctatggagtatggacgatcaaactgttttcaaagtctaaatatatatattatatattgatgaaaacataaatcaactagggtttgtgagcaaacttttttctccacaagaaatttgatgtcgatttgtatattcagtgggtcatttgactttaggtaaatgtaataatttccctaaacttttcgtacactaataacatgatcactgatcagagagaggatcttgatcctctatggttgggagaattaaataatactatatattttcatgataaagagcatcaaaaatcgaatttttagtccactaatcaaaattcttgtaaaattgacatcatataaagaatcttatatccgggtcaagtatttgaaattaaattattaaattcactcacacaaaataggtaaagacaattgttaagtcgttttcaatacagaaaaataaataaccaaaaacaatacagtgtaatttattaaaatttacattcttctaaaattgataaatctgttttattgttattgttttgatgcaatatataatacaattagtgaccaactagaatgatattttctttcaaagaaaataaaaaatatcttcgtcttaagagtctttcaccagaaaaaggaagaggaagttgtgtagtgcaagagaggttgttgcaccacaaagctgctcacagaagcttcctctttctcatggagcccatccaatttctgccaccattatattaatacatcagtgatggatatttattaataataacacatttgacaaactataatatactagtccttttcattgcaattaaatttatttattgaaaatactttttctttaaccgtgaagtgaaagctctacgtgaatttttttcatattgaatttcgaagttttagtatcgtatgaaattttttatcgtctagaaatgatcaaatttgaacccgagatatgatacgacgatacaagttcatcgttttcttttgtgttagtttgattaaaaatattggagaagaaacctagctgttgaatatgacttacccaaagctcggagtcgtcatcttcaatgttggggatttctacaacttcgtcattgcgtgcaaatctaccacgtattcgaggtctactgtccgccaatgttttccggcatgcatacttcatttccatccaaaaaaaaaagtttacaataaagccttcaaaaactgaaaatgcactaaaaaaaaaaaatttgattatgtagtacaaaatagttaccttaatagttttggtaaagtttctctggtttcgtttagctctgtactttgatattttctctttacgttcttctgcactgtaacgtcccaccttgaagttctgttcctctgaaaacggcatcgttgagttttcagacgatctctgcatttccatattattctgaaaaccaaattaaaactcaaaacttttagtaaaaaattacataaaagaaaaaacagagcaaagcataaaacagagacctgcaaatctccggtgctgtagacacgtcgcatctgactggaaaagaaagcattttccggggagctcaagttattgtaactaaggtttgaagaatccatcatcggaatgttgaacggaacctgagtttgtttcccctcgaccgaattgctgctaaagcttctctgcatatatctccctgaattctctatggtactgtagcttcgtgccattgttgccgcctgattatgaccgtcgaagaacttctctgttttgacggcgtcggagatttggaaatctgagaaatttggatataatccggtgggaatatgctgagagagacttagggttccgagaagatcacttggaggtgatgaagagagaatgtgttgaggggtaaaatggtcaaaaatgttgagtgattcttcaacagagtaaagttcattgttgcagaacaaatctgtagttgttgttgtgtctgaagaaaacatatctggactcgaatttctgaacactgaggaagaagatgaagacgaaccatcaaagatatagaaatctgtagaagaatccattttttcttttaagtgatgagtaaaaaaaaaatcagtttatgttctgtctctgtagtaacactctcgtgatgtgaatttctgttttaccaaaaatggcaaaaagtaaaaaagatttccacaaaagttttttctttggtttgtgagtttctctgtttcagaaccaagacatgacaggtgaagtttcttttgtctggtgggcaatgtgtatttataacggcggaaatatttgagttttataaatatgtccttatacattattgattttatggatttctttataatgttttgtattcttacatttttaacccaaaatgcttacgtccaaatagtttaatttagaatctacttggtctctctgtctttttgatgtatgatgtgagcaaaagctcctttttggttgttatattactattcaaatcttacgttttagaatccaattccaccattggcattgttgttgaaaatgtacttttagagtatataaatattcgagagaatttcattttgcaatcaacattttgtttatttgcagctactaattttttaaaaatatcctacacatggacccttcgccttattaagagtctttcgcgagaaagaagaagaagaagttgtgtgtattgcgcgaatgagactgttgcacaacaaagatgctcataaaagcatcctcttcctcattagtttggtcacaaaggtcaatattctctccattgtcgaatatgagaatttcgcggtaatatgaatcatttactactacctgtgaatggtacattggcaatatatatacaagttgaaatgtgtttaagcctgacccttcaaagcttcaaaacctatgagataaccagactgcctacaatggtaaagaatctttgtttatttttgcattaggaatttcaaattcgaagctgcattacagaatttggtccaactaggaatacacacgtgttctagtctggattcgtaacaccactattcctttatatgatgtttggggcacaccatcctacacagttaaaagtgacctttaaactgaacctaccaatcatacaatgtattataagttcaatcatttgcaatataccatcgacttaaaaaaaagtaccaaattctgttgccatcaggcgttcaaactctctactgggtctttctatatatatcggatacaaacataaccctttgcgttttgatagctctcgcagcatccacaccataggccaagaaaaaaaaattgtgatcgataaagtgcatgcaagcagaacctaacaatcatacagtctaaatagcctagcttcatgagactagctgcaaaatgaaatgtatgagctagcatgagtactgaatgctatatagtgcacgcaccctagctaaaatgatgattataaaaagtcagacaactccttaattaaacataacggcaacacactctcaactatgagcgctcgcatatgactctagtgcaatggttcttgtattcgatctgcatcacatactaaacaaactagtattttataattaaaaaaaaataactactatttgatagttctacatagttttttcttcagtattcttttgaaaggtagtattaaatggaatttcaaaggcgttagtccatcgacattttgaaattttaaaaagggttaaattgtcaaataaatatttattagattattctgaaatttcggcatctccgatgggtcaaagagttttcattggttgaatgaaaactctagaagagcgaaattcaagtccagacattaaattttaaaaaaacaaaaacaaaaaaggaaagaaagagaaagcgagtaaaaataagtttgtaaagttcgtttgttaccaaatcaagcaaagaaagaaaaaaaatgaatgtttagcgcgtgtaacgcttacttgattttgttaccatttttgaatttttttggggaataattttcatagtttgtttcttctttgttctgtgggggtatttagcgaatttctggtgacgagaattgtgtggtttgatcgtggtaaattatcaaagttatggcgcgttcgcaggataagcttgataagatgcaactccggcaaagttaccggaatttatggcactccgatctcatgggcaccgtctcggcggatactccatgtaattatccctcgctatataaatattcgaaatttgctatttatttggttatagaattgatcaaataattaattctcatttgtttttcttataaatttggtttctgcagattgtttcttctcgtgtttgtggtaagttgttcttattcctcactatcgatttcattaaaacttttgatatgtggctttcttgattctagcccaagaaatagagttttagagaatcttatcaatatcttgtgttattagtggatcactgattttaaatttttgttgaaatattttgttcgtcttttaatgatttctatataatatagttcaaatccggtgctattcaatatcacgtttaacacgtttttgttattcaatggttactccttgtagtagattagaacctttgtcactggatgtttttggttcacatctaaatctgcctttgattctgattgtagtggaccttgcgtttcatacttacttcggaagagagcactttataatgacatgtcaaggtattgaagcctaccatatgtagaattgaacaatgagatttgtttcttctgtttctcataaacaatgttattgtgttttgttttgtgaaggtacacttgttgtggtggttacatgccttgtagtggtaagtgtggagaaagcaaatgccctcaattttgtcttgccaccgaggtacaaaataaagcctttgatgttcatgtcgataaacaaaatgagataacttgtgatagaatctttctcctaaaaatctttatttgattttgttaagatttcactttttttttatgatcttgtggttttgacatttctttaggtgtgtctctgtttcgggaactctgtggcatctactcgttttatgttgcaagatgaattcaacatccatacaacaaaatgcgacaattgcataattgtactccctactttccctctttgttatcacttattcactttcgtcttatacatgtttgtgtgcgtcaacattttcccatcttctttcgttgttttgtagggatttatgttctgcctcaaccaaatcgcttgcattttctctcttgtcgcttgcattgttggaagtgatgaactctctgaagcgtctcagcttctttcttgcttggcggatatggtctattgcacgtatgtattatccctttctcaatttccatgtcgctgacatgctttcactacatcaaatttagccaaatggctcataccaaatgtttattattgctgattctgtattttcctcttgattttcagggtttgtgcgtgtatgcagacacaacacaagattgagatggacaaaagagatggtttgattagtcctcaaccaatgtcagtgccaccagctcagcaaatgtctcgcattgatcaaccggtccctccctatgccggttaccctccagccactggttatccccagcattactatccacagcctggccatggttaccctcctgctccaggctatccacctcccggtcacggttaccctcctgcaccgggctatccgccagctccgggctatccatcgggatatccaccagcaccaggatatccttcaaagtaataagaacgttaaccaaaatctcaatcttcgaatcaaagttgtaatatcatccttggtatgttctaattactttgcaagtatattatccggtttgttgtctcatctattttctgttttttctcttagatatgaaccattaactctagaataccatataatgtatattagttgtgaccttggtgtatgatatctatctatgtttaaatttatacgttccagttatgattctctatttccaaagatttgttggtctaccaaaccggttaaggtattaccgattgtcaacttgtgcaaacaatggtacgttccaccgtggatccattggaggatgagctcttgattaatcaaaaataaataatgacaatttgtgacactaaaaatatagttagtgctaagtattcgagcatctttttttcttggctttagcctttctagtcaaagagggtcagatccccaccatatattagttaatttttccggatatattaaaacttgaaacagagatttcctatttttgtttgaaatacatcttttttgccaatattaattgcctcaaattattgcaaattaatctttaaagttaaacaatatttttattaaactttatgtaaatagtaacatatctacgaaacaatactcttttctactatttcttcaaaacactaaaaaagtattgtttggtagatatgttaaaaattactatataaaataaattcatttattatcatacccgactttctaaaagtttcaaaaattggtatgagttccgatataagattctttcgtatatctacgtaaatttttattatatttataaaatggtattttcaattggtattctctaaaaaagtaaaacgacaaagtaatagttagtgttattctaagaagaagaagaaaaaaagaaagtcattaacctacttggtgttacaagtaagtaactttttttttggttcgcatatatactccatcatttggttacaccttttttctccttctttcagtttttataagtctagtattctagtctataactctacaatattatcatttataaatagacgcaattatcagtttttttggaaaaaggtctttgttactttgatggtgtaatagtaaccgaaagcttaaaatgattagaagcgtgtggggcttttcctaattggggggtttgaaaaataggcacaagcgcagacaatcctacggacgccacgtggcaacagctgagcatattccacttaaggagaagtcttctttgcttaacgtttggacctctcactgtggactctcccagttcttatttctttttcctccaacaattctaattcgctaagactatgtggtcttgaaaattaaaaataatatgatgatcttcaaaatcatatctaatcatacctaatttgcatcatgataagatcatgaaactataccatcaatttttttattcaaaaacttctcgaagctaaaaaaaagaagagtaaaccatataactaatcttaaaaagaaatgatagagaacgaataagatggctagattatggactaagctgagaatcaattgaatgatccaatatgttgttgtttgtgaaatgagaacagaggaaaaagagaagtatgagaggcgaaagaattatgctttcgaggacgggaacaaaaaaaaaaaccaacacaatcagagatgttctagtcaagtgttcgtcgaatgttacgtggcagcatgaatgtcccgtgtgtatgcataaaatgatgtataaattaggtatgtgcacgtattctatgtgacagaaattgtatccaatatttaataatcatctacgagtaacttaaatggtcaaatgcaaagacctcaacgtaaagaaaatactcaactgaaatagttaatttttaccaatttgttagaccggcctttccacatactgtggctcagtgaattgatctttatcgcaaaaaactgcaagaaccattttaggataagtaaaggggtaagtaaaatattaatatcaggtcgacaaggttccatgaaaggttagaccaaaaagtatgactaattgactatcttgtcaggatagccaagtaaaaaataattatttcactccctccaaagctggagtaaaaagagtctataaatagtaaaattaagatttccattcatttcttttttttcctcaacggataatacaaatttcattcttctaatttactaagcatcaccacctataattttatatttacatatatcaaccactcagctaaagattaaacaaaaaaaaaaaaaaaagatagaaattaattttctcattagtagaaactaattccacccaaacaagaaagattctaatttgattctgcgagaagttcagattcagaccaaactcgttggttaaaagcaacttgtaactcatcagaaataaacggcgttctacaaagtggacacgtcatctgattataacccatcatccaacggtctaaacagctccggtgaaatatgtgttgacaattcgtcagccgtcggatctcgtcatcgttctcgaactcgtggaggcacaccgcgcagcaatcggatccggatccgaatccgggtcgagttagctccgagaatctgatgacgggcaagatttctccagctagcctcgccgccactgggaagaaaaatgagctttcttggtgatgatgcgccgccgtggacatatacggtggttccagccatgacgatgacgatgaaaccgggtcggattcgagaaagtcgggtagacccaatatccgaaaacccgtgtctatgagtgttcgtattaagcctaagagagagagtaagtgaaggaagattcttgggaggaggagctcagtgtaccccaccggataacccatggcttcgccgctagaaagagaaagctaaagagatagagagagagcgcgtaaggagttgggaacgagagaaaaaggcagagatgagtaggatatatatactcagtgatatatgaatatgtacatacttacataattaattagtaaatattattatgctttttaataatataaatacaaataatgcaaaacccgtgtgtatcacttggttacttgactttcgttaaccttcacaccaaacttactctgcagtaagtttaatctaactattgaagtaatttttgttaatataacaaaatatatgttttgaaactttggacttttaaaaaatgttttaaaatttagtattattgaactagtgatttgaaaaagtattctaaaatctattgttattggaaatatttttaaaaattatttttttagcgatttcagaatattaagagaattttcttagtaagaaacacaaaaatataaatcttatggttttaaatgggattgagggggagggattttataacaatcataataactttcctaaattcacttaaaattatataatatatatatatatattatatcaataaaactcaaatcatttaaaatatagaattgaatacatctcttatatatgtctatagataagctttgtgttcgtagtgttagattcatatgatattttttatgtagattatacatcaattgttagagttggacacaccaattaaagaattaatctttcttatctttcttttaagaagaatatatctttgtgtatatgccaaactaattaaactcgtaataaaattaaactaatgctgtcaaaaaaaaaaaaaaaaactaacaaaaacatttggaggaaaaagcaaagataataataaaaggtataaaattcaagaaaatgtacagaagaaaacatgaaggtggggacaaactgatttaaatggtttattgacaaaagaaaaagagagatttaaatggttttagatggttccacgaatcaaagttacagtagcataaattttggaaaattataagaaaacataacaaaaaaaaagatggagccgacaacggttttgtttttaggcttcattttaagtgcaatttcaacatcatatttgtatttgtccctcatatttttataattataataccaacttatatttacattttctggatttacacatgtctaaataaattagcgactatacaagactttagattatgaatctgtggtattcaaattttctttaatatagaacattaatgttattacacattattgatgtatatgtgtgtagccgcacacgacaaataaatgtgacgtgaagacagattgtttggttcacttcaattcagtttctatacgtctattgatttgactacattttatttcaattaaagaaactaaaattgattttgaaacgataatacaagaacaacagtattattaaagagtaaagaatggttagaatttattattagagggaaaaagagtggacttttttttactcaaggtgtgtgccaaaaaaaaaagacagaggaaattttaataaaaattctttttgaaaatttggaaaataaataataatttaaagggctaaatataaatttacgaaagatataatcaacatattctaatatatcaacgataatcacttctctatttacataaaagttataagagactcactttttttatagaacaataattatattgcttcttattcactaattcattattaatattattctggacctacatgatcggtcctaacccatcagtctcactaacgaaggtatgagttaaattcctaaggtgagaattagcagtcataagaatttgttattaggctatgagcctttctctattaattcattacttaaggaaagaaaaagaaaaaaaaaacttgattttattttaatatagtgaaacaataataataaagagctactagagagagaaagggagtggtagtcaagtcatatggggacctgaataaaatgtctgaaagtgccaaagcagcatagacccacactctctccatcttctcctcctccaacatttcacattcccacatttacactttcttgtatctatgcacatttacttagcatatcatttaagtatgtaattgatactgtacatatatataccctacatatataaatatatgcttaatagcgaatgatgtaaccggtaagctcctagagtaattaaagagggaatatcggtaagaaatttttagaaagaaaaagtatcagttaattttatccctagctctttaagtcgttaacccctagaacatgtgaaaaaaatatatacttttagcgaagtttttggtaaaaaagctgcggtatgtttttcataattggtcaaattaatgaccacaaatctatttataatcaacacaattgccatctatttgacatttctagatattcttgttgttttctcttcctcttacatgatttttcgaactattttgacatttatttgttaaacagttctcttggtttagaagattaattagcagtacataaatatatgatccattgatcgtattaaattagtaataagtaacccaaatattgttgcttgatcaacaagtgcgaagacagctattactacaatagctgaaccagggaatctatatgtctctccttctagtaggcaaactaacgtggccttacttttttcccatgtttataatattactttaaaatatatatatatatatatatatatatatatatatatatagtttttttgtcaacaaatatatacttccatgatctctttattttggcttttcatatcaccaataagttacagaaatatatgatacaaaataagtgaaattttgaggtccatttgtaggttttcactaattttatttgtttattttgtttatataggtaataatatgcttatttgtttagtaaactaatttaataactagctaagtaagtaaagtatatgatatagggatgtctaatttataaaaaagaattaaatggaataaaaactgaaactatttaatttatatccgttacgtacatttaaatacatacaaaaataagatcataatttttttgtatggttcttaaacaagattgaacaacttaattaatctttataatatttgagagtctgagactatgatattccgtcttaaatatggagaaatttgatattgaggtacatataaaaaccgtaagactttatctagacttagattaggtgagaatattataaatacaaattcgcatcaccgttaagaaaggtggaataatttgcattcagtggtggagctaaggcctaagaagacaagtatcctcgtcgactcacaggaatccagttcacaacttcacatccaattctctctttgacactattgtaccaacataagcggggaggctaaaggatgaggttgcacccttgacactttcagcgggcagcctacttcattacgagtttacgacttgatgtcaaaccaagtaagactgaccaagcatttcaatggccaacaactactatgcacacctctccatcaaaggagatgttccatctatacaaaacatgtcaacccactactatagtccagtcttatcgtcggcgccagtacaatattatcgaatgaaattaaaaaatttgttaccattttcgaatgttataaacttataaaaaaacgaatatgagaaattcaatggtttcgacaaagaaaaatgttagttatcaaaactaaaagaaaaaaaattgggtttaaatctcatcattttcataacattttaagtattaaaaacccagaaaaaaaaacaaaaaaactttgagtgccttacaaagtttttggaacctaatcctgcttatatggcttatgctctgggccgacctgatcgtcgcatgaagaagcacgtagaataaacaagaaagtgaacgaggaaaatatgtgttttaaaaagcaagtacttgggtttagtgcgatttcgtttcttgggttgcagtgttttccaatcctaaaatgaaaataggcctaggcaaactctattgggcttgcactataaaaaatacttgggtttgtctttgtctctctggtttagaaccaaaacgtcaaaatcttagcttgatttgtttttgttttttacctttcttggtttgctgattcaaaaagtggattacattggcctaaaatcttaaatgtctttttacatgctaaatgtggtgtataagatagtactagcatgttaaacccaacctcatgccttcttaactctttgttatgtgacgcacttgaaccaatagatttagacgaaccatgtactgtagtacagtcacacaatatatggccgaaaaatagcttttgtaatgattgattcaaatgttatttgtcggtactacaattgggagttatttatattaattgggccactaagatcaaggccctgccctaaagttcaataagattgggtttcagacaccaaaaatatatatatgaatattttaaggccaataacccaatattgtaaagagttacatttttgtaaatgaaatggtaaatctgttgccctaattttccttaagttaaaatctttgttttgggtaggattcgtacttttggtttagaatttagaattgtttaagtttagatagcaatgttacgaaaagcaacaagaaaagaagtatattaattcaataaactattaaagaaggagctaccacgagatttgttttccatgcaaaataattattcttttgataacagattacgggatacctagtaatcaattacgtgatcgtagaatagtttatgttggaaaagtctttgacgctgacaaaaactcttaaaatatgtacaagcaataataactttgcaaataactaaattagccacataaaaaattaaaacaaattaagccatattatataatatattaatatgattgctgtcatgcatacgtgcaaaaagatacatatagtgaaaatactaaacatattcacttgagaaaacacctactgaagtagtttatttatacaatgctatacgacacgtcgtcttacaatgatccgttgatacgtgttaatttaaatcagactaattagaaaattttccttgttattcctccgaattaattaatattcacactatcttcaagaattcaaacacaacctcttgcaagttatgttatgcatgttaattattaattgtcactaagtacttttttcatatctaatttttttctatatttatctcataatttgttgttttacttgcctgttcgttcaaatatttgaaccgttatctagaaaaaagaactcaataatgacaatgcatgcgtatttcgataaagttcaccttatgatttgtttcttatctttttggtgaaatataattgcttgacctcgaacatgaattcaacttcaattcttcgattttgttttcaacaattggttaagcactcaaactatacattattaacttaattaactcagttccctatttattagatagttatgggaaaatagttttcgaagtattcacattgagggaccaaaaacaactggtccccgaagcaataattaggaaacaactttggttaaggggcaaacatatatacctctctctctctctctctcttcgattcatcaatcatatatgaaaagaaattgatataaaaataatatatatgcgtggatatgtaaagttggaccacactatgaacatgtctgcaagaatgtataaagaggggagagtgagatcatgagtctgagaagcagtttctagtttcaagtttcaagaacccttaaaaaccctaaagctcaaaactgtgtactgtctccgacatttatcagatctatcagatttttcccttttttccacacttatgatctcattgtttttttctccttgtattcttttaacggttatgattgatttgttttattttatgtgccaccttagattatcatggatgctccttttacatgttagaaacattttgaatatatgttgatgacaataaatatttttctctaatctgtttgctcttataaatgctttaatacatagtgaagcaatagcgctagatcatacctctaaagtttatatcgtagatttacaaatactaagacattttcttttcacttttccgcttaagtgatttatgtgatacaatttcatcatcaataactctaagagtagcaataacattaagttcacttattttgcaaaatctagggataacagtttatatatttatctcaaagataaaatgttttatctttcttatttaacaaatatcatacggatatatatatacatttatcatacggtgttaatataaatctgataacacaaaagatactttattttttaaatcacatatgaaaaactataccacttatttacttagaattttatcgcgacgtagaaaaatattaggtctgctaacctgcgcacctgctgcgatcattctcttaaataaaaaaggttgtcgacaaaaataaaataaaaaaggtctgaagtgatgacgtcaatcatcagtggagggtattttcgggatatcaaaagattgaaaaaaggattctttgtggaatttggtatgaaacggcggaaagagcttccgtttcggttggaccacttccccttttaaatgtatgtaatcgccaagatgttttcacccactcacaacatgtcgcgtgtttgttacgtgactaaaccaattaattgggtttagttctggtgtttatacatattgcgcatggctgattttatcaattaatggagtaccaaattgtggatgcttcattttgaactaaaattaccaaatttttatagtgaaatatatgtcaataagttttgagaaatcattgttattttttttgtcataaatctgaatagttattttcttttggttttgtaatgaatttataacatattagtattacttaaaattgtcctattaattatctgagaaggtcagtattagaatatagatgctttattcaattgagttgtttttcttagacattggcgcgtggaagaggatatataaagttcatataaatgtgaatatgtaagaattggagaagaaaataaaatggtcccaaagagagacgaaaataaatgcatttttttgggtggaatgaatataaagaaagaaagacattagaaagaaaaaagaagcaaaaaaaatggaggaccacttaatcacctctcatgcacagtcccttagtttgggaacaattcttgacaacaattataaatactccaattctgaaaactaatagtttgttattaacgtataatctcaaagttttggatattcttatcctgtacttccttgatagtttcagttaacagtttgtaattaacacatgtatttaatttggaaacaaaaaaatgaatgtatagatgattttttttttgaattgttggtaaatatatgaacttgacgtatatagcaatagtatactatatttaagcaactgaatgtgaatattctataacacaagtaatatcaattttttgtgatattgttggttataagttatattcgaatttgtcatttataagaaaactcactggtttatccatccaatgaaaagaagaaagctttttgggtgactctaataaatattagcggttaaataactacaaacacagtgttgtttttgtctcttctatgtatctttttatgtcctcttttacaacttggctttgatgttaactaatcaaagattatcctacttaaaaactatttaattaaataatttttaatttctttaaaattaattaatttcttgatatgtttttgtaacgccaattaattatacgtttttcataatgtggtgtttgacttatggtttgaatgttaagatgtcgtatatatctaaattctaaagaaagaaatttgcaaattttgtaataaacactatttttacaacaattaataatacatgtgccaagcagaagaacgactatattagttttctatgtcaacatttaagaaacatttatttaaaatttgaatatttgattttgtatgtcagcaatgtttaagaaaactttgattttttgttttccttcttttgcgtacatattaaatggaatttaatagaaaaccattaaatcttgatataattaacttcttcgcccttgcagttactaacaaggagacttttgttttggtactttctcgattagtttagtgaccgaccaacaacgtattttaaaactcaaaacacaatctctttcacgtactgtgcgaagtgcaagtcgaataatgacatcagtccatttgtgttgtattacacgggactacgatctctattctactatatataattactattaattaaaatgtttatatagttatgatatggttgatagtaatttaatagtaattgttaaacagtagagaagtgacactgagacatatctgagaaaagcctgaactcaactcctacttctggtttgatttcttgggattcgttctctttcatttacttacctctccatctatacaccaacatatatatatatatattggtatgttaattctccaaaaaaaaaaaaaactattttaggagcaaaactttttcacagttattcattttttaagttaacttaacttctcttctttgtttgaaaattcatttatcatcaaataattctgttataaattagacctgataataattctttaacaaagaaaatatattttaggagcaaaataggcagagccgcagaggcatacatgtattatatataacgattatttatgtatagaaagggacaccttttgtacaaaatactagttaaatttgtacattcacgtgactggttggctaaatttagaatattattattttcaattaaaaatcatcgtcaatgttcaaatattgcttgagatacgctatgcttcataaaaatgtttaaaaagtagttccaaaaaatattttcaccaaaaaaaaaagtagttccaaaaatattcatttaataacaaaatttgcctacataagcttagcaaacgacactaacaccaaaattgatatcattttcttagataacatattgtatacatatctacatacatactaaatacatatacacgtagattacacgtatggattcagcaataaaaatcaaaatactaaatacatatatacatatatatatatatatatgaacatttaaatactaaattatgtttaataaataattaaatcaacgtagagatatgtcatatgaagatggcttgtataattagtttgtgtaccgggcaaaggatctctaatttttgttttctttagttcagtttaattatttgttatctatccaatcaattttttttctaaactgtttggaccaatgtacgtacgtaccatcctttttgattttttttgtaaactaaattttcgaattagcaggttcttaataattgaacgaagaaaataaagaatagaggtagacacctgtagtattttcttggtcagaccaataatttataattcaacgtcaaagaagaagaaaaatataaaccattatttcattatgacttacgtataccaaaatacacaaattaaatgtataattgtgaggcattttatatgcgggaaaaaataaaataaaaagaatattaatatttcttttgaaaattgtaaagcattttgacccacttgtgatatatatatatatatagatatatatagagagagagattaaaacattgatggctagctatagagtctatggcagggtcatgatcacctgtcttctgatctctgaagagataccaatctgattttttctcttcctaggtttaattttattttaccattttataattctttatttttgcctgtagtacaatttacagacccatactaaaagaaaaattaaattttgtcaaagtacaaaacaaagagagaggtgaagccacacaatctcttttcttctctctctctctgttatatctcttctgtttaattcttttattcttcttcgtctatcttctcctataatctcttctctctccctcttcacctaaagaataagaagaaaaataattcacatctttatgcaaactactttcttgtagggttttaggagctatctctattgtcttggttctgatacaaagttttgtaattttcatggtatgagaagatttgcctttctattttgtttattggttctttttaactttttcttggagatgggttcttgtagatcttaatgaaacttctgtttttgtcccaaaaagagttttcttttttcttctcttctttttgggttttcaattcttgagagacatggcaagagatcagttctatggtcacaataaccatcatcatcaagagcaacaacatcaaatgattaatcagatccaagggtttgatgagacaaaccaaaacccaaccgatcatcatcattacaatcatcagatctttggctcaaactccaacatgggtatgatgatagacttctctaagcaacaacagattaggatgacaagtggttcggatcatcatcatcatcatcatcagacaagtggtggtactgatcagaatcagcttctggaagattcttcatctgccatgagactatgcaatgttaataatgatttcccaagtgaagtaaatgatgagagaccaccacaaagaccaagccaaggtctttccctttctctctcctcttcaaatcctacaagcatcagtctccaatctttcgaactcagaccccaacaacaacaacaacaagggtattccggtaataaatcaacacaacatcagaatctccaacacacgcagatgatgatgatgatgatgaatagtcaccaccaaaacaacaacaataacaatcatcagcatcataatcatcatcagtttcagattgggagttccaagtatttgagtccagctcaagagctactgagtgagttttgcagtcttggagtaaaggaaagcgatgaagaagtgatgatgatgaagcataagaagaagcaaaagggtaaacaacaagaagagtgggacacaagtcaccacagcaacaatgatcaacatgaccaatctgcgactacttcttcaaagaaacatgttccaccacttcactctcttgagttcatggaacttcagaaaagaaaagccaagttgctctccatgctcgaagaggtatatatattttcaagaaattatttcattactactatcaaaacttacatgagtttcttagaaaatctaatccttttttatttggtttcaacttattcctaaaaatgtaaaatacccacaagtcttttacaaatctttttttttttcctttcatttggtttcaacttattcctaaatatgtaagatacccataaatcttgtattttttcgattcttgattaggtccatatatttcttaaagttacaaatttcttttagatattaagataaaaagattcttttttgtcttcattctttcatgtattctcgtcgaaaacaagttcgatcgtatcaactacgaaaagatcaacccttttaattcctttactcattatttctttttttctatagaaccaaaatataattttgttttctttgctttgagctaatttggagactctagtggtcctccatatttatagcaatcagtttcatcatcataagccataacgagttgtttctttttcgtgtatttactcattctaagaatctacatttacacgattgtgattgaaatctttgtgaatggtgtggggtaacgtttttttgcggttttttggcagcttaaaagaagatatggacattaccgagagcaaatgagagttgcggcggcagcctttgaagcggcggttggactaggaggggcagagatatacactgcgttagcgtcaagggcaatgtcaagacactttcggtgtttaaaagacggacttgtgggacagattcaagcaacaagtcaagctttgggagagagagaagaggataatcgtgcggtttctattgcagcacgtggagaaactccacggttgagattgctcgatcaagctttgcggcaacagaaatcgtatcgccaaatgactcttgttgacgctcatccttggcgtccacaacgcggcttgcctgaacgcgcagtcacaacgttgagagcttggctctttgaacactttcttcacccgtaagttatttcatatacatcctcttaatatatttacacatacctaaaagttactaattgtgtctttctgaagtgatcaatgaaggtagaatcacaagttaattgggtatatttatggagctatataaaacctctttaacgattttatttcattgatagtacgttgataaatagtatgataggttttttttgtttgttacatgaatatttttgaacatataaaagtaaaaaaatatgtacattttatatagagagattgagattgacttgacaagcataggatacaatctaccttaatctgttaattgcatatagcttttttattttcctttttctttcatttgcactattggtgtgaaagtgagtgtacaaacatatacatatacacatgtatatatatgtatacgaacatataaaattaaataaaataaatttaactggtggatgaaagacagaaatagagaaaggtacaaagtggattgagagagagaatcaatgttctttacctaacactaacaaaagagagaaactatacataactccttgcttttttctccatgtttttattttgttctttttcttctactttttatttatttaatttacagaagttatatgtttatcatcatatgtaacacttgtctccatcaattcccaaacactgctcaaacaatgaaacatcttgttagttttcaccaaaccctttacctttgcttccattttatttgcatcattcttcaatcatttatatccttttttttaattacatatccatttgtcttatatttttccattaaagtaaaattttcttatttttgttttcagatatccgagcgatgttgataagcatatattggcccgacaaactggtttatcaagaagtcaggtaaagaataactccactaattcttgatatattccaaaatttattatcctatttactaaagttataataaaccaaaattgttaggtatcaaattggtttattaatgcaagagttaggctatggaaaccaatgattgaagaaatgtactgtgaagaaacaagaagtgaacaaatggagattacaaacccgatgatgatcgatactaaaccggacccggaccagttgatccgtgtcgaaccggaatctttatcctcaatagtgacaaaccctacatccaaatccggtcacaactcaacccatggaacgatgtcgttagggtcaacgtttgacttttccttgtacggtaaccaagctgtgacatacgctggtgaaggagggccacgtggtgacgtttccttgacgcttgggttacaacgtaacgatggtaacggtggtgtgagtttagcgttgtctccagtgacggctcaaggtggccaacttttctacggtagagaccacattgaagaaggaccggttcaatattcagcgtcgatgttagatgatgatcaagttcagaatttgccttataggaatttgatgggagctcaattacttcatgatattgtttgagattaaaagattaggaccaaagttatcgatacatattttccaaaaccgattcggttatgtaacggtttagttagataaaaaccaaattagatatttatatataccgttgtctgattggattggaggattggtggacaaggagatattattaatgtatgagttagttggttcgtcaatatcacttgtaggatattttcattttgttttttaaaatatattattgagaggtttttttctcaatctaatacttttttcttaatgtaaatcatatatatttttgtttaaggaaatattatcaagtgtcttttcaaatctgttttcatattctaggaccatctcaaactatttggaaacattcaatcccttaaaattttgtttttcttataaatttggtttcaaaatttcgaaaagtaaatggatatatagttttttttaaagtatgttgagtgtctgtacatgacaatcgtttacgtatatacttgatacaaattataaaattgaatgtgtgtaactgtgtataatatacacataaatagatatcacacaaacatggacgagtgaaatttgtgtagttggcatgcattatacggatttggaatcgaatagatacgacttcagtaacgaaaatcactagaccatcatatttatataaagacataattagagagagtgtatggtctttgtgttattaatgacaaaacctaataaaataaagttgacgacaaacataataaagaaagaacaaactgactattggaccatctcggtcgatcgataacgttcacgtgtacactcccgtatacatataaagttatgtacacatgaataatgaattcaagcaagtttcaagagtgactgaattaacaatttgacacaaaatacagatagacttgtatcctatagtcttattcaaacatctacagtctcttaaacacgagattaagtgttgataagaacaaaaattatcgataagagtaagacatacgtctctttccaaaatgcaatatatatacattgacattgtttaagaaacttttctgtctaatttaaactaaatctaagaaacatatttctaaatctaagactgtataatttgtatatatatttactcgtcgcggtcaataattcaaatatataaatgtcaaaatttcaaacattaatgaattatggttcatgtgtcacatttgggctccttcaagccaaaagaaacctttactaaatttctctttaggatatgtcgaaaaagtcttataatatggattctcaaagataatataccaaaatcgtgttattaaatatctatgcaaaggaattctagggaaattaaggaagtgatgtagactaattcctatgcggttattgttctaagccatgatctatcatgtgtggaggaaaaagaatgggagacgataccaccaaggccatcacccaatcctctcacacgaaccattgataaatcaatcagaaatagcatcagctcacaaagagactccgaccttagcggtggttctctacaagaggagtaccttactcttttcagcttcatttggtttgtttcaaccgcaactgcgttgttttttttttgggttttttgtttggtgtataatttttatttgtgttgatatataaattttaaattttaatttcaatctcccaaaacaaaattcgtgattgcaacacatcgaacggattaaataacataaccagtggtttgggatgattttaatttttctacaaatatacccatgttggaatgttgaattggtgatattaatccaattttccgattaatcgctagaactataccgagcggtcaattaacgtctagcggttcttttaacaacgggtaaaattcacgattccgattttaaaacaatgattccaacttgcgtatgagacgacctacaagaattttagattgagatcgagtcatgtactccacgaagctaacgagtaacgagtcaagagactgagaagtacttctctgtttaaaaactttaggttaagtcgtatatttttttttgtttaagtgaaaagtttaagattattaattagtagaaaatatttgaaaatgaagttggacctgaaagataaacaccaaattttcttatcctaatcccttcaaaaaattataaacaacaattaaaaccaaaagaagctaataacccaaacggatcaaagtccaaaaataccaacgtaatgcccgaagataatgctgcatcagatttaaaaccgtccacataaatccaatttattgattcaatagtttgctaaataaaataaaatttggaaactaaaacagttataaaataaatcgactcaatgggattaaaaaaaaaaaaaaccggtcaaaaacatcgacaatttgggcagcttcgattctgtttcagccaagaatcaatacaagaacgatggaaaacatgtctacacttctttatacggataatctcatggccatcttctaactcttcaagacaaattgaacaaccaatctcatcaaatccttctttttcaatatctttaaactccatttcctcgatcgatgccctataaccgattttaaattctagttgagaatgaagcggcattagatgtccggtttcattgtcttgctgaggctgaggctgaggctgaggcagaggcagaggcagaggcacaggcagaggaggaagtgagggatgagagttttgatgtgtctcaagagctagttccgtaggaggttgaatatacttgttgcaagagtcagagatgatatataaggtgaacaagactattaaaatggcccctgtaacgactattgaagacacatccagcgagggcatagattctatcatcctaatattacttttacaccagagagatcaaatttggagttgtagctgaagcaaactgattcgtatccatgatgagaatcattatcaactttcatttatatttatcttcctttttttttgggtacattttttaatatctagagatgaatctttattacgagataaacacatattttagatatgcatgttagtttactatatattatgtaaatattcgttttgtctatattgttgctttttaattgttaacataataacaattggctcttcgctgtcaaccaaaaaaaaaaatggctatgactctgagtgggggacggttttgattgtgtgcgagcaaaagtaatttttatgatttgtttttttccaatttcgaggggttataatactttcaaatgatagaaactagaggaagaaaataaacacatatgttgaataatagatcacatgacttgctaaaaacttttaacatgtgggtctgagacaatttagcgttaattttaatttgatcatactaaaaaaaaagaccttagttatagttttgtatatactttaattatataaaaattttgaaacaatttttgatgagtagatacaaaattcaactatagtcagtctctcctctatttgatatcaatcaacagaacaacgacaaataggacaatttcgattcgcatcaatccaagaaagcatacaaaagcgatgaaaaacatgcctacacttctttatgcacataagctcgtggccaatcttgaactcttctagacaaattgaacagcaaccctcatctccttcttcgacatcttcaacctttatgatcgtctcgaccgtggttttattgatcgctggaatatgtccagtttcaatgtcttgttgaggaggaggaggaggagggggaggaggaggagttctgcagcacaatagaacgatgaatacgattacccaaaagcctactatggtgtagtaaacgatatatccggtccctatgatcattatcactggcagcatcaaactcgattttgagatttaaaagctgttttgtatttataatgagagaatccctcagacattagcataagtatttatattccttcgtttgcgctaaaatcctaatcatatatatgagatatctaaaataataatttaaacgtaaacaaataacaaaataattaaaatatactttctccaaacacatatacaatcaaacgctttacgttctacattggaaactctataaattaataatgttgggaccataaaattttattaatttatagtgatattaatttatcctatagattaataaatattattttattggataaattaatatttatcaattcatagaaatatttaagcaaaatacaacactattttctttcgaaatagaataaatgtcaatagactactcgaatatctaggtgcaaatgaagcatactcaaaaattcagagtttttagaagaattgtgatttctgtctataatgttggtgaagaatttgaagacgataatgtgaaactttctgaaatagcgacacgtaaagaagcaattatcgcgtctagaactcttcacaacttttggatgcatatcgaaaagacaacaccaagactttttaatgcaataaaaaaaattagcaatgaacttcaaaaagattcaaactttaagaaaagacaatataactaaagtcatattatattagattatctttaaaagtatccttaagattagtaattattaatttatgatattattgggaccatattttgacatagagatttaaaaaaaattattatcttatcgattttggttaatttttacattgacccgacttgggaccgacatattttattaatttatcatgtttattaatttatcgaatattaatttacagagtttctattgtatatcttttggcaatattacgtgatcacaacacatagtttgccaaaacaattatgaaataattcgaaaattgatatagaggataaaaaaataaaccctactcaccctctttcctctttcttgcagtaagggagcatcgacaattcgggcaggttagattctgattgagccaaggatcaatacaaaaacgatgaaaaacatgtctacacatatttatacgaattatctcatggccatcttcaaactcttcaagacatattggacaaaaaatcttattggatccttcttttatatctttaaactctaaaattgtcgtttcatggatccatgtcatatatccgactgcaatgttttgttgaggctgaggcagcgttacatgtccagtctcaatgtcttgttgaagctgatcaggtggtggatgagaattttggtgtgtctcacgagctatttccgtaggaggttgctgactaagatctatgcaaagtttataaataaagattactgtaatggcaattggaaataccatatatataaataaaaacaatactgtcgaaaaaaaatccagattatctgacggtggagactccatcatcgttatattactttcttacgagagagatcaaatttggagcttcagttgaagcaattgcttcgatccatattttgagataatcattatcaaattttatttaaattcaattttttcttacctttttgtaaaaatctagagttaagtctttctttattacgagatatcatatacacatattgtagatatattagtttacttttgtaaatctagagttgatgtgaatattacttttgtctatattggtggtactttttcattaattaggtttagattttaaaccataagaaatctctggataatatatagaaacaggatcatgatttgatggtcagaaattacaataatcaaaactaggagtagacagggacacaaatgggcctcatacggccataaaggagcctcaaacaatgaaatgggcttagacgtcactgtatccctttgatggatttttgttttctggatttagtaatttgggagcccgagctagagtactaaacattaaacttgacaacaaaatcacattatggtaattgtttatttatttaataaattttccatcatttaaataggtggtaatttgactaatctgctgtataattgaatcagaacaaaatttaccatgaatattattacacgacttcaaccacttcaccttctttgcaaactgcaacactaatctccaaagtattgttcttctttgatttcaccctacaacaatttcttctaggagactgcagcgcccaaaaacaaaatttgaaatcatatttcaacaattattatttcaagcattaaaaataaaatgactatataacatgttgacttaccctgtcccaaagatgagggtccggtttcttgtaaacaatgactgtcttaatgtcgctgggattagccatcttccaccgacactcgggatgagccacgcggtggatttcataacggctcactgtcatatttgtcacccgatgaactctggttgatgtcatatagaacacaaacggtttctggcacggatgacgactcacgggtcgggtgttgaaagcgtatgccgtgtaatccgcccgtcgatacctaacggaaaaaaaatacaatgtaaaacaaaatgaccatatatttatacattttggggtttacttatgtactttactaatgttttgatatagattaccaatttaagaaagttctcgacggcatttcaatctctcgagccgaaaagattccgcggaaaatctgaaccgcgaatccccaagagacggaaacagtccatttgcggcgtttgtcatagcatatcgactgttgcataagtccagcagagtctagctttgccgggacttgtagatgcttcaaggcatcaacacgtgtcatgtttgggaaaatcggttcgaccacgtcgaggtgatgaagcgtaaccagtggagccaccgggtgagccgctagtaatccaaagagattgccatacacatcgtactgaaatacacaaaagacagcaccaattaatatggaacggttcaaaatttaatttgagaagagttaccaaaccgaccggttattggtaggtaccgacgattggttctgtaatcaatgaacaaatcaccaacaaacaaggagagtgtcacgtgagacgcacgcgccgttaaatgcgtgacaactctttaaagaaacggcctgacaccgtgacgacgtgtaccttactccggcaacaatataacgtacggcaacattgtggtccagtgacgtggcattgtatcataattgaattttataatgcaatggatttttaaccaaaagcgtgtaactttttattatcaaaaaacccggggaacaatttaatttataatctcgataaactcattgaatacacattaactaaaaagcattaaatacaatgatcaaataaaatctagttgtagttaaaactacttactactaattaaccaactgaaacaaaacacaaagattcgtattaatcaatcaaaatatgttatttagttagaaaatcatagaattttcatttacagattgtgtttggtgtaaaagaaagtaatattaataatctgaacatgttttacagttaattaaccaacttaatttaactagattcatacgaatctatgagaatatttctttactaataagattatagtaaaaacataaaataaaagtgataattactgacctggtgaaaaccgagttctttagtgagtggaacaccgagttcagccatgcaagcttgcatccgatcatcggaaccgtacaacgccggataccttttaatacaccgatcttgcattttgctcaaagccaccgctaatggataacttatagcaaatcctccaccgccataagccattccataagagaaataaatgttctgaagatgactctccgataaactgccgatgtaatacatttgattatgatcgtattttctcaaaactctgattagattctcggcgacaaagactgtatcatcgtctcccataacgaaccatctcacatctttgagtcctaatttaagtgtctccgtaacgattcttgaaattctaatcgccgatctgtgtccttgtttgtttttatacggaaacttcgatgtatcgccggagattttcaccggcgggaggctaatttcgtcttcttcgtcttcttcagtaactggtttttctaaccagacataactacgcatttggtttggtttgtaccaaatcttgatgtactcttttctctgtttccatagtcttgccgacgcggcgataccgaaaaccacgtgttggaaaccggtttgcggtggcggaggtggtggtggtggtgaaggtggtggagaggcgtatgatttgattacagccgtttgatttgtgtggaagagaatcaacggttgagatgagttgacaatgtcgttgagacgacgaacaacggcggagaatggctccacttgacaagcacgtgagtttgagataagctttagtgtgtagacaacgtaagtggcggagacgaggaggaggagcgttaccataagtttggatacgggtcgggtcggtgaaccggatccggataaagtccgttcccacattagcttctctgctggatctttctggttattcagcttcatcttaagaaccaaagatgaagaaaaggaaacgaaatcaaaatctaagaaatataaataattggtaataaatatttcgatggaaacaaattttatgggtttaagaagaaagtgagattgagaagaagaacatgcagtggctctgttctgattttctaaaagagaagacaaaagtgtcttgtgaaagagactcattttacttagtttatatattaatatattaaaatgtcatagtcaaaaagaaaattatacttttagttagcaaaaaatctaatctattttgtttcgatatgataaaggttagattctaattgttactcttagattgatcttggaattatctgtatgagtagagtaattaacaaaaaacgttatacgatatttgtcatatttagctctgataaacaattgatatatcctcgcgtttgattttttttttttgttgtcatttactgtattttacactcaaaccgacaaacaaaatatacagtcaatcaaattttgcttaaggagatttaagaattaattaggtgggaaacaagaaatacaattataactactagtattttttcgttttactatgataagtatttttgcatggacacgtgtatggattgtagtggaaaatatgtgtcggtagtagcagaactttggaggtggtgggggagctaggactattttatttattataggggttggtttagaaataaaactataatttttggggcaatttatgaaaatgataaattatgggggggcatgggtggtgttgttgacaacttgttgttgcagactacgagacaattttattacatccatgctgctactcttcaggagcttctgagttcatcagagagtttaaaatttctagctcttttcttttttgcctatttctatctacttttgtggaaatcacattcaaaaaaaatcaatgggttctgttactaattgaaggcccaaaacattattgattgttaagcatttttcttttctttaattacagtgcatgtaccgacgtttttagtcaaattatttgtgatacttcagtgatttagatatgagatgtttcgttattgttataatgttattatccttttattaaaaagaatattgaaatctgcccttcaataatgtttggggcatgacatgtccgatataaagagacttcaattttttttgccgacaatgacacacgacgtcaggagcttcgacgttgcggcaaagagtaaactttgaccaccagattagggtaaaaatagaaagcagtttttttttaacctttcattctttgattagagatgttcgagtttaattactttgcatggtctaaaaattggccttttgaagttgtgatcttggcctgagactgatcttgaactttgcttttgattgaatgatctaactatggataacttcaaaattaaaataaataagtctacaaaatttaaccatgtgatgcaatcaaaagaaccggaaagttttggaggagatatgcttagttatcttgatacgttaatcgtattactatagtaagggatatgctaagatttcttgctacataaagtaactaagaacattaaaaggttacaacaagaagtaaagaactttacaagaaacaactttaacaaatcatatatgaagcatagttcgcaaactcctccaatgatcttcacattctctttaccataattaaaattctccaccaaaaataacaaaattatttatttgtcgcttgctgaagcgattcatattacaacaatggcctccatggttaatgttacgagtataatagttacgagaaatctcatcaccaaattcaaaactccacggctcaaactagatctaccttctctacaacattctagccagttgaatgcaatcaagaatgatccaataaaaatgataaataagtacgcttcaaggagaaatatcgtggtttcatgtttggatcgacctaactctaggccgaatcaaatctctgggtatgatgctgttatgaaattttattcctctataaacgagaagaatcaagaccaattaagtagttgcatctccagcgattgttttatcgatgatttctcctttccaaagccttttcgagggaaacaagtaagattttttctataagatctctccgcaaacttttaaatctatacgatgtgtatacatattatacatttcaagatttgttttgtgaatgaattgacatatttttgcaggaagctatggagttcttcgaagaacttgtgaagagtatgggacaaaacgttaagttttgtgttgaaaatgtgtgtgaaggtgatggacatagtgctgctgttaattggcatcttggtacgttttagtacatatatcgctcatgcttattgcctaattatacatacttatgtttaatagtcgcattggtcttcctttcgttttgtgtttattgtatgaagaatggaaaggacgaaaaattccctttacaagaggatgtagcttctatgaatttatagatgaaggaggaagactggttataaggtaacttgtttttttggagggatatatatgtactaataagtaggagatgaacatagtgctttgtttttttttctaacaacaagcatttatatatgtaggatggtacactgcatacataaatgatatgtttagtgaaaaaatatctcagtttttatttatttcatatctatactaattaacaaataatcttgtaattgatttgacaaaaaaaaatcagaaacgcgaggattttgattgaatcgccaattaaaccgggaggaataacattggtaaaatagttattttcaatttttacaaatgaataatgtagatgagaggtatttttgagtatatttttacatttatttttattgataatattttgttcagagcctgttaaagaacatcaccttcttgttcgacgaatttccaaaaggagctgagtgtaagttttcaatattaatttatttttacatatcacatttcattcaaaattcttaagcgcaatgttttttaaaatattattttgttctctcaaatatttcagtgtttttggaaaaaccttatgctataatccaagcagcaattcgaatttatggactatttttggcgccactcataaaccatgtaatggcaagctacctgaagcttctaagcaatatggccgaattcttcttattggtcgtcaaaattatcatcaaaattcgaaacctcttcttcaaatagaagaaacaaggactgcatacttttattctaaatcatctttttcctatatttgatgatattattttactaaccgtatatgattatttgtactttcaaaaaaaaaaaacattaacaatcttgaggggttggtaattagagatattaaattaagttttttttcgtgatcctgctcacaaacctaaggttaaagtttcgggctttcgacctactcacaaatctaacgtaaaatttgattagagagcaaaagaagctgaccaaatcagaatttgtttatgaccatgtcaaataactacatcgaatcacaagagcaaatcaaatacaaaaaatgtttaccgttttatgtcttttactatttaaaaccaatttaaaatatcccttcccgtaaaaaaagacctcttcccatttacatttacgttgagcccaaagtctaagcccaagttataaacaaagcccataaacaaaaaaagaagaagcgaaatgttctttacgtttttcgcctgtaagaacaaaattgcagagaaagaatttgattaccgaggtagtgaagatgaggacactctggaatcactttagtaccatttcctatatcaaaatttctccgagaatgagaagaatttctgcagcaaatttgatctcaaatcgaaatctttcaaccatttcttctactgaagatcccgagctcagagattttgtgggatttttagaatctctcaaaaactatgagaaatcaggtgtaccaaaaggagctggaactgattctgatgatggattcgatctgggtcgaatgaaacgtctcatgcttcgcctccgtaatcctcattacaaatacaaggttcgtgctttttgctaatttcaccatttctcttactgattcctatgttaaaggtctcatctttagatttggattgttttcataataatgaacaattaggatagattctcctatggattgaaaagacttgtaatgtttggaagttgtttattgaaaggtctaatctttagatttggattcgtttttgtgttatgcatattttgttttctggtttatgattagtggaaggtgagattaacaagtagggcagtgattataggttgttcatgttgctggaactaagggaaaaggatcaacttctgcttttctctctaatatcttacgagctggaggatattctgttggttgttattctaggtaaagtattgactttggattaaagttttattgtattttgagtttgaatctttcatggttacttacatgagttttttgttcttcattgcagcccacatattctgagtatcaaagaacggatttcttgtaatggagaacctgtctctgcttccactcttaatgatcttttctattcagtcaaaccgattcttgaacagtctattcaagaggaaaatggttctttgagtcattttgaggtaactaatcaagcttctcttagattctgcatttcacacagtttccttttgtttcttatacagatatttctttttggcagattctcactgggatagccttctctttatttgaaaaggaaaatgtcgacattgcggttatagaggtggctcatctttttacattagacctttaaagagacttgcttatgctattgtgttgaagattgccgtctagtgtaattagcttatgtataccactgttttatattttcttgggtatcatcaggctgggctaggaggagctcgagacgctacaaatgtcattgaaagttcaaatcttgctgcatcggtcataacaacgataggtgaggaacacatggcagcacttgggggttccttggaaagtatagcagaggctaaatctggaattattaaacacggtcgcccagttaggtggtttttatgtgtttgcttatcttataacctttgaattataagcacattgatagatagagttttacgtgttgttatgaaacttgtaggtggttttaggtggaccgtttcttcctcatatcgagggcattctccgttctaaagcagcttcagtgtcgtcatcggttattttggcatctaatattggatctagttcttcaatcaaaggcatcattaacaaaaatgggatcgggctttgccagtcctgtgacatcgtgatacagaatgagaaagatgatcaaccagtaagtttcaaaaaccttttattttttattcaagaaatgggtctgtgattcttaatatatcaacaaattgtacatataaatgcagattgttgagcttagtgatgtaaacctacgtatgcttggacatcaccagctccaaaatgctgttactgccacatgtgtgtctctttgtcttcgcgatcaaggtataatgcacttttgagtctctatatctagcaacaaaagaattgaacaagcttacaaattttgttacttttattatggaataatcaggatgtgggagagtgacagatgaagcaattaggattggtttagagaacactcgtttacttgggagaagtcagtttctgacaccaaaagaagcagagactttactattacccggagcaacagtgcttcttgatggaggttggttatagctttaatgttttctacttcggatcttagtcaattgaaagttttgtttcttctctatgagtatcgtaatgttagaaccgatcctctttccttgaaacttttggtttacggtatcaatctctggtctgtttttcagctcacaccaaagagtcagcgcgagccctcaaggagatgataaagaaggattttccagagaaaagattggtatttgtggttgccatggctagtgacaaagatcatgtgtcctttgcaaaagaacttctctcaggtctaaaaccagaagcagtgattctaacagaagctgacatcggtggaggtaagattagatcaacggagtcttcggtgttgaaagaatcatggataaaagctgctgatgaattggggtcaaggtctatggaagcttcagaaaacaaaactgtgttgggttccttaaagcttgcctacaagatactcagcgatgacacaacaagtagtgactcaggaatggttatagtcacgggttcgcttcacattgtatcttcagtcttagcttctcttcaacattaatttccttatctttacgagtctcttgtaaaaaaactcagtttgtgttaaaccaaacaaatctttttcctggaacatcatgaaccgtaacatttgatggtagttgaaaccttctgaaagaggcagagactttcaaagaagcaaataaacaaagtaggtgagattattagttgtagtttttgtcccacatcgcttacgtagaatagtaagaggcttgtgagcttactatataaagagaagaggtggttcagttggaaagtatgatccttcaggcaagttataggggaaatgaggaatggttataatctcgctttaatgcgtgatgagcgctccgctcaaagcctgttacgactaattgggcgctccaatttttatacaatctgatccctctcttgtccaaacacttttttaaaataacattttcactctaaaaaagtacaaaaaatattttaatatataaattttctttacagtttataattattaaatattatattcataaaattatcccaatgggcttgggttgggccttataagttatattccagttataatagtccaaaaaaaggataaattatctattttgtaaaacaatttagttatgaaatgataaccattgaggaaattacaacggatatgcacagaaaaaagaaaattaagttgggtaagagagagagtgatgttttgatatttttacccttatgagagaaaaagagatagaaaacgaaagagaaggaaaaaaaataaaagaagttcaacgttcatgataactcataagttaacagtgataaacaaattattatgataactaaataaactaatgcataaattaacatgttacaagaataggtaattgctaatctattagttactgaatgtgaacatgataaaaaataaaaaaatcgttatatgtaatagttatctataatgttgcatacaatttaccaatttaaaagacatgttaaggtgataactaaattgctaatgtatagttaaaagtaataactaaattaccaaaataaataaatatgttattacatattatataataaatgatttaacacaaaaaacatgttttcgacgtaagataaatagtgctttcattttgctactgttttttaaagacatgtttatcatactaatcaaataattaactacctaaatttgttaccgccaaaacttattttttgttgttccatataatgagtttatcttaatatttttcttgttaacgtgtatatgtgacgaaagatatttttgtcattaatttgagtcagatgaaaaataactaaatagcaaattttcatgcatagatacctaattatttattcatttgagcatagatttttaattcaccctaaccatttttttaaacaaatttttatagcccacgtggtattggcctagttttaagaaaaatttacgcatatttaattttatagaattcttatacttggatagtaataattttgtagtatttggctataattatgttcttatagctactagttaggcttaagcaagcttgagttaaagtcatgttctttgtgatgaccatcgaaaccaaacacacaatttgattaagttttaaggaaaccgagtcaattgagaaataaaaaggtataaaatgtacatgaggagccaaacctaaccagagcagctcatcaaacaatttgtctgctttcaagtactactaatcatccacaaataacgccttgcaatatgattgtataagaaacaatgttgaagacgttacatttcatatgtggtttctaaaacccaactagattctgaggcccacgattggcccagattcgtttaggggaccttttctatcttcagttgactatatatttgtttcccttaatcgcaagaaatcagaggaaagaaaatagggttttgcaggtaaaaaaaaagagtaacaatggcgacaatgatcaccaatcttcgaagggatttgatagaggagattatatctagggttcccttgagatctatgaaagcagtaagattaacttgcaaaagttggaataatatatccaaaagtgagatcttcacgaagatgcagattgataaagcaacaactagagaagggaagactatgatgatatcggtgatgcctcacaatctttctttaatgagcgtcgccgtcgacgacgttgatccatccgtagagtttaaaggtcagcttagttttctttgtaatcaagtcagtatacataaagttatccattgtgagggtttgttgttatgcttcttgaaagaccatactagggttgtggtttggaatccgtattccgggcaaacaaggtgggtcaaactcagatatccccaccctccaagtccaagcaaatgggattggttcagatatgcccttggatacgaggataaaggatcttgtcgtagcgttaaattcttaaggtttttagattatttacctgaagaaccagaaaaccaaaatgtttgctatgaaatctatgattttgactctgatttatggacaactcttgatgtcacttcacactcgtggatatgttattctagctgtggcgtgtttctcaagggaaacgcttactggcctgttgtaaaaagtagctcagaagctaacatcgatcacataatctattttgactttacaagagagagtttcgggccgcctctacctttaccgtttggcgctacagatcgtggatattcatatgtgaatttatcttgtgttaaagaagagaagcttgcagctttttttcagcactacatttcatataaatatgaatttgagatatgggttacgactaagattgaggccgaaatggtgtcgtggagcaaattcttgagaatggatttgggacctaatatagatattccaattactttcttcattgacgaggagaagaaagttttcatgggttttgagcatagagaatatcccaagagatttattaacatcatcggagaggctaaatatttaagaaaattggatc

SEQ ID NO: 809 - DNA, 79837 bp, Arabidopsis thaliana
gatctcggagtacatgaaggccaccgttcgccatgctcttatgttccaagtttggtccaaatcaagcatcctgcaggagacaaaatgataaaacaaagtagtttagaagaccgtcgatttgctcaaaacagtttgagacttgctgcaattgaaaagctcatcaattagagttattgatattggtatgaggatgtgcgaaacaagcaaacgggatgattaggcataaaattgagattgtttgctaagttagcatttaatgttatacctcaattgtttttttaatgatatttacattcttagcaagaaaagaaagaagaagacatcaacgctgtttttatttttttttaatttagtgttaaattatatgcaaagaaaaaataaacgtgaatatacgtgaatgcaaacttttcatagcatacttataaattcctatattctcggtgtattatctcgatgcgaaccacacttggagtccttcgacatgcttctctaccttcccttgctttagagtactcaaacggtttctaacatttttatcaatcagcttgaccattttttccgttgttgagggtcgctctccgtgtcttctatcattcctctccgtccatatgaaatgtattgcattctcaaacacaaacttaaggatgaatctcttggtgttatcatgagatttgcttgtaatttccttcatcacttctagccacttgtccgagaacttgtgtaacaagataccacgaaccagtttctcccatacttccttagagaaagggcattggaagaataaatgttcccgcgtttctaaagggtgtttgcaaaacacacagcttgtatctacattcagtttccaattcaccattcgttcccctgtcgccactctatttttcataaccaaccatgagataaatgtgtaccttggggtagccccagaaaaccaaatcactttgtgtccattcctctcagctttaggtaagcgaatttgcgaccatgtctctctagagctaaactgtttcctgtagcagtcatttttccctttccataatgctgcatccggttctgtttccaaacggtgttgtcttttttttcgcaactcttcctcgacttggttcagaaaatctcgtcgatggtggctgcttctggttctgttcatcactttacagagctttctctctagcggaatagccatgtcaatgcagcccctatctcctagtttctcatgatggcgacacggaatactttagattccttgatgtataatttgaattgaagtatgaaatgtcaaaatacagaataagcatctcggtaccattagagcatctcgatctcatctatctcaggatgttaaaacgaattaattaatcattcttccaagccatttaatttgaacagctttaaacaaataagtttagttatgtgatttgagtagttgtacaagagaatgtttataattcaatgaaagagtttccgaaacaatgaaatgagtaatgagaagcgaacttagtgcaagagcacgaaagagttaactcacgacaatttaacaagacaatagtcaaagagttcataagattattttaggcaagacttaatttcaggagctagtgtggtatatttaaggcacctaagaactcatgattaagttcagagagaatggggtgtaaaaaaaaagaagaatttagttcaagactatagaatatttggttctctaaactacattattcagatgggttttagcattttattttctgatgagcacatggattgcttcattggctctaccggaaaaaccattagcagggatgacatatacctgataggtgtatcaaagacttcaacgtttaattaagaacagatacgacgttctcagtctgaaaggtttcggctaatagattctgaagcccacgattggcttgaggtgtaggctcgtagttaatagattcggaagcccaagattggcccagcttagttcgtttaggatttttcctttgtatcttcaattgattatatatctttttttccttagatcgtaagaaatcagaggaaaaggaaaatagggttttgaaggtgaaaacaaaaacccaacaatggcgacgatgatctccaatcttccaagggatttgatagaggagattttttctagggttcccttgacatctatgaaagcagtgagattaacttgcaaaagttggaacaatttatctaaaagtgagagctttacgaaggtgcacattggtagagcagcaacaagagaagagaagactatgatagtcgatgtgatgcctcacaaacttaatttaatgagtattgtcatcgacgacgttactccatctgcagagtttaaaggtcagtttagtttacttcacaagaactaccgtataaatcaagtcttacactatgagggtttgttgttatgcattatgaaagatcctactaggattgtggtttggaatccgtatttgggacaaacaaggtggatccaactcaggtattttcaccgtccacatggaatagaccatttcagatatgctctcggatacgcggataaggaatcttgtagtagccttaaattcttaaggtttttagattatttctacaaagcacccgaagaggaatttttttggtatgaaatctacgattttgactctggtttatggacaactcttaatgtcactccacactggggtatttattcgacttgcccttgtgtttcccttaagggaaacacttactggcctgctaaagaaaggagcacacaaggtttccaagattatataatccgtttcgattttacaagagagagatttggaccccttctagctctgcctacggatcgtgaatcttcatttgtgagtttatcttgtgttaaagaagagaagcttgcagctttatttaagcaccggctgcaccatgattcatacgaatatgagtttgagatatggattacgactaagattgaggtcgaaatggtttcgtggagcaagttcttgagaatggatatgagacctaagatggagcttccacttactttctacattgacgaagagaagaaagttttcatgggatttgatcatggagaatatcccaagttattatttcttaacgtcgttggagagactggattcttaagaaaattcgagaatatccaataccgttcgccatgctcttatgttccaagtttggtccaagtcaagaaacttgcacgagacagactgagaaaacaacgtagtttagaaaaccgtcgatttgctcaaaacattttgagacttgcgcgcaatggaaaaagctaatcaatatcagttattgatattggtaggaggatgtgcaaaaccgagtaaacgggatgattaggcgcaaaattgagattggtttctaagttatagcatttaatgtagctagtacctcaacattttatttttttatttttttctatttacattcttagcaatatcagtaacatgagagcatgtcgatctcatctatttcaggatgtttcaacaaaattaaacatattttcaagccatttgaacagcattaaacaaataagtttggttatgtgatttgagtagttgtacgagagaatgtttataattcaatgaaagaggttcgcaaacaatgaaataagcaagtgcaagagcacaaaagagttaacacacgacaatttaacaagatactaatgagtaactaatagtcaaagagttcataagatgattttaggcaagacttcattgcaggaatggatacggaagctaacttatttccaattattttcttcattgatacttaagaattttggatctcagagtatctgaaggccaattctatcgaccaagtttggtccaaatcaagaaacctacgctgaggcaaaaggatgaaacaaagtagtttagaatagcattattgatctgctcatttgaatgtaaacgtaaaaaagaaacccaacagcatcatcatttgaaaagaaaccatacgtatgatgatgctgttgggtttctcttttacgttgttttgtgcatatgagtgtaaaatttcaacatctagatttcagtaatatcgatatttttcatgattattcatacaacagttttaacagaactttatatatacacgtcacttgtaagctgcgaaaaaaaactaaataggagaatttaaaatggaggacagtgtaaaaagattcatgtaacgatccaacatttcttcataaaattctaacgtaaaaaacaatcatattgtgagatggttttagagaaagaaacaaagttccaaaagacacattcgttctcaaatcaaaggtactatgtaaccttaaataagaccaaaaagaaacaagaaagtccttttcaaggaagatcagatccagcagcaccaccaccgaaaccaccagctccacgaccaaacccttgcctagctccaccagctccaccctgtacataaccaaaacatttaattacacaccaacataattgcattgcattctagcaatcatgaaaccaccattactcatgatagaaagacctagtggcagagcatcgaatatttagggaagccaagtgcacaacagattaaagcaaagcaatttacacaaggtgcttatcagacagagttcataaaatgatttagggaacctaagaacacaacatgttgttgaaagatagtggcttcagaagtttcctcaaaattaagcatgatactaatgcgtaacaaataaaagtgttcacaagagtttgacaagaaaggagagatttggtaccctgaagccaggctggtaatcagcaggtgctccagccttgtcaccatactctccacctgatttaggacctccacggtatccatctctgtcaccaaacctcctctctccatcaccacgaggagggccactgtataaaaccaaatcaacaccgtcacatatcaacacttaacaagtaaccatgatacaataacaagactgagaattgaagattcaaattgattaccggggacggtcaccaccacctccaaaaggtcgaccaagaggcttctgttgcttcttcaaagtagcaggaacaatctcagatgggagattaaggtaagtcctgagaaagtcaataccttcatttgtgaggaaccagtagtaatgcatccaagcaaaggtctctctcacatattccttagatttgaaactctgcatcaacttgataacttgcagatttggaacactctcaatcaaaggatgttgtggtaagttgaaatcctttttagcaaacaaaacaccctctgcacacaaaaagaaccaattccaaccatttctaagtacaattctcttgaatcaaccaatcaatcatcatgcataaacccattaacgtagaagacaactagattcataagctcaaatcaaaatggtacctttgaagaggtacttggagatctcacggcggttagtctctgatatgatctgcaaatacgagaaacaagattagcttttttatatacagtttgagtatactcagcattttgaaatcagtatttgattcacgtaaggagtgatttagggtttagagatgttaccatgattgcgatgagattgaagaaggaggcgatagagaaggtgactgcgtttgtatgtgttttgctttaacttcttctcctaacgcgaaaccctaatttcgactgaagccgccacttttataacatgtttgtcttaagggtttatgtgtgtccctaattgggccgatataaaaaaatgttaatgggctaacatggcccaatctaatttattttatacccaaagttatttagctttagtctttcatatattaaatcaggacattttctacttcagtaatttgtgagaaatttcatcaagtagactgtagacataaaaattgctgtaagaaaaaaaaaagactgtagacataaaagatacaagaaatttcatatcacacgatttacatatataatttcatacttcttggtttaaagttacagtaatatataattcaaggtagagtgcatttttccaattcaacgtttgctcttccctctctctggtatttgtttaaaaacaggttcctcacactcttccctctcaatagtggcagttttagttttggaacttttatttcccaaacgttgccaagtttgattcttttggtcccttgtcaaaatggataatgagggaaatgattccagcagcgacgactcctacacgggtggctttgaattccgacgtagaaaaaaacgtccgcatgaagaagcgtccaaaatgccaacgatcataatatcagacttagaatcagaaacagaatgtgcttccgaggagagtatcgacaagatcaaaactgtgagtgtgtattccttctctttctcttctttatgtaagaacatctccaatgcctaactctattttttcctttattttagagatgattctattttagagaaaatatagttaattttgctccattgtattttcaaaatagagttaactctaaaatagaggaaaagtgtagagattgctctctatatatagagtaaaaaataagactactctatatttttctctattttagagtcatacattggagcaaaatcaactatatttcttctaaaatagagttaggcattggagatggtctaaaagtttgatgcttttttacttatacgtaacccgatgtaagcagctgttgaattacaataatatggagactgataatggtgacaaggagaagagtgaggaagatgacttgtgtgctctgaaggatgcacttgaggctgttatattgtttcaaggtttaagtgaatatcaaaagaagttgatgtttccaaacttgaagaatcttggagctgaaacaattaaagagctcatcgatgaatggaaggagttgaatgttgaggagctaaatttgaacatcaagaaacaaactttctttacaaagtttgcaaacgctagctggagtttgatgttacttattcaacaagaaaataatttctgcttttggatgttttatgttattcctacttcattgttttttgtgtgttgtgtgttgctgcatcttttgaatgatggatcctaatagaatgtgggttattttaaaagtttaatggatgagaacttcacagcttttgttttactgtcttttatttgttgtgttggctactacagtcagtttcacagaaaaagagaagttatcccagagttacaatggttctgaataagccatctattgaatataacaatgtttccttattaaattacattgaaatcaaacacgtaaagatttaagagaggagacaattcaaaacgatttgaatctaggatcacgtattccaatctctctacagatttggataatcagaaatattcaaagacactaacaatccgtaaatataatggaggttctgttttgtttcccggaccaaaaatcctgtgacctgtatgaaattgtcaatatatctgcaaaccacagtcaattatcttgtcctcattgtcctagtgtcagcttccaaatcataggttgtagcaaaaccaaacatagttagatctttcaaattgtaatgcaggttccatcctccccagaccatgcttcttaagacaagtccaacaacttgtatatttactgcttttgatgttttcatcttctgcttcatagtctccatctccagcattcgcggctactactctcagcatcaaagtagtcctcttcgctgctgctgctactctcaaaatcaaaatattcctcttcgttgctgctactttcagcatcaaagtattcctcttcgctgctgctgctgctactctcagcttcctccttaaagatctgtacaccacactcaatgatcttgtgcttatccctgcagctgaatttaaacagaatctcgcttgtactcacatctacgcctattttttctgaaaacaagtcaccataaaatataaacagatgttctgttcgaattttagacgactctagaatcactacccggtgatagaatttgttaatttggacacctcctttgattcttagacgacatgttatatcattagttgggaagtcttcgattggcgaaaagagaaggcaagccttgaatcttgaggacaccgagaaagtccccgcaactggagccagagggatggttatggagtttcctgtagctttgtgagtgaactccgcagggacttttttgccaggtaaccatatatacccttcaaccctttgttgtttgattgctcttcttgctttttcatccagttttaaacaattgtggaatataagtaacttgactgggttatggaaagaatgtactctctcaagtgatcgacaatggtttgcacataggaactctagggaaggaggaagacctggcaacgaaacaagttttctgcagcatttgatggtaagagttcgtaaccgagtgagacgtatgacgcaatctggaatcgtctctatatcactaaagcttaggcttagcatagttatgcttggcgggacatatgttaatctcttgaggcttcggcattctaagctaagttgatcaagacgagaccaatatttaacaactgatggaggaacttcttctatctttgtttttcctacatcaagagatttgatgttcctcgaaatatctggaaaactgctcaactgtgagcacagagtcatgctgactttctcaagagatactaagttgatgttggttggaacaacttttaacattttacacccaaacatcatcaacgctttcagtttttgtagattcgaaatggaagagggaagctccaccaaacttgagcacttaataagtgtcaatgtctcaagattagtagcatttgaaagattaggaatttctttcaacttacgcgaaaagctcaaatctatattcttgagatttgtaagggactgcatgttaaacacaagaaatgagaaacgtcatatcaaggttgaagcatatttaaatatataaataccaacctggattcctccccagagcttctctagattgctgtgtggcatatggagtaccacgagacgttctggctggaatctccgaggaagactttttcttgggtaatgttcccaatgtagtaaccttagccgaggtagatacttcatgtcttctactatccgtaatgtaacctttttactagaacttctccgataaattcttaagaatcgaagattacgcattgcttcaaaggctcgcccacttatagagaactcactgaccttagacatgtcaaatgatattcctaatacagatccagtaccctaaaaattattccaaaagaagactggtgaaattattatcgcaacaacatgctaaatttattgagcaagatctttagggaatatagtaaaaacttacggtttcatttgccaacacatcacgaatctcttcggcctctactagaaactgacgtttctcgggctcatcggactgttcaagaactatgtatctacctaattgttgaagcaaaggatgcataaatatccggtcaaccctggatatatgtacaagacatttatcggctagggtcttcaacccatttctgacgtccaggttactatcagcaagtaacgttttcacaacactaatgtatgtattgttgaagaagcatgcaatgtgaagaaagagaacttgctctttcttggacaatttttcatatgccgattttaatacgtcctcaatctttctatcaagactagtttctagcctatccgattgtagtttccatctatgcttgctctggccacgcaaagatgaacccacaacagaaaggcataatggaagattaccacaaagataagctacttttcttgcaagctcttcaaaaccatcccgtggaaaacttttctgaaaagcagacagacagaggatctcaagagctaccttattggttggataaccgacatggtaaaagttgttgtcgttgaccaaaagtgtcttcataatagttttatcttttgtggtaacgatgattcgacttccggaaccaaaccaagaaggttctttagccaatgccaatagttgctctagatcatccacatcatcaataactataagaacttttttatcctctagccagtcttttattccccctaaatgatctgtcttcacatcattttggttcaaaatcttggacagaagttggttttgtaaattcaacttccaatcatagttatcaacaccaatgctcttataacttcctttgaggtttcccataaagcatttaaattgaaaattcgtagagagttggttgtataaagctctagcaatggtagtcttaccaattcctgcaggaccccaaattccaatcatcttcacttcatcagaattgagacataacaaagagtccaatttcctcaagtgagcgtcaagtcccaccatctcttcaaaatcccttgatggtatgacattcagtttgtttgaaacatctgcgacaatcttttcaatcatctcagcttcatcagtcctaaaacaagcaaacaaaatcttgttggtgggtctaaattacaagaaatttcacaactgagcattagttaagaaagatgttgcactaattcattcaaaaaaaaacaaaaaatgacaaaccagtttagagaatgttctcctcctatgtttgccgcctcagtcaaagcgttggtccatctctgcttcacctccttagttttacctacacaagttttcccaaacgcctttccgaaatcaccgctctgtttccgtacatcagacgggtcgatttcgtaaaatataggcatcacaatctgctcctgatcttctttgcattttaagatttctaccaattcatctaaacaccagcttgaagaagggtaattcttagatagcaccaccagcgacactctagattctcgtattgcttgcaccagttcaggtccgatcctctggcctcgttcaatctcttggtctttaaatgccacgattcccttgattgcaaagtgaaaacgtaaatgactgagaaattttctacgaacgtctgagccgtggaagctcgggaagacatgatatttcctaacgtgggtcgaagaagaagccattagagatagggtaaagagaacttgaagaatatatcggagcgttgcattgactttgacaggagttctaatgcagttatccaaacactaaatagatcgaggagaaactctcttagagatttgaatgctgattggttgattttttaagtcttcgtatgatggaacttcctcatcgccgtggcctccactacacataataaaaaaccaaaacacattatcagatattcttttgcaagtcacaatgaaacagcgatacgatattaaaaaagatgatagagagagagacagacttttctcttcttctgttgtttcttagaaaagcaatctatgggattcatgaaacaattgtgagtgcttgatattaataacattataaatcttgcaaatgggttttctgaaatatagcagacttaatcaattgacttggttatttattatctctttctactagtataacaaaacctaatcagaatgtatgtcttttcaatagttgcataaaatatattcttaatgactagacaactatcctaacagtcaaagagaggatagacgaggagcagctcaaatatatctttcttgagatttgacagtggctgctgaatttcaaacacaacgaaccagacacttttatcaaacttttctgaaattataactacaaaggcttcataaaaatatgagaagataaaaaatcttcagggtataaatgaaacatgtttcttcacaataacatatttagaacactagcctcgatatcactagacaagcaatagcaattagcaagttaaaaacaagggaaaacatgtgaaaaaataacctcgatatcactatggctagtgtccagaattagtaatccatgaagcctttacataactattttaacatcagactagtaatatctatgatcatataatatccagtctctctaaaaatttaataaattgaaaatataatggaagatatatatcttggaccccctgaccgattccaacgacgtaagatgcagggttttgtaccttcttctaccccagattaagcttcccaaactaaatctaacaaccaaggatgttttcttcttcacagagctggacagcttcaggctcataatctctatctccatctattatttatgagatggagaaggtgctaagaaagtactagaactggcttggtctcatgagattccacgagaattcgctcttgttttattcatcttcttctttctcagaccatgcttcgtaaaccaactccaacaacttgtatgtttactggttttggtgctttcaacttgagagaactttaaaccttcatcttcatagtagtccgcttcgctgctgctactctcagtttcaaagatgtccaattcgctgctgctactctcagtttcaaagttttccaattcgctgctgctactcttagtttcaaagttgtccacgtcgctgctgctgctacccttagcttcctccgtcatgatctgtacaccacactcaataatcatgttatcgaggtcagggtcatcgctgaactcatttataacacagttgaacttaaatataatctcgctcaaaatcatgtttcgttgataaaccaagcgaccgtgaaatataaacagatgttccgtcccaggagaccaatctgaaagccgtgctaagtcgcagatgcgcattgcaaaccccgctttgctacttacgatgcaacttatactatgacatcggtagcccgtaactggcaaaatcacaaagcaagccttgtatcttgaggaagccaggaaagtaccgggagccagagggatagttatggaattccctacagctttgtgactgaactctgctgggatttctttacctggtaagcatatatactcgtcaactggttgttgcatgataattcctcttcttgcttcttcatccagtttcaaacagttgtagaatgtgagtatggttgggttgccgaaagagcaacatactctcttgagtgatgcacatttgtttgcatttagggactcgagccaagggggaagagccggaattgtcacgagttttctgcagttttcgacgataagttctactagatacgggagacttatgacgcaatctggaatcctccttatatcactgttgctaagatttagcgaaattatactttgtggggcatgtgttaatatcttgaggcttctgctgccaatctcaaggcgcgcaagacgagaccaagatccagcaaccgatggagggaaattttctatctttgtatttccgacactaagagtcttgatgttacttgagatatctggaaaacgtcgcaatcgcgagcaataattcattctgactacctcaagagatgctaagttgatgttggtgggaataactcgtagcttttcgcaccctgacatcttcagctttttcagtttgtgtagattcgaaatagaggagggaagttccaccaaagttttgcagtgagtaaggttcaatgtctcgagattagtagcattcgaaagatttgggatttctttcaatctaatggaaaagctcagatctatgctcttgatattaggaaggggctgcatgttaaacacaacaaatgagaaaatatcttatttagtttgaatcactagaagaacaagaaagaatatcaaataccaacctggattcctccccagagcttctcgagattgctgtgtggcatatggagttccaagagacgttccggctgaaattttgtaggaagactttttcttgggtagcgatcccaatgtagtaacctaagaggaggtaaatactccatatcttctggtatttgcaaagtacatttgccgctaaacaaataattaaagattcttaggaaccggagattacgcattccttcaaaagcacccttacttacagaaacctctccgatattggatgtattatatgatatacctatgactgatccagtaccctaccaaatattgccaaagaagacttgtgagattttcatcactataaataggaatcgttagggaatatatatatatatatatatatatatatatatatatgcaaatacttactgtttcatctgtcagtactgcacgaatctcttcagcctcaattaaaaattgacgtttcccgggctcgtcagactgttcaagaactatctgtctacccaattgttgtagtagatgatggtgcatcactatccatccattaatagatatatgcacgaaacatttatcggctagtgtcttcaacccatttctaacatccaagttactgtcagcaagcataactgtgacgtaatcaacacttctgtagttgaagaagcatgcaatgtgaaggaatagtgattgatttttcttcgacaatctctcatatcccacttttaatatgctttcaatttttccatcaagacttgcttcgatcctaggtaattgaagttcccactcgtgcttgctctccccacgcaaagatgaacccacaatagaaaggcctaacggaagattaccgcaaagatgtactactttcttggcaagctcttcaaaaccatctggtacagagctttgtttgaaagcagagagacataagatctcaagagcttcttccatggacggaaaatccacatggtagatatcgttgatcccgtgttccttcaaaatcttcttatcttctgtggcaacgatgatccggcttccagaaccaaaccatgaaagttctttagccaatacctctaattgctctagatcatctacatcatcaagaatgataagcactctttgatcttgcagccattcttttattgcagctaaattatgtaccctcatatctccttggttcaaaatcttagccagaagtagcttttgcagagacttctggaattcatagtgatcaacacccactatgctcttaagacttcccttgaggttccccataaaacatttaagttgaaaactgctagagagttggttgtataaagctctagcaatggtagacttaccaattcccgcaggaccccaaattccaatcatcttcacatcatcgccctcgaagcatagcaaagaattcaattttgtcaaatgagcttcaagtccgaccatcccttcaaaatcccttgaaggtgtaacactgagtttggttgaaacatctgtagcaatcttttggatcatatctgcttcattagccctagcaaaagcaaaaaacaacatggctttggtgggtctaaattacaaaaattgtacctttccttaagaaagataaaagcactaattgattgagagacataccaattaagagaatgttctccttttatgtttgcaacatgagtcaaagctttggtccatctctgcttcacctcctcacttttcccttcacaagttttcatgaatgtgcttccgaaatctcccttctgtttccgtacactcgacggatcaacatcgtagaagatggtcatcacaatctggccctgatcttctttgcactttaagatttcaaccaattcatctaaacaccagctcgaagaagcatactttttcgaaagcaacacaatcgagactctagactctctaattgcatttacgagctcaggtccaatcgtattgcctttctcaatctcctgatccttgaaggtcgtgattcctttgcttgcaaaatgatagtgtaaatgactgagaaaacctttacgaacatctgggccatggaagcttggaaagacatggtatctcctgatgttagacgaagaagaagacaaagccataaaagtatcacaaatgcttcaacttcaaaaaaagtatttgtagaatggttcgaagaaagtcttattgagaaagcaagttcctttgattatgtattgaagaaaaaaacgcgtaacgtaattgtaaaggattataaatgtgaaattccacgaagttgtcgactcgacaactcactaaagtgtgtttttttatagtcgtcgaggaccaatggtttttttacaattggaatcttttttttgttgtttttttgcaaagcttgacttttttcggtgaaatgagctcagagagtatcagagactaaaaatttggaaaaagaggaagacgaagaggaagattctaatccaattgtcaatttggtttggaacataaaccggagttttaatttgtttttaaaatgaagaattaaaatcaaattgatattgggctcgtaacttcgttaacgtaacctgattttcatgttcaacgctagtgaatagtgagcaactttaagtcaagaaataaaagaaacattaatgttatgtacacacacattttcactacatttctctcatgaactgctcttatctttttttttctacattgaaaacactaataagaggtactcatacaaatgaccattgttataggcttgaacttaagttttttataaaccctgagtagatgaagaagaagacgcagcacggaaatgcttgttcacgtgctccgctgccagatgatctgtagccggtctctttggtcttaactgcaattgacaaatttgacaaaacaaattaagatttcggataacacaaccaaaatcaacagttttgttatctgaagaagttcaagattgttctatatcgttttcttttgtctattttcctacgaaatcctgtgttatgaactatatatacgagggaaacaacggagatttgaatcaaagaatcacaaactatgaggaatgagagttgagagctgtttcaccttttcttcagctcgttgatagaagctgcgtataagaatgtttttcacttctgtagttatcactacaaccataacgaacaagatacaaattagtaaaaacataagacatgatctgtgaaaactcgagactgttgaatctgattaacaccaatttgcctagagattctaagaagtgatacatagtaaagacagtaactaaatcactcaatcaaagcaagttcaagatcacaacttcataagacaaatctttgacactatatataaaatgtaacgaaattctaaaatctctagccgaaaaaacacgcaaggtttttcaaaaaagcacgattttttgtttcaccttgatctggtggtggaagtgtacggttgtgagtaggacgataggtggtaggaaccatcttctgcaagaaaacatgaacaaaaaactcaaaccttcgataacagatcaaaactctaatctttaactgatacaagctagttgaaacttgtcttcgtcacttagcagctaaattatggccaaatggaatcagaattatgattctaagatcaatcaatctgacaaaaatggctaatttgtattggtttttcacaagatccaacagcaaactcgatgataattgaaaagatggaactttttggaactgaccaagtaagcagcaaaacccagatacacattcgaattacatctctttgaatcaacaaaggacacattttttttccaatacgaccaagtaaagcctaactcagatccgtaaaattgaaaaattgaatttgggggaagaaactaacagagggattagaaggatcggagggacgatgttgactgaaattgtgaggatcaaaggaaggcaaatcacccagaatcgacgccattggaatcgtgattgatgatctttccttctcttcagacagagagagagagagacgagagatataaaagggagaaacgaaaaagggtttatgggcccattgggcctacctctagaaccagcttcaaattaatgtttctctaaataacaatagagattctgttttttatatatgaatatgaataaagaaacaatttatttacaaaaaaagaaaaaaaaaatatgaataaacaattatggttcataggaatatttcaagaaaattaattaagtgcctatatcaacaaggttcactttttgattctataatttgtgttgaaatttttttagtaaacgtatttgagttaatcggttcaagatataatctattaagaaattattttcaaatttgtgcgagtgaaaataaaattatggaatctgcggatggtttatgttggagtgttatatttttatagaatcgataagtgaatttgatttcgtaagtattctccaaaattgttttctagactagtcaaattgattaatttttttttatattttgatctcaattcactttcattcataaatatgaattaataaaattccatcttccttcgatgaccatcgaaactgaaaatatttatctttcaattgtgtaatttcactgtttttttccttaagaaagagtctgaaaaagatgaggaagaaagaaaaacacatgcactctcttcttcgcatatatgtctttcagtgagattaatgttggttttttacatatgtagcattcattataggtcaaaggaaacttccacgtgtttatagagttaaaaggcttgatttattttgggggtcaaataagattcttaaccactacaaccataataacatgtttatgttgaattagtcgcttatccgtattaaatttagagccacgccacttgaattgtatgagatacataaaaaaaacaaggaaactaaatcattctacttagcattttaccaagttacattgattttgactctaaattcaacctgaacatacgttttatgatgtatgtatgcaatgtctactacacctttccactataagttcaattaaattgataggattcaatggtttactagtatatgatcgtacagtatatcatgtgtgttcgaaagaaaaacaaaaacaaaagtcacttaaaatatatagttgaatcaagtacaattgatgatctatgaaacttttaattaacatatacatgtgaggtatgactaaaaacactaattaatactaattacttaaagatatttaggtacgtatattcgagtagtaaatatttattgaaatataaccacatgtcgacatattagaccaagccaatacaaatctctcatataaaaaagaagaaaaagaagaaaaaaagagataggaaaaatgagggagataataataaaagtttaataacacaaggaaactaaatggaggtaaaaagcagttgaacagaaaattaggtgaacttagttggcctcaatgcccttttacccttacttcttcttcttctccttcttttttcttcacaatctatcattacacatctataaatattgtgagagatagagaaagaaagagacttataacaatggacagagaagacataaatcctatgttaagccgcctagatgtcgaaaacaacaacaccttctcttcctttgtagacaaaaccctaatgatgatgcctccatcaacattttccggtgaagtggaaccttcatcttcttcttcttggtatccagaaagctttcatgtgcatgcgccgccattaccacctgagaatgatcaaataggtgagaaagggaaggagctgaaagagaagagatcgaggaaagttccaaggattgcgtttcatacgaggagcgatgatgatgttcttgatgatggttatcgttggcgaaaatatgggcagaaatctgtcaagcacaatgctcatcccaggtacttttacctatatagttgtattaattaagagtatttataattttattcgtgaatctatgacatcatattaaaattgatttccaaatattggatcgaccaaaaactttcgtggctacaaaacattaggttagcttaacaaccagtacgatctagtcttgtgtttaacattaaactgatatatgtagaaaatgtatcttttagttgcaaaaataccatagtttttaggtttagctagtaatagttatataacgaaatcaatcccttactaaagcctataacgaaatctgtcgtacgtacttttcgaaaatttatgatgtgatgataattttcgaaaacaaagcatgagaatagatgtgatttttaaaaaaggattatcctatagttttcttttctgataatttgattatcctataatatagttaattattgtgcaattatataatcttagaaacatgtataaacctgatatagggattctctttatgtgctaccacatccgagtatgaaattgtttggaaagggatgatttactcaaatatgtataatgtatccatcaatattctggtcaagaaaatgatcttaattagttctagatcagtataaaatatatagtttcttatgggcttatggctcatatatatatgaaaacttcatccagatgaaaagtaatttaatttgcttccttgttttttattcctttttgctagggaatcaaaagcagagataaatccaattctacttcattttatatgatatttacgttcttagcaaaaaatagaaaaaaaaaatagtttcatgagacttcatagaaattaaaatcagtcttgcatagacacccaaaacttctacttatttttcatatgaattataaaaaaaaatttgaagaattaatagatgaaactattaatcttgtgtcacaaaatgcaggagctattacagatgtacgtaccacacatgcaacgtgaagaaacaagtgcagagattggcaaaagatccaaacgtcgtcgtaacgacctacgaaggcgttcataaccatccttgtgagaagctcatggagactcttaatcctcttctcaggcaactccagttcctctccagtttctctaatctttgaatatataatggcttaattaatggtgtaattacttaaaggtgattaaggtgttaatcaccccactgaccgtttgacgacccacatctcccaagtgacaagtcacaagtgtgtagatcagattttaaaccaatgtaacagttacgactttttacaaatgtttctgaattttatcccctgatttctggtttatgatcggtttacgccgatgatttgacaaataccagacaaaacaagtttagttacatatgtaagtatgaaaaggtagtttcctctaacttcattaaacccaccctcattctctacaacttctttgatatttttctacatacttaacagagagaagttagggtccagacatttggtaactagagaattctaaagaagaaaaacatgcttcagagagagagaaaacttgtacaaataatcaaccggaagacatttgaaagatgatacgttgtcgatttttgtttgtgattactctttcaaatcccaaaattcatcactaaaccggccaaagtatgtattatggtcctttatgcataaatgtcttacacaagaaaaccaaaacactttgcatccaaaacctaactaactcaaactagttctgggcaaaaaaaaaccagttcagaaaactaagggaacttattgggtacaagagtaattgataacacttatagtttgatcgtcattacaagttaacagcaagctaaatacaaactaatccctcataaacagaatacgacttgcgcaccggaatcctaaactctgttcatggcgtgggaaagtgataaagttactaatttattatgttaagtgttgtgtcctaactcctaagtaccaacttccccttgttctagcctctcaagttctccatcaagatgtcggtccagtaggcctaacaatgccaggaggagcgggcaccggatggtttcggtttcctaaaactgtctcggttctataggcagccgttgtaaaaggtgactgagcttgagacgtttgaaccgatggtgtctgaaccggctgtgaactattcagcctagtggaagtttgagactgttggctaggtcggatgatcatgtggtcaagagcagtggaatgagaaccgggcacaagacttcctcgcatcctcgggcgccagttggatgtatcaggaaccgtcaagtctacatccactaggtcacttaatcgagaaacagattgaacagtgggaccacttgggtgctgccttgaagtgcttgcatggctactggttaaacctctgacgccataattattaggctggctgagtactctagggacatgctgagactgaacaaaagaggatacattcgctggcgactggctcgttactggaactgagaccttccggctctgcaaggaacacatattgtcaacatacgaatactgaagaaagaaacaagtctctcaaacgaaatcacaaaccgtatatggagttgtcattggtggcgcttgagattgataagtctggttccatctcggactagtggttctaccaagatatgttccggtgggtgtaacaggtgaagcatgaacctgagagtattgtggagagggattcggtatggtgaagacagtggaagtagttgctggtctatctcttggagatggtgtctgcgagaatggtacaggtaccggcattggatctatggacattggtatttgggataagtttgaatattgttgaccagttccagtattcgaagcttgatgcggttgtggcgcagtgtttcccaaagcagataaaatctccgggtcaagtgcgatcacatcagagatatcaaatatcgaagagtaatcatcgtttgaaggatgtttatttgtgttgttattattagattgaccctgagcatcagacatacagggcttccggtcctcaaccttgttgtcaccaaaaacttccagttcagcatcatcatcccccgtaagatcgaaaacaacaggaccagagtttaataagctcatcgggtcttctagatcatgaatgatctcacgcacaggttccggggtctcgccagtattttttgtaaccttccatgtaccaccagcatcgatgattacatcagcagcattgtgttccacatcttttaatatctaaggatatgatatgagacgagttatcagtattaagctgcaacgcaaaaatgtagcagaaatcaaattacaacatagatagctaattgccttggccatgttttgatctaaacgaatgtcagggtagcaaacaggttgattgcaatgcgggcagcgccaggttgggttcctcatatttatgtgaacgtagtttgagaaatcaaaacactgcagcagaaagtatcacatcactaacaaatattacgagaaaaataaggtaacacccacattaaaacactgtatgccaatttaaaaggatggaaaaaaagagaatatcgcttgatatttgattgcatcacctgaagatgtttacataactggcccttgactggtagcttgatccgcttgcgactgttttattaaagactaaatcactgaccaaaaaaacaaccataagataacacagtagtacgtaaaaaagtagaattggtaccttatagggcaactgagagatactcgtgatggcccctcaatgatgtctgaatctatagacaggtaaaaaaaagtacagagcgattagattggaaaaaaaatcttacaggtatgtgcttgcaatcattgaatgattcaaactggaatagtatagagcattcaagaaaaatgttcctctctcctatcttatgctctttaattacctggacttgcttcaatgactccggactgaaggtaatctttaagaaccggtttttcaggtggcactaccagtcccgtaaaagcaattatgatgatgtaatttcctttgaacaatcaagcatcttaataagatattaattaaatagacatggacaacaaaaaagatatatataattgaatagaaacctttaaaattccccatcacttggagaagattagttccatatttcagctgtgcagtaacatttgtagggagttgaggccctgtatcctggaaagaaaaaaattgacataaacatgcacataaccagtgcagagaaacaaaatccaattaaaagtcaaactgcacaaaccattgcgatattgactctcttctcaaccccctttccatttagcaagaagctgcaattttcatatgaaagccaggaaggttaaattggatcacatttcgtgtcggtgaggaaaaatagcaaaaacaattcgcatacctgacttctggaggatttgaaatacaggcagacgtgtctatgttgtctgtctgggcaacaaataaccgctgaagagcaaacaagaatctggtgtaagaaatcatttgctaaccaaaaggtgcagagagtgggcacatctacaagatgaaatagattcaaaaatgtatatgaaggactgttagatagaatgcaagcaatggttatattcacattttccacctaattgcacagataaaggtagaatttattatagagagatccagactgagatatcgaatgactaacagatgagccacacatacaattttctcttggagtgaatgtggcatattctttgagatataaaaatcatgcgccagcattgtatagccagcctgtcatgcaaggaaagccaaaaaagcacacttagatgataatatcagaaatagatgtttagaacagaagaaaggctcaccttcacttcaaaagaaacaagaacatgcccaagctttacaaatggatagaacctgggatcagaaagaaataaatttcaaccaatgcttagatttgtatccagtgaataccattctattgaagaagtttttggtactgcttaactaacttgtgataaaagtttggaaatattcacgctcctaataaactgctagagtaaaatctatgtcaatcaacaaagccacacagtgaaagcaaaacctacctctccatgatctgcgaaaatgtactgccaggacttttgataccagggctagtgcttccagaactcccaaaacaagtccttatctgaataagaaagaaaacatttgtatcctcatcatccaaataacctgcttttggttttataccatgattcggaagaaaacaaacctcatcagctagagcgataagttcttgactctcgctatccgaaaaccatcccaaatgacaagcatgctgtgacatttaacaaaaatcaaaagtattatatgtcaaaaccaaatgagtcatcatagatggtgacaaagtgaaaaccttttgacctcaaacattccaaccgacatgaaatctaaacaaaaggcttctcttttctaaacaaaaaaaaagtgcttattcacagaacagaagcagtctgcagattactctcttaattaccttaacagagatcatcagcaccataagcgccgtcttagtgtacacatcagttccatgtctgcacaactacgtcacataacacaagcactatcatcagttcactaacaatggcctccattaatccagaaaaaaaaaaaaatccatattttaattgagaaataacctgtttgagtaaccacggaaactcctcaaccttcttaggaatatcattattcgctatagcaaaatcaatgcctctgaacagagaaattaagcatatcatcaattcaaaaacacagccaaaaaatcaaaacccagagattaaagaatatcatttagaaaagctttgatttttgtgcgcgcatgttaatatctataagtaatggcgagagagagagagagaggaaattacttagcgaaagagatgcaacagatttgaaactccttaggatcaaccttagctccgtcttgaatgtggtaacgtaaacgttgagtcaccgacgctaatcggaaggaattgaccagtgacgctgccgtcttctcccgtaagccagttccagccaccggacgagccgctgccgccgtagacattgagattggaactaactaccgtggaatcacaaagtttctggattttgaaatggagaaacacgatttgaagaagaagaagaagaagaaggaataaattactctgctcaatcgacaataaccctaaaattctctttgaccctgttttttcattttaatttgtttttatgaagtccatgtaattaattttgctttattgttttgtaatttgttctttatgtaattattttttgaatttttacccttgcactttaaaggttttctgaattatatccccaaatatttaattactaaatttgaaactttagaaattgtgtgttaactttagtaacaaaacttattttgtactatttgtaataatttcccttattaccactactatgaacccttggttaggtctagtagtttacttattaaattaaaaaggctataaaagaaatatgataaaaacatgtgtatgaatgatcttgagcttgaagacccactttgattcataaactagctcttgtcctttgttcttttggatcttaccagttagttaccatcgatagtcgatatgatgatatgctccaaaatgcatcttcgatgattaccgttaggtagtttgttataaccatatgagacaagttaccaaaataaatactgcaaccacataaatgtaggcatttatgttgtttctatttgtctgcattaatttgtaatataggtattgccttcttgaaatggacacttcgtcatgtatagtctcacaagaccaggggcggaagtagtgaagggagaagggggtcaattgaccccataacatttataattttttgtttttaagttaaatctcataataatttatggatgttttggtttaaattttccataatgaccccatgccgataatcgattctttaatttgacccctcacatgtttatttttattaagcattaattcatttttcatttttgttttgtgtttttttctaaaatatggctacaaatctctaaaattgtggtacatatttacttttataaacatattccatatattgttctttacattattttcaaagttgttcttacacatatttatttaatttaaaataaataattaaataaaaatatataattatatatgaccctgtaaactaaaattctagctccgtcactgcacaagacttgtcctattgaaaatgaggtaatttggtaaccattttttcagtaccatcataacaagtaagaaaagtagttgcacctgaaataagttattcattctaaaattcataaaccactttatttagatataacttactgtttctacctcatcagattagaacatcaagttaatcaaattactcaaataaacatcataaaaactactacacttacggttttaccagggcattgttttcccattttataggatgagcatatttagaaagctcacaaagaagatcatgtatataagtatattatactatactgtttgattatttatgaaatattttaaaatagtactgtacaattggcccaaaaaagaggatgtttattatctccagtgatcacctctaattaattaagagaacatttgatctaataacaaaaccaaagccattgccaaaccggtgtcaaaaccgggattaacaaccagatcaaaaacatctgaaccgaaccggactcctttggttctgacctctttccttttgatctccaccactgtcttgttcaatgggacgtgcactattttacacgatttacatctatacgatcctttgatgatgtatgaattcttcttatcgaacgatcctgaatatacgtatgccaaaatgtcggatttggtgctcagaatattcatctttaagttcttcctcatgtaccaggttgggcactttggtatttttgtttctccttttgtatcatttgcttcatagattccccaactatctactagcgtaattttctggacaatacaaaggaaaatcgtttttaatatacacaacattttaaactcaaactagtacttgtctataaaattgcattgagtaaaaatatctagatccatatgtacgtagtcacgtcaaaattgatcaatttaaacgaaattaggcatagctagattttggtgaaactaaaagtcaaacatataatactcggagattctagacgtcgttatgaaattatgattatacttttatagtcaaaacttttatgctgaatgaaattttgtaaatctattcccaaagaatgtaacgggttacacgaaattcttgccaatacaattgtccacatgcagaatatttatgaacttttgacgtgacctattgtggacggtgtcacggtagtgtagttggtcctactcaatcttaataatatatatactatagtattcgtaatatcttcgttcatacatatcttcaatcggctaaaaacaaaacgtcttctacaaaatcggctaacatgtctatcagcgaaattaatactcaacattcattgttcattattatcaacatatcgccgaccttaagtactatttacaaactatcacaattctaatggttgtaagcaaatcgatccgatacttcgctagagtgatccgtaaggacgacgaaaacttctttcaatttttaaagtatttctatatcattttggtaaattccaccaaaaattcacaactcttataaatcattttgttgttgctccatttattgttttgtatcaatcaagtatttggatgttttataactacaacctagaactaatatctacacaactaatttacaactacaacgctaacaaaacagattcataagtacaactgtgagacagatttagtagaggtttgattcttaataatctaaaataaatgtgatattgtaattttgaaggatgatgtgtacaatgaatataatgatccatattctaaaacatattcaaataagtttattctaaatactttgtacatatatttaccttggtacgatgcatgaggaggagggagtttccatctttatccatgaggatgagttcctcgggtcgggttcgggcataattatcgacccggtaaatcaaatctccattcgaatctatcaccgtgaatccttcacaactcaccagaagcgattttctccacaccgtgagtgtcgtacacgctcctccaatatctgcggcagcgacggagactgtggactctgtagatgacggtgcatcttcaccgtggaccgacctcgaccgttgcttcaagaaagggaacatttttgtagttttggtgttcttggttaactattttaagagagttttacagatctaattaatctcaattctcaatacaaatatggtaaggttaggtatacatatgagatatatatatatagatctaatatatatgtgtgtggatgaaagatattagctttgttatattatatcattgtcttattatattataatttttttcttctttatatcaacttgcaaagtttttaaatatcgctacttgatatttaaatgcgaccacaaataatacttagtgacaaaactgtactattctacaaaatataaaaataagaatttcacctaaaaagctttaaacgttttattaattatgagtcaaaatttttagtgttatttgaaaaataatacaatatgataagatattataccattctataagttaattagaattttttttaagttaatgaatacaggtcattagatttttttttatcacattacaaatacaaatttaacgtacgtaacatttacatttagtggactagaactcaaatcaccctattacagcttgcatatatagtaaattgtttttgttttataagtccaaaaggattagtctaaattacattgtttggttatcaaagaaattaaaataaaaaattagataaaattaatcgaaaatgaaaacttaacatgaaggttgaaatctccaaattatttactcatcctttttaccaaactcaaatatgatatttttttctatacgtaaaactcaaaattgtatatacaagaaatttagctatctaaaaataactatataataagccattatagtaagccacaattttgaccatctacgatcttttcttttgtacgtagtaaggtttggtgcaaacttttgcaagtaattagtatatagctcttatggatatggtatattcctgatatgaactctgattgggtaatgattagcacttagcaaggtagtcagatttttggctttggcacgcatgggtttcactgtttcaggattgaattggaatttttttttgattaattaatgtataatattttatacaatataaaaatatattactgtattaggtaagaactttacgacaaaaaaaaaaaaataggtaagaactttaagattatgcaagggtcttaaaacgagccacgtaatcttcttagacccacgatagtagatttttgaggtctccaagaatctcttatcctttttgtcatcgaatctctctctctttctgaagatatattaagaaacaaatctctctttttcttcgaaaaggttggttaggtgaaggacaattctcatccacacgattagatgcataaaattatatatataagaagaaaatctaattatatgaaatggtggaatttcatgtcacactagacgacgaatcttccatattaaactcacttctaacactgcatgtgtatgtaattatgtatatgaatgaatatccaaatagaataatatatttggactaatcaaattattggaaaagtacataaataaataagtgagctttcattgtcaaacctgattttgttgatctctgggtttgccattactccaaaaaatcttaccttcaagagtgatgtcgacacagtggagcacacgtgttgtaacacgtgtcatgactcagctcaaaattggatcccacggaagaagttagatctcgaggccaagagaccagagtcatcaattcaaaccccacgtgcgtgagagtcactgactattctcctcttatcttccgggtcttcgaaatccaatatctccaaaacgcagcgtcttggttaatttttgagatgtcaatatatataatctgtgaccttgtaatgtttaatcaacaggtgtatgatcatctttcatctaggagcattttcattctatcaacatattctcataacaattttactatgcctaacaattttttatttttactatgaaatggatcagtaataaatgggccttaatactgtaccaacaatcccataaatgggcccaatgctggatcctatccgccgacatctaacgttccactaacggagacgttatcgggaatattcacattaattaacgaccgttagttccacgccaaatatgttacatctgctacaaaataaatagtttgattttccaccgtggacggttacctactcgaggcccagacccgaatcaaacggactggattaaatgttttaaatcaaggggtgggattaaatctgaagcacacgcttttattcgtcacagtctcctcccacactcttcaatcagtaaagagttttaggtttttttttcttcttctcggaggtttgtagaatcaacaaaaatggtggaagaccacaagcacgaggaatcgatcttggagaagattgttgagaagatccatggccacggtgactcgtcttctctgtccgattccgacgacgataagaaatctacatcgtcttcgtcgtcgtccttcaagtcaaagatttaccgacttttcggaagggagaaacctgttcacaaggttctcggtggtggaaaacgtatggatctatctctatttcttcactttgaactctgattttactcgattttgtatcttacatagtgattttgctcgatctagtgaatgttgctctaatttgaagctaaaattgagtgtatttgagtgcttaattgtctgctttgctcgaaagtacgcttaaatcttgtgaaatactcagaaactatgttgaatctggattcattgtttgcatgtagctgctgatatattcctttggaggaacaagaaggtatctggtggagtcttgggtgctgtaactgcgtcttgggtcttattcgagttattcgaataccatctcctcgcttttctctgtcactttgcgatttttgctcttgcagcattgttcttgtggtctaatgcttgtacattcatccacaagtatgttcttacaacatcccttatatgttaagtgttaagtatgagataactgcctgatcaactgagttcttatcctcaggtcaactcctcacatcccggaagttcacatccctgaagatcctattcttcaacttgtttctggattaaggattgaaatcaatcgtggtttgacccttcttaggaacattgcatcaggaaaagatgtcaagaaatttatcctggtattgttcatgttatctacctcgatgcaaagcggttttcttatgttcctcataaatgctaatacttgcttgcacatgttttaggtaattgctggcttgtgggttttgtccattattggcagctgctacaacttcttgacattgttctacactggtaacgattcatttacatcttactgcatttaatctgataggaatcatacttgcatatcttgataaccagcttttctttcttgcttccagctactgtccttctcttcaccattcctgtactctacgagaagtatgaggacaaagtagatgcctatggggagaaggcgatgagggagatcaaaaagcaatatgcagtacttgatgagaaggtattgcgtaaggtcataagcaagattccaagaggagctctgaacaagaagaaggattaaggaatgtgagttactctctcattggaatcgtagtaatggttcaagacatgttttgttagaagctgttggttgataaaccctttgatctcttgttattattatgttcattataaatttgggggttttaactaaaaatatttagattatgagagaacacggatggatgataattattgttgttagttatttgtcttagttaatttctcatccttttaacagctctccatgatggtattcgtcatgtcaattttgcatcatgtctgaggattggtccatacacataaactcaaattgtttcgtgggtttttcgctcttcactgctactgcgatctaactttagttcataagaatctttcttgtttttatttgactaataatattcttcccattccatctctttcatcatctcaacatcttgttcataggaaaagctaaaatgattggtatatgaactaggttaaacgcaatttgataattttccaaaaaaatttgttcataattcttttgccaaaattgcgatttcacgatttctcgacaaaaataatcacacaaaaagtggattccacaataccaaacgctttcggtatgataaccatcaaatctggataattacttaaagtaagcaacatacgtaaggtagacaactaggtgttaatcactatatatagtttgtagtagaaaacaatatcaaaagtcaggatggccgagtggtctaaggcgccagactcaagttctggtcctcgtaagagggcgtgggttcaaaccccacttctgacatttctgtttttagttttatgttcaatgactggatttttaaatttattatttttccgattaaagtagataactttttttacaacaaccattatttttttttttgtcatcatttaaccatttactttcaaaagcaaaaaaacttaaagatgaacagtgacgacaaaaaagaaagaaaagatgaaacagtgaaagccaagtacagtcattttgattaaaccgtattcattaaccaacttttcactaactatggtaaaccaacccctgacccgaaccgaaccgttcttgtttttaaccaatgattcattcaatcagagtctttatccgtagaagtcaatacctccgtctcagccgcacccaaatccggagctattccggtgccgttgtactgctgaatcaccaaaaccgatgcttttgtcgaagattccggcgaaatcaacaagcttcctacaggtccaagctccggacattcactattctccctaatcgccaatgcaatttctccacctggcattctaccaaccaaaaacaaattgctccgccgcacttcctcaatcgccgatctaacatccacggcggcgttttcaatctgtttctccacgaacttaaccgattcgtccaccgaagatatcttccttatctcagacataatctcctcatccgatttcagattcttcacactctgattctcgttgttattgttactcacttcaacattaacaatctctccgactctctccggcgataccacaaatcggaaaacagtcaaaacaattccgggatgctccgccatacgtaatccataagccaacgcttcacgatcatcaggaccaccgaagaacagaacaacaacagagtaagaaacatcttgagctgagacttgacttgaacctccgagtccacggtcaacgaatataccaaccgaacaaggagcttgaagcaaaactctccggttaacccaacggtaatcgccacgtgtagtctctaacgaaccatcaagctgttgatgcttgtgaaacggaagaatcacaatggctgctttttttcttacagctgttgtgcagatatcttcatgaatatcagacattgaagagattgctgtcattggtcggacattgactctgcttagctgttgaaaagcttggaaagcaactactacttgatcagcgtctgcgtttactcctcttctgttccaaaacggcattccgtttttccgaactttatgaaccattagaatagctgatgatctctctgatagttcccgtaagtggagagcgtaaacgcagagcccttcgcctttttcgatacctcttgatgcttctaggaggtttatcattgaaggaatgcttcctgctccgtggaaacatgtgaggattcgaagctgtgtgtttgtgttctctcgttctactgccctgtgtttgtattctccttctttcttcgctcttctcgctggtttgtagactgccattacgactggtgtggtgatgaaggttgtgaagagagccattagaaccattatggcaaatgtctgatcattaagaacctgaggacacaacaaaagaaagatttaagttataaactttcatgacgcaaattgttaaggatttgaaaaagttatacctttcgatcttttccgatgttgaggacgatgagttcgaccaatcctttagtgttcatgaggaatcctaatgttattgcttctcgcataggtatcttgaaggcgagggaaacaccgagagtgcccaatatcttaccgaaacaagctgtggcggtgactaaaaccagaagaccccaagactgagctccttggatcgttgccacattagttttcagaccacttgccacaaagtaaagcggcaggaagagaccggatacaagatcttccaccttctcaactagtgcaccagcaaaaggtccttcctttggaatcaaaacacccaccacaaaggcaccaaacatggagtggattccaatggcatcagttatgaatccacaaacaagaactacagccaaagtggcacagatgtaggtttcctcgataggttctccctcgtggcacctccgggaaatccatctaaagattggtggaatgatgaaagacgcaccgataacaaaagcacacccggaaaggaaaacccagagagagacaaggggagaggtattggatcccgagagagcaatggctagagcaagtagaatccaagctgccacatcgttaacggcagctgccgacatagcaagtcgtcctatctcagtagttagaagctttagctccgctaagatacgggccaacacagggaatgcagtgatagagagtgccacacccatgaagacgagaaacgcggtactattcactcctttggagattgttgcttttaaaacgaatgaagaaccaatgccaagagcaaacgggagggttattccagccaaggcaattcccaaagcctttttcccggtgcgacgaagggctttggtatcaatctctagaccagcaaggaaaaggaagaagagaaggccgagattagccagagtttcaagaacagtcaagcttttcttcgggaacacagcgtctagaaaagccttggaacgaccaagaagagaaggtccaagcataatcccaccctgcaaatcaacagactaaatcattcaccaaaaaaacagtactgatcaagagtcaagaaattgacaaaagaaaaaaaacttacaataacttcagcaataacacgaggctgtctcaaaggtcttaaaaggtaagcaagaacacgagtgagaactataacaataactatctgcagaatcgcaagaggtaacgcaaagtctatagggttatctccttggaaaactccattagaggttgctttcatcggagcaggacaagcttttgtagaatttgtagccatccttgcagactaaaccttgttcccacgtcccagaagagtagagaaacttcttcaaaacccctattaaaaaaaacaatcaagcttcgatctttatgttgataaacaaaaaaagcttcgatctttagaattcttatattcttagaatccaattaagaatcataatccaaatcaaaatagtactccaagtttatataaattcttagattctcaaaagattattttttaacagagaagattccactataacacatacatgcatatagagagttgcaccaagatacgatcccaattacacaagaataaatatatacaaaaaaactacaattctcgagaaaaaccttaaattgtctggtcaaaaaccataattataccctagaaatcaaggcattgtgaagagattaaacgaaacaacaagagagtacctgaagaattcgcaagtgattctgatctcactagatcacgaagtcggacattgaaatagttataggcccagaattagccgacatgtaaagaagaacgacgagagaggatgattcgtagaaattgcaggcgaaggagaagaagaagacaaaaacaaagaatagtgtgcgagagagagagagaagttggatcgatattgactagaagattacgacttaaatagagaaagatggagcagtacatctatcagtcgtcatttttttcaggtctctctctttttctctctgttggatacttaatgcttagtcacgactttataagttttatctcattagctttgtaatcatgatctttttgtgtatttttgttaatgaattttgcttagttgttaatttttttgtagttggtttttttatagcataacttagctgaaaaggatacaccgaaaaggaaaagaggaatctgataaagtcaacttttgtttttcactcaatattttattttagggtgtgttggcaaaatagtcactttttcaaacttaattaagaaagtagtcactttactatttataatttgcaaaatagtcacttttcacagtttgattcgtacacttggattgtacatcacttttagtatacaaatgtaaagtgtacgctgtgtatttttatatatatttgtacactaaaagtgatgtacaatctaagtgtacgaatcaaacagtgaaaagtaactattttgcaaattatgaataataaagtgactacttttctaattaagtttaaaaaagtgactagtttgcaaattaactctttattttaatgtattactataatataaaaaattatctattgattttttttttctttttctcatcaatataaaacttcgaaaaataagttattgttatttataaaggataaaactaaatcttcgaatagaatggaagatctaataaaaatacagattttcttatatgaaatttgttactaccaaaacggtcgtttttaatttacaaaatatagagtatactatgcgcatataattaatattatttggtttccacataaatattaatttagatataatatttttagtgcatgcgtattttgttgactattgtaaaatatctctactggtgaaaaacacactcaaatctctaattaatattatactagtattttaaatatggtttagttctataactaaaattttaaattatacaagaaaattgaaccagttatatatgtaaagatgtgatatataaaaacttctcaaaaattaaaaaattctcttctcactctcttttctttattttttattagtgaaactttcaagtggaaatgctctaacgtttttttggagactagtaacattaacattatgattttcgttattacattatagattttctataatttccaatggaaagaactataataaggtaaaaagattacaaccatgcacacatgtcttccaaataatcaggataacagttttacatgtttcgtttatgacatagtccattgtgaatgttacgaagattacaacttaaatacagaaatagagatagatgcaactgtgtttaaacatctctcaatattcgtccattttcgccgtctctctttcggaatcttaatgcttagtcaatcctttataagtttctaattatttttgcatttttgtttaaggattttgctacttgttccatttttttttaaaaatattgttttaaggaatctgataaagtcatcttttgttttttcactcatttaataattcttatggatcctttataatatttactaatgaagttttctttgtcatcaatcaataaaactacaaaagaaattaagttattgataaaccataaaagagttttgctgactcagaagcaaatactaacgatgtttattttttgaaatttaagaaatggttatattgcttctatagaacgagcagaaaactgtacttctttgcatgtgttggggatagttttcactttcaagtgtttgtaaagaaatagatgaaattttttgagtgtttcgtacaaaccaaaaattagtcttgaatatactaaacgtctttttcactacaacaaggtttacttttcatgctcacatgttcatgaatatatatctagattcggatccctcttgctcttataaaacatatacggttggcatttatgtaaacttactagtattaaggaaacgaaacacatatatcccacttgagtattttttttatatatagataatttttgccgcttacaattttggagagttataaaaaatatacttaactgttgttaagatatcaatgacttttttttttctgaaaaaaacacattcatagattttttaatcttcgtattcttatagtagggattttaaatatctaaacgttttattactgaaaacatatttttatgtaaagtaagatttgattgaagagaatgcattttggttttaaaatgcgttgtttgggtttaaatgattgagaagacagtttattgccgaagtctctccgatctacaacggttcacactaagtggaggggcttcttcggcgatggtttgccacccacggccaccaccattcttaaatgctccgttttctattagaatcatcgtgtgagaattgagaagaatttgaaagaaatggttttattgcttctatagaacaagcagacagctgaaaattatacaatgcatgtaattaatgagcagatgataataccataagacgacaatttttgtttttgtgtgtgtaaattatatgtgatttatgtttatatatacatgttatactgtttggattatggctttgattcatatatcgtatcatccataagtcatgttcgaagctattatattgttatttttttgaagccgttagatgtcattataattgtattattcaaatataatcttaatgtcaatcaaccaatgcaaaatctatgaacaagtgatgttacatatatttaaatataaaagtataacaattccatgataattaattaatggttgtgaagtgtatgactatgtttgcgctggagaatattgtgcgacggtcatggattgatcattataggatgaatctacactttacacacgcaatgtgaattgaatcttcgaatattctggttgaaagattatttttcatgatatcatggtagataattcttccgataaaatgcagaacattgaagttaagccaaagtcagagtaaagtttaatctaaattatatggaaaattgtatgaagtatcttctctttttttattgaacgactttgtatgaaagatctatggatctaataatttatgaatggggggctttgtctccgactctccaaccaattaatacactgaacttgggatattctaataggcatttaataatataactaagaacatttgtattcttataatattgaagttttggatgataatgcaaaaagtcttgtgattaacacatctcactattatagtggtttagtaaaattgatgtatggtattgtttaagcactaaggttatgcaacagttcgtaaacaattaagcaatactacttcttcttgacacaattaattatgcaacattaaggttcgttattctcattaatgaacctggactgattacagactttgctaataatgtaaagctaattactggttaactccggtttacacaataccatatatcaattttactaaactactcttatactcactgctcagtctttcatgacttatttttgcactattctcttcctcttgtatatgtcccacttctcttacaatactttctttcattcgactacttatcttctttcgtagagttaacgtcggtagcctgcctataccaacttttgttaatgaaattcattttctcgacctttttcgtcccttctatatgtatgtgctacacaagctttgtcaaaagacatttttcattcaactaaattctgtgaaattatgacactttttcactaattaattactcataaactacaatttctaaactagaatatcatattaactcatccaaaattaccccaaaacaaaaataaaaaactcttgttttttttgtttgggttaattttggaccaattaagtagataataccgatttctcaattcaatattcctaattactttccaagtgttagaaataatattgaatggcaatgcctactattatgtggccgacactacaaagattaagaatgggctctctaagcccattagttgggtaataaagcctgtaatgggtttttggttcgttacttagatctaaccctctaatttatttagtgtctttgacacattaaaaagaaacaacacctcttcgctttggaacttgaatggatgaggcttattgacaaatacaaagaacgaggaaaatgccacaccacaatacaaacacacaaagccaaaaagtaccaagttacggtactgtcggaatattacagcatcccaaaatcccagatttccacgtgttaaaacaatagtacttttttatcaatctcatgctggtgacataattaatagtgatagtgatgtgactcaaacaaactgattgtagccattgaagaagaaaaaatcctttagacggaaacaaaaaagaaaccccacatgaaaagtagccaacgttcaaattacaggtgaaacaaattcaccagaaaatctgagaaattgttaagatttctgtattgaattaaagagaaaaaaggtggaaactttattgctttttggccataaaaagatggaaagtaaagtaagaggagaagaagagagacaaaaagtggaaagattggtggaaaagttaaaggttcataataataataataatcgatcttcaactccggcgcacattagcttcgttcctaactcaatcgttgtgtcctctagaaagctcgctgctgctttctgggagtttcatcagtaccactacaaagacgaagaagattgctcttactcttacctctcctctgcttctgctaaaatgcaccgcggcccaaatggtttcgccggagctagtagccgccgtcaacgtcacggaaaggcggttgcggttaaggagaatggtcttgacctttctcaattccttcgagatccttctcctgatcatcaggtctttctctaagatcttaccttttttggacttttgcaactgttgatcggtttgtcctagattcagctgaatcaatcggtttagtattatgggtagtgttaaagtttggattttgaaacgtgggtcgtaatgatttactgtgaattctgatgatttttggtgttatggcccttgtgggtttagtctagggttactctgttcttggcattttagttctgcaactgcaagtgatttgtattggattcacaatgtaaaagttgcgatttttaagtttcatatcagctcagtatagtatacgctagttaggttagtgaggagagtgattctatatgaaaaactatagttttatctgaatcttaagacaatgcgattgatggtggtgttctcagtcagagtttaaggttcttttatgatcaattgagtaggtgtggaccaccgtgtggttttggatatggatctctcagttcttgactatctgatatggtcctactttctcagccagatagtgcgggaagtctaaggagacagattggtcaaatgttgataaagcatcatcaatcaatcgatagaaacaatcacgctcttcagcctgtatctcctgctagttacggaagctctctcgaggtttaaacaattgagtatttgattgtgttttggagatttgtttgtttttttacatatggatgattacggttttgcaggttacgacatacaacaaagcagtaactccaagtagttcattggagttccgaggaagaccgtctagagaacctcactacaatctcaagacatcaaccgaacttcttaaagtactgaaccgtatttggagccttgaggagcagcatgtctccaatatctccttgataaaagctttgaaaaccgaggtggctcattcacgcgttcgaatcaaggagcttcttaggtaccagcaagccgatagacacgagctagacagtgtggtgaagcaactcgctgaagaaaagttgttgagcaagaataaggaagttgagcggatgagctctgctgttcagtccgtgaggaaagcgttagaagatgagcggaaacttagaaaacgttctgagagtttgcataggaaaatggcaagagagctctcggaagtgaagtcttcgttgtctaactgtgtcaaggagcttgagagagggtctaaatcaaataagatgatggagctactctgcgatgagtttgccaaagggatcaagagttacgaagaggagattcacggtttaaagaagaagaatcttgataaggattgggcgggtcgaggtggaggagatcagttggttcttcatattgcggaatcttggcttgacgaaaggatgcagatgagattagaaggtggagatacattgaatggtaagaacagatcagtgctggataagctggaggttgagatcgagacatttcttcaggagaagcggaatgaaataccgagaaaccgccggaattcacttgaatctgttccgtttaacaccttgagtgcaccaccgcgggatgtagactgtgaagaagactctggaggaagcgattctaattgctttgagctcaagaaacctgcagagtcttatggagacgaaactaagaaaccaaaccaacataacaaagacggttcgattgatgaaaagccgaaaagcccgtcgagtttccaagtgaactttgaggatcaaatggcgtgggcgttatcgagtaacggaaagaagaaaaccacccgagctattgaagacgaagaagaagaagaagatgtaaagcctgagaacagcaacaacaataagaaaccagaaaatgagtgtgctactacgaacaagaacgatgtaatgggggaaatgatacgaacacacagaaggttattgtccgaaactcgtgaaatcgatgaagcgtcttgcaatttcccatcttctcgaagacaagcaagtccagttcgacaatggatttcaagaaccgtcgcacctgatcttctaggcccgtcggagattgcgatagctcatggagtaaaggataatactttgaaaactaagctagcaaacagttcaaagtcgcgtcttcggttattcaaaggctaatctatccagagtggttcggtcgaaaacggacaaaaacgagagttcttgttggatacacacagatccctgagtttcattcatattcacgttctttgtaaatcaaacacatctatatatttgtataatcgattgcaaatttttggatcattttgtaaacatagtaagccaaggtgaagtctgttatttttttttctgttggtctgttggagagcgcaatattttaaactgcgacgtttgaattgaggccctatagttaatgtgtttactatctctcattcgataaaattactatctcgataaatcgataatgtacatgttaccggaggaaagaaaaagaagttgggtaaaaatcttataattagggttttctgctttcctcggttaaccattcggtttgagtgaaccgaaccgaaccgagaaccggttacaattatgttgccgatcggtttcacctcaataaccaaacccgaaccgaaacccaaacatttcggttcagctcggttttgattattttggttcggttttatgttccatgcctactttataatatatacacataagtttatcaatttagaaaatggccatttttcaaaaaaaaagtatcaaagagcgaaaaattctaaaaatttctctatttttttaaatctatgatagatatttcgaaagaaaacaatgttatttcgaactttatttcatttaaaatcatttatgttcgtcaactttatttacaaataaatagtttgagctctatttcgcttgatgtaaaagttctcgttggaaaatagtcagccaaaatatttattacaatctaatttgtatgagatattttcaattttttgtgagatattgttaaaataaaaatggttagtgttaaattatttcaatttttcttaaatcaaattattgctaattttttcagtcaatgcaaaatattccataagaaagatttattatatttaggaaataaatctaattaacccccttataaaaaaaaaatattgctttccttataataatatatacctctcctaatttctaaacataattacaaatatattagcttcgtctcctatttttttattgtccttatcttgcaaaaaaaaaacgatgaccttcaaaaaaccatgaaataatcttgagacgaggtatcagtgctttattcggaaaaggtaaaaatctcatatcactgaactctttcaatttcttaagatttgtgttagtgggttgcggataacggtagccggtaggcacagatccgatatcctaaaatttggaatacataaattaggatccattagatccgtcaacatctgcaagtaattatttatattacatgcggatccgacatccgcaacactacgataataatatttaatattttgatttttttaaaaatcacctagttaaagttgaaatttctatagtataatttaaacgtgtttttaacaaactttcaaagttgttttggacctcactgaaagtgttgatatttgtatcagaaaataatgtcgaaaatgaaggattttggtggtggtagagatataatcagtgatttaccagatgcactgataggtcacattttatcattccttccaactatagaagctgttgccactactgttcttgccaaaagatggaagcctttgctttcgtttgtgcacagtcttgactttgatgactctttgtgtttacatcccgcaaagactaacgaagagaagagaacaaatgctacaagttttatgcggttcgtggatggggtgttggctttgcaagggaatgctcgaataaacaaattccgcctaaatggtaaacatattatcaatgaaagatgggtgctggattggatacaaaatgtgttgaaacgtgatgtatcagatattcgtctatacgtctcttcctgttcggatggttttgactcgagtttttatcatttgcctccagagatttttgtgagtcaaacactagttacgctaataataatgtttgaaggtgacatcaacattagtgtgggaagagaagtttctcttccgaagctcaagactctccatctgtaccatttcaagataaaattgagtacgtttaacaagcttatttctggttgtcacgcactcgaagaattgatgatgattaattggaaatgggatgagtcttcggaacctgaaccttgctttgtgaccatatatctcccaaacctcaagatactagagtattgtcgttttgaaagatatgatgaggctaacgataaagtctcattattatttcataatccaaaggtggtctacctagaattttttgattcaattgcggataggtatcaacaagtgagtttcggttcacttgttgaagctagactcggaattcgactgacatatgatcaggtctataaccatttggaaaccgaatattatgtttcatccaaggaaaagagtaatgtaacaaatcttctcactggaatatgcaatgtcaagatcctctacttgtctgatgaaactcttgaggtcagtcccagctggatattgattaattaattagtcttgtttatgttattagaccaatgattacatgcttgacttgatttgttttttttggtttttaggtatttggctgctgccgtgatacaataccagtattcagcaatctcattgaattaactattcagactaaaccacatataatatggaaaccattgccagctatgctcaacaattgtccaaatctaataactcttatcttcgaagtactatacatacacaatccttttcaatcaaccataccacgtttttcaaaacacatagattatgaaactgtttccttttatgtttcagggaatgcatcacatatattcagatagatgcgaggacgaagacgggtgcttatgtagatatcctactaattttgtggggggagtggttgctcgtccttgcctatcatcaagtccggtcaaggttctaaagattttgaactttggtgaaatttgcgatgtacatgaggacgatgaggacgacgacgacgatgatgatgatgaagatgaggaatttgtttattgtttaagggagtagatagagcatgtcgaatacttcatagagaaaatgccgaatcttgagcaagtgattttgtgctactatacatcaaacgatgaagatgtgatgaaagtgttcaagaaacttgagaaccttcctagagtagcttcaactaattgcaaaatccaactaatctcggataacctcagcttatcatgcaatgtgtccgactaaatggagtcattgtcattagaagatcatcatttttctcaggctacaaggtttgtgtagtttctaaaatgatctaaactcaatcctatgattatcttttatggctcttttcttttcttgttttggttttagatcatctaaactcttgttttacttcccttaatgacttgtgtgtaattaatgttttctccatttttttcttataatctcatcttgtatttgtctctcttttcgctatataatgttgaataaaattagcacttgcttactgttctcttcttgaaataggatcacagcttttgttgatgataatgagttaacgttgctataaattaagcattatgagcataaaatttatttgtacgtcaaaggttataaaccattctcgagcattgtttttacctaacactgatctaatcttagcttttgtatgcaatatataagatgccacaaagaagcctaatatattaacactagggaagcccatctaagcacatgttatgaggttttgtagtaagaggtctcatatatatatgatgtaagtcatgtatgaatgtaaccaaggttgcttctttgagcagccacattcaacctttaatgaaacataatcgaaatctatttttcccttaaagaaaagtctcaagctttcacctttctctgttctttacattccaataaagctcatcaattagctatttcaaattttatctaaataatctcatttgagcagaatctatcttattttggattagtcaacaccatgcgccacctggctcaggcttggcccagatgccaaggaacataagcaagtgataaaggtctcaaattttgagggccttttctagtaaaaaactatgttaaactttcatatatgtttagggtttttaaaaaattgtggccatatatgaataaaacaaagattttgaggttaattattagttttgaatttcaatttgttgttgttttacttttttatttggaaatttgaaaagaagaaaaaaagttgcaaatgcaatgattagttaaatttgaaattttaaatcgctagatcgttagcgactttttctttagctacttagctttgttaaactatgaaaacaaacatcttcatccaacatgttggctttgatttgtgttaaacaataatcacacaatttcatataatctaattttaacattttatattcacgaacacaaaacacttgctatcatactttttgctttggcttgctgttaaaatattgtcaaagcaacatttttttgtagttcttttccattgttttagaatttttaaaccgttatttaaaggttagtacttagtagattttatttttattactaagtatgtttctggaatatatgaaaaggacatgtcattaagtttttgcgtaggacactcgtaaatgtcggaccagacccaaatcggatttgataaccttatttcgaccctcgacaatgaagcgtccattatgctcattgaagcttcgtttaacaatagctttgcgatcaacatccttaccaaccgagactcataaaagtccttgtacactatgtagacaatcacattaatgacattgagtgatacctcattaggtggctccacatcttcactactttcaaaaattttcaagtcggagagatcatgatatttaccattgctcctatgagttgtggcaactgcaacttccaaatatagaagaatccagtcattgacttgcagctttgattcctccaccacgtaaaatcgctttctattttcgaaaatatcctccgagggacacttaagcaaatcacctttgacgtagaaatagcattcagttatcaaagctccatcctaagtgatttttcctcgaggtctagcaatagggaatttcaaaataaacttgccaaaacgttcttcatcaactttagtttgaaaattcaaaagtttgctgcgagctggatccatagcaaccaaagttatgtagtaattacaagcagcataatgcgtactcatattgtatttctttacacgactaagctgtaaattcttcccatgatgatcaaacaaaaaaaaatgaattgtggtgcaatacaacaattgacaaacaaaaaagagatcgagaagaagagtattgacttagaattaccttcaacaaattgtaacgatgaagacccatcctagcataaaggcggactaaggtacaacaaggtgaccaccttttatcacagatggatttttgaagttcaggaccatcactcgcttctgtagtatcgaacccctaagatattcatttaagttatcattaatctctatctggtaaccgatttaaaaacaaatctcttaattatataagaagctaagaagattaccttgtatttcttcactcatttcgtaaaattttgacttatgacgaaaattattattcaaagcctctttgtttcaattggcagcgacatcgtcctctccctcataaagcttgtgtatatgtgtcgttccgaaataaggaaccctagaagtttaagaattatggtcaattttattagattacgtccccaaattcatccctttgtgttttaccttttcgcttttgagccataacaacatcgtctgaaccaagcggctcatgcttttgttccacacaatcaatttaggattgtccactctattatctaatccagtccactgatttatgggttttatttgggccttaacaacccaaaaattctctttcctttttttcaaataaaccaatagctatctcatatctggtttatattgcagagagtgcgacacggtaccatttagaggtgagcccgaaagaagcccaataatgtgtattgggccaatcttttttttgtttttgtttttgttttttgggtcaaatggccaatcttttttttgtattgtgttttattttacactcgttcgtcttcgtctagagagagatggcgacggcgtcgtttaggtggattctgcagcttcacagagacgtaccaaaagctgctcgattctatgctcaaggtctcgacttttccgtcaatgtcgtcactttacgctgggctgagctccattctggtcctatcaagctagctcttatgcaatctcctaggttttatctcctcttttgttccattattgctcaaagcacacaacctgtttgatcatttgcctcaatgaaaactttctgagtttattcccttaaaataacttccggatttggacttttgtgttacactgtttatcgctgagaagacctctcaaagactttcttttttccgcagcaatcatgttgctgagaagggatactcatcgcttctatcgttcacagtcactgacattaatacaacagtgactaaacttatggctttaggagctgaattagatggcactatcaagtatgagatacatggaaaggttacaatttcttatgaagatgttcaagtttcatttcatacttacttgctgaaatgggatttgaagtatttttgcggttgtttttttgttttactaggttgcggctatgaaatgccctgatggttacatgttaggcctttatgaggctgcatgagcaaatgaatagaattgaagcctgaaaggaagccaattatgcatagagtagatttgtttagagatcatatccataatctctttgaagctattgtatacttcttagaaacctaagccactattatactttatattggttcatgtttaacttgctcttcacattgtttctctagtaagcttttctcaagtcaatttttttccattcattatatataatatcctgaaagtgacggattcatttctacacaatgctttgaaattgacaagatctattgaagtggacttaatggagttttgtttagtgcttttgtagttgttgaagggttgactaaatgttgttaggtcagcattttacaaaactgccctcaagttttggagcattactactttagtccatgcctccatatggtttatattgatttttatgaagtgggttgatttttcaaagatcttgtcaagattatgataaattggggaccattatgtttgtagttggttacaaacaaatacaacaaaaattatgcaccgaatcctaaatgttggacattaccaatgcactttcatctagtgcttaattacttagagatattttgcaatttaaaattcttttccaagtaaaatctattaactttcattgattaatctttgaaatttcgacatgcaatgcaagaatggaatcgcccctttcaaatatgacaaaatactaggtggtcaaatcgtgtaacttagtatatttatacatttcctcaaatactttcgggacagtaaaaatagttttggagatagttaaatttgatagcactctaaaatacaagtattaaatggtagtcttcacaaaggttatatatttgttgaaaattgcgcactgaatgcatgtttgatctctgcgggccaaatagatgttaatgatttgaaaagtacggtgaagatactggtgtggttccatccgaaaatcacttgatcggttaaaaactagcgttttatatgaaacttggttgaatgtaaacaaaaatctatatgaaaacagaagttagaaaacatattcgagtttacaccatgtcgaaaaagatcaatgcatggcgtatagtatatcaggttttaagcaggatctagtgaaaagcgaagtaattgcgagattttgaaaaacggaaaaggtcaagagtgtctatgttctaccaagaaatgatctcctcaagtgaaagggataaagagtttttatgtgtagtatcatgtaatccaaatataccagttcaaacagtcgtcgacactctagagattaactatattcttttcaatttataatccttattcttatggaataaataactaagagaggagggctgtgaagttttcttttaacttcatgcttttaattatttattgatgctttaatgtcaatatcctcctagacacagttatcgagaagtctctcccgaccatgttttctggcgccggcggaggtaaaaatcgccggcgtcgggacgttgctactctgccatgtttcctctattctcttgttacactctttttgttttcaattccttttttcctcttgcaatcatattttaaacccttgcgaaccatatctctcacgacttccaacggcgaatcaaactccagcaacggaagccaacgatggggttcagcgtttgctatcccgtctcaccctctgttcgcacaatttctgccaaaaccgccaatttccagcgatgcaagccaaacgacagaatcctcactcatcgctcaacttttcacttcccgatctggatctattttgatcctcccagaagaaccctcacactggacttcgttgatggcaggagatctctctcttggaccattagatgcgccatgtccggtggagacgttgacggcgcacgacgatggtactttctggatggagatcccatgtttctttgatcgtgtctcattgataaaggctccagcgactatttttgtctccgatctcgcatatccggtgaaatcatgtcggaatagtggtcagccactcaactcgaagaagcggcagtcatcaggagacaaaaccctagctgctggtgtggatctgtaacgacaggatctccttttcgaattgggctggatagtttctgacccactaagaagtttactacggcccaaaactaatgcatatgggctgacccatttaccaattcggcccaggtctgattttctttcttccttatcaaacactagatatttgatgtcacgttatgattttgagactggccatggactcctttctctcatcacgttgacaacaatagatagtctagacaaggagctcttattaaccctggtggtagatcttagtgtccttgagagtagctcatacaattcctatatgtctaagaatcttatgatagaatcatcctctttgatagagagaacttttgaatcatcctcttttatagagagaacttttgattggtctctgaccttaagtttgcaaaaccatttggataccttaaccacctttgtagaagcctcgtgtttcgagccggtgatatccaaggttaaagactttttctcaacgtcactatgtcttgtttggaccgtgaccattcaacaatctcccgaagtattcgtggaattgtcttcgactcaccattctctcgcttgtggcaagttactatcttgttcttgtctccgatgtatggatctacggtcgatttatcctatccttttccttttccattctcttgtgagagagctagtattgttatttgatgtttccaacaatgaggttgatgtttgtgtaaactttgtactacctatgggttgagtttgaatgaaagtatgctttgcacacaaaaaaaaataactaagagaggaaagaaatatcacacacagtttataaatacatatgttatggaaaacagaaacttagtgacaattatcttagaataattaaagactcaaaaatacccaaaatgatttgtttaactgtacacaactatgctattaataattgcacattctcaggtgttccttttcatcacactttattgtcgtttttaacttataagatatatatagattttgtgatgtcacatcgtcttgcacatacacatatatatataattatatatatatgaatgtaaaaaatgtgtataatataatgagacctgcattcttcacttcatcgtcattgtctctttttagtgtgccaatgggattatagtcaaatgccataacccaccaacaatattctttgtctcatcatgtttgtgaaatggtgtattctacatcctaaattcgtataaactatatacagtatcattttaataattgagggcgtataacaaaaaaaagaaagacgttttagcgttaaacctgacgtccaattatgggttatttagattctaaaccgaaaaaaaagcttcaccaagatgatatcaatcaaattttgattaaaactacgacatattatgattcagctgtcaaaatttagacgttcacacaatctaagcatatgttaaaatttcaacataactatgcgtgtcttataaaccaaaccaaaccatttggtaagtttcatatagtatatacatatgtgcaacttcacttctcacaagacaatataccacgtgtcaaaacacaagaaatccgtacacattttaattagaaagaacaatgagtgaaaagaataaaagcttaaagaaaaatatgtacacacactatattaataaagtggattggaaaaagattattgtcatctatatttggcatacaattgtatgctttgaaatagcataattttttgatactttttaattgatataaaaatggtatcttattcttaaccaagtctacacaaatacacataaatatatcaactttagttaattaaacctcttttgcggtattcggtggagatgaggcatcattacaagaatctaaacatatatttagtcatgctccatagattattataactttaaccaaatgatagttttgattatgtatagattacactcagtaaccccgatataagaatgattctttgttcactaaaacaattcaaatttcaagttattaattgtgatggaaaaataatacatgtgaatgtgatcaaattgtagatcaatgcatgatgatgatgttgacactcgtcaaatgtcgatcttaatgtacgattttgtcctcataagggtattagtagccgagggtagttcagtaattaaagggcttttttccaacgatgaagaagacatatctaggaacttgttgcagtgaaaagagatcaagacccgaggtgatgttgtcgttgaacactgagatctctttctctgtctctctcttgtaattttgatactttacagcccatcttagggttttattgtcaaagccctaattattcaaatacatgtaaagaaattgtttttgattatatcattttatttcttagttttcttataatctattttactggatcaaaggatagattcatttctgaactcgcagttgcgcgtagtagcttgtgacacagtgacagcttacaaataagtcatcttttattgagcgaaagctagatatttaatcttacatgaaatgcaaaaatgtaagaaaagaaaaatacattttttatgaacttgtaaaaccttatcttgaaagattgttagtgacacttatttgatagagagaaaaagataaaaaaaaatcttcgtagactggactcgaagatgttcaaggaggtccatggctgaactgaatcctgcaaaacaacactataaacactcatatgagtccaatgtcaaacttatttatattcatatcgatcaatgttgaacttgatcttgagttatacacacgaattcaatgcttgtatatatatagatataaaatgtggtactctgagaaagataaaaatagggagctcccttcagtccaagcatagagaagtgaagactcaatttgtctctcgcatcattcattcatttaccatatgagaacaaattctttcatttggtatttggatgaatgagtcgagagtcaattaaatctcacatattactccatgagtggaccgaagaaagctctcttcctccaccaactcaacatctataagcatattaacaattccgttactatatatacgcatacatacaagcacatgtaaagaatttgattatactatatatagcataaaacagtgacttagatcaaaaagaaaagataaaagataggccatgtttgtgattctggatgcaatgatcttcctctctgtgcgtgctagaatcaattctaatcttcaagataaccctagatgaccatagattaatttgaggtaccatatggatttaatagtaaaaaaagagagtttatgtgaggaaaagagagaagaaaagagagatgagagaagaagagatgtctaaagaaaatgaaggagttatggctttttatagcaaaaacaaaggtaaacataaaccggcaaaacccacacaatgtttatgcattttttttttgttgcactaacaatttgaaattatatatatgtttactgaataagtgggtggttaatattttctccacgtttttcttattcttagattttattttttttgcacttataaagatattagggtcaaatttcctttattatcacttaatggttagtctttacaatctcaattggttagtaattagctagaagagttctataaaataagaaaaaaactaggaaatttaatctttattaacgtacaagttttacgctgacaaaaaccagtacagtttacatgatcaaattttgaatgttacaacatttttacggtgataagaagtcaaatttatattattatcaatggaatttttgttataccaaccaccatcaattcatttcctagtgtacagggttcaactagcggaggctcttggaacagggagggccacagtgtaaccaaattttcaatatatattttgttgcaaggctatgcaaataggtcccttaatattatgtaaatcgtaaattcgaaatttttgaaaattcatttgatttattggtaaaatatgcactttttaattttaaaattcaacttcacagattacgaaaaaaatatctctaaaatatctcaaagaaatacgtaaacttcatttaagatgtatatttctgtttattatacctctttttttttccttacttcaaagtttggtgtaaagaaacttgcaccaatcgatttacatcaaacaaacatgactagtccttcaatatgctgaatttttaaattgagttttcttcttttctgtaatcaattaaaatttagaaatttgcttttatgtttcataataattgtctgctttacactcgagcggccggaccttgttcccgggaaacttgctttttgatataaatacataagaatattgttttgttttaaattgaagaaataaaaatataaaagggatcttaattttgtctacatagaacctattagtacacgtggatattctgcctattgcttctacggctaaaaagacgaaaaattatgtatttaagtacaatgacatttagaaaaaaaaagaaaaaaaaagtacaaggacaaagtatattattaaaatacacataatgtatagatatatttttaacaatttagtacaaataataatacaagtaattaactcatgttgagaagaattatttaactacaagaaaatcaagtttatagaagactatacatatatctgaatcaatatttataatattcattaattatttgaatcaaacaacccacacccactgtaattgtttataacataaatcttataaaaggatttaaattttgtacttgtactgcaattctgatgaagttcaaagattcaagataagtacctacaaaatcttggtcacacatagcctttctttcatagccttttctctattattaggctcatgtatgtataatacgtacacagagcaatataccaaatcatataattaatatgactatatactaatgtatatatatgtaaagagagaaggagaatatcgatgacataaagtatcattatgtaatgaccaacttggtaagatgcatctttatcttaattatagtaatattatttagcatataaacttgtactttgatgttccaaattgagcagtcgtttgtctagaacatgcagcttcgtaaaccataaagtttagtttagttttctgcattagttaaggttcaaaacctgtttttttttttttaacaaatgtatcacacataaatctttagttgttaaacaaatgtatcacacataaatctatctatgaaccatcaaactgaaaaataattggtggatatatacattttgattttaatatgaagacattataaagaaaagaaaaaaaatcgttgcatatactttttcttttcttgcttatacacatatatcacacacaaaaaaattcataagaaaaatcatagaaaagaaaaccaataacatattaagttgattatctttaagtcgtttgaaatatttgaattgaagtttgttagatctcatctttgatcgctatggcaactcttctcatgtattgtcaaactttgttgagtttgtgtctctatctttgtatcatgttgtatgcttcgttgttctaatctttcgtcttgcatgcacatcggatatatctaaggatgtttatctcgatcgattgtaattgctaaatcatgaatgaaagtttagttgttcggaaaataaccccaataagataagatcgacggcgtttttagaaagaaaccatattatagcatatcacaaaaccataacatacaccacataaataattaatatattaatcttttcacttattagttgtttttagctttatgaaaagaagtaatacgaatctatattatataggtttaaatgacatcttatgtacattgaacttcaacaagtacaaaaaaacattgaatcgtgtcccgtaaagtgtaaattctatggaagtggtaacatggttatcatcatctaatgtctctccaactaattaaaaagtataattgatattaaaatatggataatatataatcataagagagtcgattcatattggaaaaagatatatatagacatatgacgaatttgatgtaattattaatatctatagaattttgatactatttcgtctgttcctgcacctaaatgcgccatatcccatacatctccatctagaacctttatagaaaagagaatagattcaaaattataagactttaaattttttgagattggaagagttataaaaaatgattggatatccaattatatcacatcaatagaatcaattccatttagcatagctaaagtttctttaattatagttattatttaacaaatgtcggcaatgaaaatagtaatatttaccaaattatttcggcacaattgaacgaattatttatggaataaattcttagattcaagaaagagtttattatcatgaggtagggagacaatataatgtggggcaagcatccaataatttgttgatgacaattggcaaataacaaacacaaaaattagtataactaaatgtatttttttgtaattgttgttaatgtgtaattatgtattagaatatcagttttattatactatgtaacgtaaacatagacactaacttttctagcgatcgttaaactcataaaagatcgagcatgtcctattttttgaactagaaattaaagagaatcgtccttatgttacaacgattgattaaagtactaatccatttttcatgagattgcttgctaatctgatcaattttttatttttttttaatattcgagtaaattggtagagagtgaattgttttcttcgaatttatcatcatatatacgatgaattttagtagctgaaacatagtgtatattgtttgtccaatcaatatacctttgtgttatttcatttgtctaatccagaaccacatgggccatattttccaggaatcttttgtttgtttgtaattattgaagcaacaaataattcattccgtggaaaatagactaaatctgatgactctcaccgcaacatcagaatatcacatgatgaattagacaataatattcacgaatttctattgtttaagggctcaacttcgatttcactactccaaaagattacataacatgtctggttcatcagccgttactggagactattattataaccacaaaggacaatcagaacgtaaccaggttacaggggaaagagaaactaccatgtaacctgtcagacaaatgttatttgcgacttaatcccgcgttgcaaactatatccgaatgtccaagaaattttgagcaagggttttaaaatgtcctgacggaagggttgaagaacatgctgcatcaacgaactcgatgaatcactgactacattttgggcatctgttttgaaaattacttcattacattttgagtggaaatttgtgttgttttacggacaacaaacttatataacaaaatattattagacaagtaagatttgttaaactacctataatcacgagaagtaagatttgttaaactactcacgagatcagttatcttattatgggtttagctgtgtcccccgtaagataattgtactttggttgggttaattatattgctctaaacccaacaagacgttttatgacaaataatgggctctttctctaatagcccaatccgttttattgttcagttttggcgccatttagaccggaaaaaaattcgtcaatttaacgagcaagaagactacagaagaattatgaagacttcagcttccaaaatttcaacatagatatcaaattcaaattcgaaaaatgaaccaagccatacataagagaaaataaaggaaactctccagatatcatcaacagacagatacagagagtcaaggggcattgcatttcttattataactcaacaaaaataagctgaaacaatttgttttcgtgttctatgatgaaataaagccctacacaacaacatggaaacattgaattcagaataagcacaaaaacagagtgtgagagagagagagagagaataacctcaaatcaagggactgtgtccatgctttactgactcttccttgcaagcttagtccattcagtgtggtatgcaccaggacgatcggttctctcatatgtatgagctccaaagagatctctctgcgcctgaaccagattcgcaggtaatctagcacgcctgtaagtgtcgaaatacgctaaacttgcgcacattcctggtgtgctaatcccagcagatatagcaagacccaccactctcctccatgcagcttgcctctgaaccatctctttagcaaaatcaggatcaaccactaagctcgccaaattcgggtttctctggtaagctttcttgatcctgtccaagaaaaccgccctgataatacacccacctttccaaatcctagccatttcacccaaattcaagtcccaacctttctctaaactcttagccctaagcaaattcatcccttgagcataactacagatcttagaagcatacaaagcttgcctcacatcatcaatcaacctcttcttatcaacaccacgagacgcagaaccgatatcctccttcaatccagcttcttccaaaactttagcagcattctccctctcatccttcaatccactcaagtatctacaatccaacgacgcagcaatcgtaggcgccgcaacagaaagctcagccgcctgctgaaccgtccatttccctgtacctttcataccagtcttatccaaaatcttatccactaactctccatcaccataatcatccttaaccctaaatatatccgaagtaatctcaaccaagaaactctcaagctcacctcgattccactccgtgaagatctcagccaattcatcattactcaatccaccaacgttcttcaacacgtcatacgcctccgaaatcagctgcatatcaccatattcaatcccattatgaaccattttcacaaaattcccagatccaccttctccaatgtatgtaacacaaggaccatcttcgacttgagcagcaactttctcaagaatatctttaacattgttatacgcagtgaaagatccaccaggcataagagaaggaccattacgagctccttcttcaccaccggagactcccatacctaaataaagcaatcctttcttctcagcttcaacgattcgtcgctctgtgttctgataccactcatttccaccgtcgatgatacaatcaccaggctccatgtattcagagagagcagagatggtttggtcaacgggagcaccggctttgacaaggatgataacggatctaggccgttggatcgagagaacgaaatcgcgaggcgagtattgaccagcgactgggagttttccttcgttggaggcacgatctaaggtttcgtcgactttggaagtggttcgattgtagacggagattgggaatcctttatcggcgatgtttaaggcgaggttttgtcccatgactgcgagaccggcgagacctatgcgagatagagcgacggactccattgttgcgatatgaagagagagagagagatagtggtttagggttttgacggaggttggtggtgatgggggagagagagtggcggagatatttatacggtgaaagtgacggactcgtcgatggagccaagagacaatcaaaaggctgacttaacaaactggtgaagagtttttgttaggtgaagatgacgctctttatttacgacgccgttttcgtttctttagttatataattatgtaactttcggtttggaattttgattaaccgagtcgaattggtccgaaccaaagtaaaccagtttaaaatacggtaaaattagaaaaaacatagcagagccaggtttcgatcctgggacctgtgggttatgggcccaccacgcttccgctgcgccactctgctttgttgatacttttttcttatttataaaatataaatacatacaaaagggaaaatgtaaaagaaaaaatccattttggtaataatcagtgttttgggtgggaaaatctaatagaagaagaaaacgaccacgatgtgtttgcggctaaaaccatgcttattcacttaagataatactataacgaagatttttttgccggcttaacgaccggcgtatcttttctactcgcatttaaaaatgattagctatatactaaaatacaattttcttctgttacaaaagattctctgttccatgatagagacgaaacatttttcaacaatggctgagatgatatatatttggcttttctgcttcgagaggaacaagaggaagaaccatttgcttgacttcttgagaagattcagagtttctccgttctctatatgctctccatcggaaagtcaatataaccggctctcgggcccattggaaagagcatcatcctaagctctctaccaggtttgaccaagcttatagccttggagaacatttgatttcgatcttgacgctttaaattacctctacaagtgtttgctttcctgttgaacattctgggtgcaatcgagcggagatgatggcttgttgcttgcgaaataaacggcgcatgaaaggtaaactctcatggaagtcaaagaagagagatttgtctcattcaggaaactgggcaccagaagatgacaatgatgaagggaaaatcgttttctttggaggaagtaactatacctttgatttggatgatttgttagctgcatctgcagaaattttggggaaaggcgctcatgttacaacctacaaagtagctgtggaagacacagccacggtagtagtgaagagattggaggaggtggttgttgggagaagagagtttgagcaacaaatggagatcgttggtagaatcaggcatgataatgtagccgagcttaaagcctactactattccaagatcgataagctcgctgtttacagttattacagtcaaggaaacctatttgagatgctgcacggtaagctatctttctgtattccgttgtctatgcttctttggtatgcagtatcgaaaaccaataactcaacttttgcaggagagagccaagtacctttagattgggagtcccgtttaagaatcgccattggtgcagcaagagggttggctataatccacgaagcagacgacgggaagtttgtccacggtaacatcaaatcctccaatatcttcacgaactcgaaatgctacggctgcatctgcgatctcggcttaacacacatcacgaaatctctcccgcagactaccttacgttcttcgggttaccacgcacctgagataacagatacaagaaagtccacacagttctctgatgtatacagcttcggggtggtgttactcgagcttctaacagggaaatcacccgcgagtccgctatcactagacgaaaacatggacttggcgagctggataaggtcagtggtgtcgaaagagtggacaggagaagtattcgataatgagctaatgatgcaaatgggtatagaagaagagttggttgagatgttgcaaataggtttggcttgtgttgccttaaaacctcaagatcgacctcatataacacacattgtaaaattgatacaagacattccaacaaacttcaatctttaaagcaattcccagattttcaaaacataaaattcgatttcacattatatcataagctaaagttattcaatacagtaccatagagaaagtattcaaaaactagctaatgaaaaaagcataaaagaagattcggcgaatctaagaacacgcgtaaagatatgaagaagccaaaccagaggaagaccgattcgattgatttaggttgatgatgaaattggatggatcagacagggctaaggagctggaagagatgaggtttgggatcggagttcatgccgacgaagatgaccagagggatgaagccatagtgagtgacgactttagccttcttcaatgaccaattggtccattccttaacgacatcaaacttggatttgtcatcggaagaggaagctccctttgatcctttgccttttcctttgttgaccttcaacgatattgtagactccattgattccgatctcagagtttctctcgattgcggagattttgtttttgctcgaatccgaaaaccctaaaggacctttacaaaagttagcggtgaagtctctgaatgatatagagggttctaaccgaccttctatttttaaaagttaacatttttcctaattacaaatttggcaaatcttattgggtaaaagaagatagttttaaatgttacttttttttactgtggcataactcataagaatactcataagcttcgggtcaagcttacgattttgtctatgtacaaaggttatagtaaagccaatgtctaggtcttgagttaccactacttttttactttggtgaaagatacgaaagactgaatcaagttgagactgtatttggtgtccgagattatggttttgagttttgacaaacaaatcagttaaaatagtatactgtatacggcacataatagtgaaggcagataatgatttaatatcagaacatatggtcttcgtcgtcgtaagagaagataatcttcttaccgcagaattcggtcctctcgctcaacatctcatattccttctgtttcttcagaagactttctcgttcgtgcctggaataaaaaaaaaaaaaaaacccattgtaatctctccttgtataccacaaacttcacccaatgtgctattgacaacaatactcgaaaggcaaatagttaaatcccttaccaaagtttctctgcatggttgtacctaattaacaaagaaaataaaatagcattaatcttttgtaatgacacatcaaaactatagagataatttagagaaactaatctccatatggaaaaaacaatttacttgggtcggagagggtatggagctaactcaaccacgtcaagaaaaatctcacgactgcgcaaattttcaccattcatcttttgcagcgcctatagtacaaaatatttgattagttttcgtactttcgaaatacactactttcgaaatgactacaatacttttttatcattactataaactactctcaccttctgtgcttcgttaacagaagcaaactcaacaaagccacagcccacatgctcacccctgtggtttacaataagtcgaacacgaacaacttctgcaacatctttaaaaaacttgatgctgtaaaaatggatgaaaaaatatccgtcatgaaaaacttgctcaaagaacgaaagaggaaattaaaggttgctacttacatatgtgatattttagttctgggtgagagattggcaacaaagagcgtcttttttcttacggcaaattcctgtatttaacagccaactgtgttagcacgactctaaggagtaaatgacttcaatttgcatatcaacgaaaggtcgatttatccccaaaataagtcatctttctactttgtggcaacagttctgttattaaacgtttcctctgagcctgaagataataagaagaggtacctcaacaagagcgggagtgtcatcaagtccttcctctgtctcattttcttctatcagaaggctttctcgtcgaaggtagtcttcgtacctagcatatcaaatatgcattgtgatcactccatgtataccaagaacttcacccaatgtgctcttgctaataaactcaagatgcaaatagttaaatcacttaccaaaccttgtgatgtatgcaatacctaattaacaaaaataatagtgttagtattctatagactataatggcatcaaaactctaggaataagttacacccagagtcacataaacaaatctttataacatggaaatcaatttacttgggtggagggtatggaaccatcttagccacttcaagaaaaatcttgcaatcgttcaaatattcaccgtttttcgtttccaacgccttcagtatgaaagatttgatcagcaatcgtacttctcaaatgactacttatttttcatcactactgtaaaactaactctgaccatctttgcttcgttagcagaaccaaactctacaaaggcacagcccacatgcttgcctgtgtggtttagaataagccgaacatgaacaacttctccaacatctttgaagaaatttatgctgaaaaagtggagaagaaaatattagtcatgaaaaacttgctccaagaacgaaagaggaaattaaaggtgctacttacatatgcgttatttcagttttgcgtgagagatgggcaacaaagagcgtctttttccttacgccaactgcctgaatttaaagccaagtgtgttagcacgactcttaggagaaaaagactttaattgcataacaagaaaaagtagccacatctaaagattcatcattcatctccagaataagtcacatgtttcgtctttgtggcacatttctgtttattaaacgctaacatattttgaagatagtaagcacaagtacctcaacaaattcaggaggtgtctcatcttcatctatcggaaggctttctcgtcgaaggtagtcttcgtaactgaaatatcaaaaaccgtaagtgatctctccatgtatatcaaaaacttcacccaatgtgctcttgataacaaaacacaaggcagaaaatagttagatcccttaccaaagcttctctacaaggttgtacctaattaacaaaaataatatggttagtcttctgtaatggcatcaaaactctagcaataagttacaatcagtgttacagaaaaaaatctccaaaacatggatagtctatttacttgggtcctggagggtatggagctgtcttagccacatcaataaaaatcttatgatcgtgcaaatattcaccattcttgttctccagtgcctatcgtataaagatttaatcagctatcgtattttcaaataactatactctacttttcaaattacttttaatacaattttcatcattactacaaaactactctcaccttttttgtttcgtcagcagaagcaaactcaacaaagccataacccacatgcttaccttcatggtttaccataagtcgaatacttacaacttctccaacacaattgaagaaatcgaagctgtaaaagtggagggtagaatatcagtcatgaaaagacttgccccgagaacgaaagtggaaattaaaagtagtacttacatatctgatattttagtttgaggagaaagattggcaacaaagagtacttcctgaatttaacaaccaagtgtgttagcacgatttgtaaggagaaaaagattttcattgcataacaacaaaaagtagcctcatctgaagactcattcccaaataagtcatctttcgactttgtggcaacagttctgttattaagcatgacttattttgaaggtaataagaacaggtacctcaacagaattaggaggtctctcatcttcttctattggatggctttctagtctacggtagtctttgtccctggaatatcaaaaacccttgtgatctctccacgtataccaaaaacttcacctaatgtgctcaaaaggcaaatagtataatcccttaccaaaccttgtgatctatgcaatacctaattagcaaaaaaataatattggcgttagtctttactgtaatggcatcaaaactctagcaatgagttaaaaccagtgttacataaatcaatttacttgggtggaaggtatgtagctttcttattagccacatcaagaaaaatcttattattgtctaaacattcaccgttcttcttttgcagcgcctacaacaaaaaagatttaatcagcaatcctactttcaaataactactcgtacaatttttcatcattactataaaaaaccctcacctcctctgcttcattaacagaagcaaactcaacaaagccacaacccacaagcttacccttgaggtttacaataagttgaacacgaacaacttctccaacctttttgaagaaatcgatgctgcaaaagtagatgattagtcatgaaaaactggatccgagaacagaggaaattaaaggtactacttacatatttggtattttagtttcataagggagattggcaacaaagagcgtcttctctcttactgcagcttcctgattattaacaggcaagtcttaaattgcataacaaaccgaaaaaaagtagcttaattgaacataaaacttgtacaatacatgtaacaaacagtccaacattataatgatcaaaaattaaaccttgactgagattaaattagcctgatcagactttgtcaccaacaagtcgttctgctggagactaaaagcaatagctttcgttgtcacctgttgttacatgagtagccgcaattagaaaaaggcagagtaaagaaaattggtctgaaagaagaagaggaatccgaacatatgaggtttaccttcttcttgtttattttcttatgtctcttgagaattgggttggcctccaaaccatattgcgggttacgcttacctaaaggaagagtagcaaaaacttcttagaaccaagtaagttggtataaaacaacattagataagagatcataaaccaccaaaaaaacaaaccctgggagttagatttgaccatcacggagaagatgaaagcaggaggtttaaaggggtttatgtcttctttccgggaagagtccgttgagcgcaagcaatacgttgtaaagtaaataaccctaagctacgttttatttatagaaaacaatcaaaggaaatgttttggtttgggctgggctgggctttcattgtacctgcttaagaggcccaaggcccaacatgcttcttctttttcgtctacctccaaatcagcccagtgtgtttgttctggaattcataattcatagtttccgattaaaaagcaagagaccaggtacaatctcaacctgtggattgcatgataaagatgattttaatcggaaaccgtaacgattcaaaattgaaacaaaagtattcattgaggatatcaaaattcgataacctaacgcatgtgtctcgaattagagaaatcaaatagtgttttctgggcaaaatcaaaaccaatcgacacaaatcgatcttttgcgaaaaaaatactaaaaagaaaggcaaacccgtgtaaacttcatcttaatctcatgagtaagagtttccagataagcatatctccgtgatgaaactttctccattccattaccaccactgattgaagatgcgatcaccggaaaacaacccaaaaagcaaacaccgtctccatctatcggtaaggagaattcgagagattgatcacagagtaagacgagagactctttcgattaatgctctcattgttctcatctgagaattcccatggccacggcaaattgtggtagcggcggaggagaaacggtgagagcttgttgcgcatctcaaaaagaatgaatacataaaccgaactataccgacccaaattgaaatatagaaactgatataaaccgaactataccgagccaaattggaatttttgaaattggaataaaactgaaccgagccaaatagtctcgcactctcaccaaacccagttatcttattaaattttcaccaaatccagtttatcttaatgcatatcctatcttttcattagtccataactaattcgttgattattgttcattagatatttgcagtaatacaaatcccactatgacaacatgatgactcgcataatatgacattcaactattgtgagattacaaaatttaaagatattttacttcttttttttccaaaataaaatttacattctattgataaaatgtaattagtatggataaattagaatcataaaacattagtttgagatagagatttaaaataatcatgtcacaaaaactagataaaatttcattaattatgattggttatctggtttcattttttattttttacaaaaatataatcagccgttcatatctctacacttggctatagaaatagagaaatatcaaatatgtaccaaagaggacaattttacaattgaaaattcatcgtgattcagaatcatttggaatctaagtggggtcaaatcaaatatagcccaccctttataatttcttaaaaaaattagatagtattttaaaattataatgtttacagatatttcttaagcagccattattactaaaataaatcatagtttatccaattaaattattcgcttccgtttcttaaagcataaaaaccaaaactttctctttcgttttgctttcttccaatcatctgcaggagtgaatcgcaaaaccaaatttggaggattctttctgaggtatcaaagctttctccttttgattaacccacacgagaaaaagctctcttcttttgtaggaattcaaaaagctcgtctcttcttgttcgattcaatcagattagaaaaagtttctggatttgagctggattgatctaggtttaacttggattactttttgtaggggtttctcagtgagaaaatggcttcgaaacggatcttgaaggagctgaaggatctccagaaagaccctccaacctcctgcagtgcaggttcacttcaaaaatctcaaatctttctccttcttgttggatccattactttatctatgattatctggtaatatgccagagatttagcattctagagatcacaaaggtgaaagttacttttcagactgatcagagttgagaaatgtagaatccttctttgcgttgtggtgttgtctacttatgttttggcttatgtttatcttaagattttatgatgaatttcagtttattagtttctacttttctctaattattagactaatcagagttagaagagttgagaaatgtagaatactagaatccttctttggtttgtggtgttttttttgcttatgttttagtttttgcaggtccagttgctgaagacatgtttcattggcaagctacaattatgggtcctgcagagagtccgtattcaggcggtgtgtttctcgttaccattcacttccctccggactatccattcaaaccaccaaaggtattcaatattggaacaactcttagattaccacgaactttaggtttagtagagttccttgaaattcttggacctaattaaaacttgtatttgcccccaaatcaaatcaatttcttggcttaatcttgacacttttattggttgttttgtttttatttgcaggttgcatttaggacgaaggtgtttcaccctaatatcaacagcaacggaagcatttgccttgacattttgaaagaacaatggagccctgccctcaccatttccaaggtgactctcatttttcagaaacatcggttctccaatgttcgtttatgttccaaaagtatagcaagagcatctacattttcagctaggattttgctcaatgcacaagctttgcttcttgaatgtttgtgtatgtagtaagatcatcatctctagtttttagctgttttaatggaaatgtttatgcaattggtaggtgttgctctcgatatgttcgctgttaacagatccaaatccagatgaccctttggtaccagagattgcacacatgtacaaaaccgacagagccaaatacgaggctactgcaagaaactggactcagaagtatgccatgggctaaacaaagattcgtatgcttcagcacctgtttatgttttcatgtctgtttctttcttcttcttgttttaactttaataaaaatgtctaaaatatcaactttttcgtctgtactatatatgtttatgggttttattatcatcatctttatctgaaatttgaagatggaattctaaagcttgaaggttatttgttaaagtttatttactagtgagtgatgagaaacattgtgttgttgttcatttcattttttctttgtcaggaatattcattgacttgttttctttcccaatattttattttaccacaaatatgtagcttataatcactatctcgtagacacaccgtcgttaactacgagaaaaaaaagaacagaccattttaccaaactgttgtcttttgccgacgaagtcaccgaagccggcggcggaagaaaaggtaaaattacaaaaactctcttctgcaaagtgaccatttttcacagtgctaagtacaaatttgtagtctttaacctcactcacagttcatatatgtcgcattttgcatcaacaacaaaaaaaaacctaatctttagggtttatttctatttgaaggttttgtggtgttcatggatacaagaaagattccgttgttctgctattggaatggttgtattaaagatggtcctgatggtccgttctatgaagggtcaagtccaagagggatcagagttgatagcaaaatcgaactatccaatttgttggatgatctgcatcgacttactggttttgaaaagggaaagtttcagattgatttgattggtaggtacccttccattgttcaacaacagatggtcaagtatgtgcgtttgcccattgtggacgattgtagtttggagatgatgcttgaggtaccatgctaccatccatctatcaacagtctggaggtgtatttagagatcaaaccgttttctgatgaagttactgtttctatatctcatcagtccccattggaaagtaatgtgccccgaaagcgttatcggcaagaggatgctagtagtgtcaatgcagatgtaaatgtgagtgggagaaatactaaactaggaagtcctccggaggataaccataatggttggattgaagatgaggagagtacggatgtcggaaactctggtgataatggggtcgcacagaaggattcgaaaatgaaaaagccaactctaacggaaggcgtcagtgatagtgtctcgaagcagttgattttctctagttcatggctcgatgaaagtgagttgcatgttgggatgatttttagaggtaaagatgagctggcgaaagcagtgaagttgtactctaatagaaggcaacgtgaatacaatgtattcgaaatccccattacgggtacctttcaatcagggtgcaagaactactgtagatggtttctcaaggcagctaaaacgaatggaaatggcttcaagataacagaatacacaggtccacatgcttgtaagccagcagatgtgggctcagatttcctggcaggtgaaattgaatgtctagtaaaggttcagccctcgctctcaattgtagagctgaacaattgggtgaaagaagcatttggctacacagtctcgtatgctaatatgtggaaggctaaaaaggaagcgatctctgcaatcttgggagatttggacaagagttttagcgtattgcccaagttcatggctgcccttggctcatctaacaagatgcttttggaatggcaatatgatctttttcctgatcccaaaaatgcatcctttcgttctgtgttttgggcgtttcagcagtcagttgaagggtttcctcactgcagacctctcattttagtagatacagtagacttgagtggtaaataccctggaaaattgttggttgcagcgggattagatgccgaaaacagccttttcccacttgcgtttgccattactacccaagaagatttgtcagctgatacttggcgttggttcttttcgtgcatcagaaagaaagtaacgcagagggaaggcatttgtctaattctgtcttaggcaacttgtatcttgctaatctttgatcacctggcagagcttttcaaactgcgacatggtcttctccaggaatcaatgaaaaacagaagagaggtctatgctaaacatgtcatgacaaagcttgaagagtctataacacacgatgtcctgccattagaccagtctggacagaggtttcaggtcacggaagtgatgcaagttggaaacatgaaattctttgttcatcgcagcgatcgggcttgcacatgtgggatatggcaactttacagatatccgtgttcgcacgtgatagcggttttcaggaggctgaacattgatcacttgcagtatgtaaataaattctacaacacagagagttttcttggagtttacgctgctgattttaatccgcttccgggagtctccgttggcaagaagctttcgcagttccaaaaatgttccctcctcgaagtcgtatgatacattagttgcccggccagtgacaacagagcccaccgcacaacggctcgtgaaaaaagagccaccgcacaacggctctgcttataactagtaagttttaggggctaattcgaatttatgagaagcggcaaaagaagttggtggatgttaaaccggatacaaacggttcttggttatagggtgtactaaaccggtttttctccacaatcatctttgatatttcatttaagtactgtttttctttccccaaaattctaaaatctaaatgattacacttcaatcttttacaaaaaataatattgtaaaactaaactttactgatcacaaaatcctagtatacacaaattcatcaataaaacaccgaaaatattcaaatctatttttaccatatcataaatagcatacaataaaggttaatttcaatacatcccactcgaacaatatacgttgttcttccatcgcacttaggatcaacacaaagcaaaatcccatgacttgggtcacaaacttcgatctttaccttcgctaacggtaataaatcgagcgagactttagacttatgatgactgttctcagaactgaggacataagtagaataaaaagttgaatgagatccttgatattggagaaaaactccaaagatagaattggttctaaagagattcaggttcataagattctgacattcgtttatagtaatctttgtttagaaatctgaatttttcaattgccggacagtaagataaaatttctaagattatgtcttggttggttcattgcaggacaactcattttgatgtagagaagtttagtaaactcacgtatttatattgaaatggatggaattgtttaagacttatatttgtttgagctggtgtagttttaacaaatgtgttatttaaattgtctcttggtccacgtttttttttttttgagaaagcatattagaagaaaattgtttattgaaaatttgttaccatctctagaattgctttcttttggtgcaataagaaaatctttttacactgattacatgcaattttccttatttgtgatagttttaataaggtctatcagactatcatcagatattcattaaataagtactttatataataatattgagaagcaaattaaaattcaacctttgttttgtgaaaactatacatacaatattcatttgttattggattagtctattttaaatagatttatctgttaaaagatatatttatatctctcactctttcctaaatttcaaatcaattctgcggaactttcttcttatgcaaataataatttgttgatgacaaaggagactttgggtacatgatttcgttcttgttgggattgaagaaccgttatggaaaaccggagagatgataaggctaagatatagaaaaaaaatattgttaatattgaagtttagaatatttagcattatctctaaatatgttatttacatttatatttatcttagattagaaaatcagattaatttcatctctatataaaaaaaaatgttataactttgggaaatttgaaaaactaacccacaaaaaaactataattaagaaagtaacattaccaaaaaaatgagatgatattctttgtattttatatattaatcccaactttaccctctttccttctctctctttctctctttccttctctctttccttctctctctccttctctctctctctcgcctgtctccctacttcttttttttctctctctttctctccctctctctctccttctctctctccttctctctctctccttctctctctcctctccgcctttctccttacttctttttttctttctctccaaatgacctctatgcttatttttgtttttagttacagtttattaattacctttttgtgagatttatttagattctaagctttgtttttttttttgtcttttttgaaacataattttaacatcaaaatgcatctatggtctgaaactaatttatcacttaatttttttgttcttcatagttacaaactcaccacatatctacaataaattaaggatcattattaaatgttaataaattagggatcattcttagatctagaagcgatgaagggtttacgatggtagaaattctaaaaggaaatagccaataaatcgattttgattttgaaagacttttgacagatactattctattttgtgaatatactatttacgtataccttgtattatatacgttttaaaatgaattgtttgttttgattaaggatgttaagtgatttgattagtgttttatattaaaagctttgggttccctatatattatcttagggtttagtattcttccatcaaaaagtatttaattgattatttggattcatcagaacaaacgtttctatttgaacaaatatatactattctatttttctgtgatgatatgtatagaacttggtactactattcactttttaaaaaatttgtttccgatttttaaaattcaaatcatgtgagataaacaaaaaaaaatctgtttttttaatagtattattagttttaaccaaataataattttaaacttacatagcaaacaaaattgaatgggataaatatattttggtcacttttttggttgctccacgggctaccatctcttccttgacaagttgaaggagtttgtggtctttttaacacacacatgtgttacttactatattatacagtttatggtgctatattctttatttcatcttccaaataggttattcttgcaattcaccctataactttttcctgtttgagatttctaaaaaaaaataaatctacaagtgtacaacaataaatcactttttctttctattttttgatgttttggttttaatttcatttttttcttttctttggacgacaaatcaatccgtttaattaaacttagagcacctccattggtgtatcttagatgtatcttaggttaatatcttagaattaaattttgaaaaataaatcaaaacaaattaaaaactaagatttgcttcttaattaagagggttttatgaatgaaaaaagcaaccacatgtcatgtttcaaaattttagtttaaataattgttaagatacaaattaagaaccaattggtatcaattattcttaaccaatggggattaattattaattgttcttaaccaaaatcttaggctaagatttgtgaaaaaagagctcttatataagagcttttaggcttatatttaagctttttcttcacaaatcttagcttaagatttggttaagataccaccgataatggtggtcttaggtttctaatagcagtaagttttcatcaatgagttcttttagatgtatttggttttggtttttgttgtagaatctttttttttaaacttgaataaaaatgtgcttagttaaacttaaacttaaaccacaataatatatcttttagagagttggggatatgaaaaaaagagagctaaataacaatatgataacaataacaaatacttgcataagaatcatcttcaattctcttcatgatattccttcttctcctctatatagtcccatctcttcttccttcctcgctcctatcttttccttcaacgtcatctttattcaaacaaactctctcgtagattatagacaccatccctacccactcttgcccatgtatcagaaaccctaatgatcttataccgaaacgggttcgacgaaatcaccattaaaccggttgcgacagtgccaaacctggtctttgggtttggtatgatccggtactgttttgtagccggtttgcagacgatgtaatctggtatcttttgcctacctttaaacacaacatcgacacagagcaaaatcccatgatgtgtatcacaagcttcgatggatacattacaaaggggaggaagaaaggcaagattgattcggtttttatctttctcatcgacgccggagacaaaacatgagtgattcctaaaccacttgttatctttgtaataaaatatatagccgaggaaagagttggttctatggagatgacgattgataaaactcatctcataacttcgtttgttgcattctttgcttagtagacggaattttgccatctccgttgcaggacaataagacatgatctctagcaacacatcgtaatccaacggagaattcatcatcatcgccagagaaaagtgaaagagaggattatttcggttcgttcggattaaagaaaaaaaaagagcttatagtatctgaaaaattgatgactattcccttacttatagaaaaatagtcaactaatttgccaaggaaaaggaaacagcagttttaatggtcttcttctagttttggtttttgttaatgtatatcttttttgacaaaaaaattgaatgataatgtgcatagattttcggttataattttactttttatctagagtaagcaaaatgaatatctaaacattaattaaaaactgattatcttttaattaaaattaaaaatcatgaaatatttataggtatctgatcatttttgttttttgaaattctgatgcacatatatcaaattttgatttattattatttaattttacaacaattaacagtatagattggtgaaattttatagtattccgttagtaaatggaaaagaaaagtctataataaaaaaggaaatttttaagggaaaacatccaaataataggttttttacattttcttaaaaaaattgctactaaaatcaaagactagagaaacctttaaaaaaaatgatgaatggataatgatgacttttcaaaaactatcctaaaaactacaaacattcagtgctgtaaatattttaaagaagcaaaataaaatagaataaatgaattttaatctcttgcaaaaagctgatacatttctgtctttgtacaaaaataaacttttacaatccgaactccaaaaaattactcagaagctacaaaaaagaaacaagaacaaataaaccatactcttgaagaaaaaatcccaagagaagcttctaaaattaaccacaaaaatgtatgcaaagatctctacctcattgtttttttttaggtgttttttttcatgtctgaaactatgaactctgctttgaatactgaccaaaagctaagcactctgttttttcatggatc

SEQ ID NO: 810 - DNA, 13776 bp, Arabidopsis thaliana
ttcttcttcttgtctggtttttgatgaaaagctaagtaagctcagagtctgaagcatgaccagtctgttgtctacgtattccaggggttaaaggactcattggactcaaaggcaatcgattatccttccttgctttaatgcttcttccaaatggactcagtggtgatacttttggcgatgatcttgcttttaccgttgaagttcctgccgatctcaacttttctgaacctgcattgataatatattaacataaagatagttgtctttttgatgatctatcaactcaaactctgtcaatgtagagataatggtgaagaaactaacctaagcttggacttcttctgagctttgccatttcgccgcttttctttagagctgagacctttttcatgggagcttccgagtagactgatcttgtatctgagtattcagatattgtatcaagacacaatgactttgtatctcttgtaatcatggcattaggtggatcttcaaccactgaaacgctttcagattcactagtctctgagctttcttttgagtttggattcatcttctctttttccaaaacccggtatgagtatagttggaacggtatttgattcactgacgcggtgtgagaccctgcatcacctggaaactttctcaagaaccttgcttctaagtcccaacaatcaacaagtggagtttgcatttgaggatgaccatgatctggattcacaactaggaacttcttgatgtagcgtagtatccgacatatcgaagagaagttaggacgctgactcggttctgagtgccaacatcgtttgatcagactaacgaggtattttggtgaagggaaagggaaaagaggtctctctcccattctaatattgatagtcattggttcaccttgaagatgactatcttcaaatggaactttacctgttataagctcaaaacacaccattgcaaagctatacacatcagctttatgcgtcaacttagatttcggagttttaccattcaggtcttgttccatctctgctagaacttcaggtgcataccatattacaggatcaggagtgcctggtttcgaggaagactgcgctttaacgactgaagataaaccgaatccacaaatcttcgcatggaagtaaccttcggtgtgactcctctctttcagatgaatgttcattgggtttaaatctccatggaagatatcatttccatgaagatactccatcccccttgcaatttgcaacatgatatcaatcaccacagggatcgagaacaaatatcttcttcttggtccacaattctccttcatgtagctctgcaaatctttgtgcatcaactccataaccaaaaaacattctttcctttcttcatcatagaatccacaaaggtactgaagtatattcgaatgacaaagcgctaaaagagacgagatttcagaacttagcggctcaagatcgctgaaaaagtgccttagtgcaaaactatcacctaaccattgaatctccttgtattgtccatctgcatctaaccgtttcttcacctggtaatcctttgaaccaagaagtatcgaactaggaaacagtttaccgttaaactgctccaaaccggttaacttcttcaacagcaaatcagctaaacgcttctcggttttaccaatatcatcgctatccgatttcctcttctcttgcaatgcctccactagattccatctatcttctctccaagaatgctcaaaccggctgcaaatatctctcgagagcaaatactgtttcccaaacctccattgaaacatcttaggatcattccactctctatcatactttcttgaaaacacaactctccttctctccatctcagaagggtcaagacccgaaatctcaccagcagcctcgatggcttcaacaaccgcagagaaataacagaacaagttgtgtatatgaaactcaacacaatctttgttctgatgaagattgattactttaccccaccaatcactattatccatacaatgcttaacatataactctccttctttaaaaactctataaagctcccttaaaggttgttcaagagctctccatttagtatgcttctcttcaagctttagattctgtctgatctcttctgcgaccgtgttgaaagctaagctgaagagttctaacaacaaacaacattgtctttggttgatcaagatatcatcttgtaataccattagtgcatttagacttccaagaacttctccgatttgtctgaattgctccatcagtgtttaaaaaatccttaaatctctttctttcaataaaaccaacgcaaataattgttccacaagacttgagatttatgaatgctggaaaacaaaaacaatcaaaatgagaccaaagaacattaagatgtatatagatcaagaagaagcaacattagggttttgaggtcaaacctgaaatgaagatcctttatgatttaaggatcgatgaatcgagcatacaaaagcatatcatacccgaagcaaaacagagcaaatctcctaaacactatctcaaattgaaaaacttaataaaaagaaaatcaaccgttgaaaaattggttatgtagaatgtctctcaccgatcaatacaagagattcaaaagagaaattgaaagcagcagaggaattcagaagaagaaaacaaaacaaaacagagttgtctattttcccctgtttttgtcttcttcttggttgctaagaaaatctctaatatttgtttgtttctttttgtaaaatgttgattttggttttggtgtattttgatcgttgaaaacatgtccgagttacttggagtcccatatatgatgtgtactgttcccgcgactttcgttgtatattacattttttaatagtatttgtttatttaaccatatagtatttatgttatggccttcacgttgtcaaaatatccacgtatctggagatttcctcagcactaattattaaatgtgtaataaggtgggatgatcaaaattttagtgacgcgtcaagataaattactgctttgaacgaatttgttgcgaactttctttttgtcaaaaaggtccaaaaaagttgaataacctaaccaaccagtaaacggaaaacgagttctcaggctcggcccgtttataaagttacgagctcaatttcagttgtcaaattcgttatttctgtgataacttctcttttagtgtagtagcagtaaagactatgaaacagaagctgttaaggtcttgaaaaataagcaacacgctaattaaactccataattcaaaagatggctttaacaaacaacaacaaaaagaaattggcagggataaacctaaattaaacatccaacatcatcattaccaaaagcagagtttagtttcttgttgaataagtcaaatatcaaatttcaacgtttgcaaactttgcaaagaaagtttggttcttgatgttcacatggtcatttcgatataattgttattggatttaaaagaaagtaaagtacaaaaatgtggttgagaacagaatccccacataattcgtcgtcttcttccaacttgagtatgctactttcaactctgacctcatttcactggaaaatgacaatctgtacgaaactagcctttggtcctcgacgactataacgaaacacagagtcgtccaaacttttcttcgaaatttctcttctccttttacgcgtttttgcttcaataaataaaccgaaggatcggagcttgcttttccaatcatgctttcttcaatatcattctaaaaatactttcttcacgtgcaagcatttgtgatctctcatggcttcttcttcttcttcatcttcttcgtctcacataaggagacaccatgtcttttcgcgcttccacggtccagatgtccgtaaagggtttctcagtcatttacacagtctctttgcaagcaaaggtatcacgactttcaatgatcagaatatcgagagaggccagacgatcggacctgagctcatacaagggattaaagaagctagagtctcgatcgttgtgctctcgaagaattacgcttcttccagctggtgtttagatgaacttgtggaaatcttgaagtgcaaagaagctttggggcagattgtgatgacggtttttttttaagttgatccgtcagatgttaagaaacagagtggagtgttcgggaaagcttttgagaagacttgtcaagggaaaaatgaggaggtgaagatccgatggagaaatgctttggcacatgtcgctaccattgctggggaacactctcttaattggtatgtctcgatgaattttaatgctttttatttttctcaagctatttgtttttgtaaatttagaccaaccaaatctatttggttttgcttttgttagggataatgaagcaaagatgatccaaaagattgctacagatgtttcagacaaactgaatctcacaccgtcgagggattttgaggggatggtagggatggaagctcacttgaaaagattgaactctttgttatgcctggaaagtgatgaagtcaagatgattggaatttggggtccagcgggaattggtaagactaccattgctagagctttattcgacgacagactctctagcagttttcaacataaatgttttatggggaacctcaagggaagtattaagggtgttgctgaccatgattccaagttgaggttgcaaaagcaacttctgtctaagatttttaaggaagagaatatgaagatacatcatttaggcgcaatacgagaaaggctacacgatcaaagagtgctcatcattcttgacgatgtagatgatctaaagcaattagaggtattggctaaagaaatctcttggtttggttctggaagccgaatcatcggtaccacagaagataagaagattttgaaggcacatgggattcacaatatctaccgtgtggattttccatcgaagaaagacgctcttgagatcttatgtctctctgcattcaaacaaagctctataccagatggttttgaagagcttgccaataaagtagctaagctttgcagcaaccttccattaggcctttgtgtcgtgggtgcatctttgcgtggggagggcaatcaagagtgggaacgtctattatctaggatcgaatctagtcttgatagggatatcgatgacatattacgaatcggatatgacagattgttgacgaatgataaatctctattccttcacattgcatgcttcttcaactatgcaaaggttgataatgtgacagccttgttagctgacagtaacttggatgttggaaatggtttcaataccctagccgatagatctctcgtgcgtatatctacctatgatgatgggatatctgtgctttctgatagtaacttggatgttggaaatagttttaagaccctagcagataaatttctcatgcatacttccctacggccgaatagagatgcaccatctactacaacaattgggtagacagatagttcttgaacagtctaaggagcccgggaaacgtgaatttataattgagccagaagagattcgtgatgtactgacaaatgaaacagtaagtttaagttcttacatatataattctagatattgcctattttagtgataaaaatttcatcagtcttctttggaaatatattgtagggtactggatcagtcattggtatatcatttgatacatccaatatcggagaggtttctgtaagtaaggatgcttttgaaggaatgcgaaatctccgtttcctaagaatctataggttgttaggtggtgaagttactttgcaaataccagaagatatggattatatacctcgtcttaggttactatattgggatcgctatccaagaaaaagtcttcctcggagattcaagccggaacgtctcgtggaactccatatgccacgcagcaatctcgagctgctctggggaggaatcgaggttggtatttggttattctttcttgtgcttctaatgattcaaactaaagaagatatttctcatttgttgtgtttaacatgcagccccttcctaatctcaagatcataaatctgaaccgatcctataggttgaaagaaatcccaaatctttcgaaagccactaatctcgagagattgacacttgagagctgcttaagtttggtggagcttccctcttctatttctaatctacacaaactggagattctagatgttaaattctgctctatgctacaagttattcccaccaacatcaacttagcatctcttgagagactcgacgtgagtggttgctcacgattgagaacttttccagatatctccagtaacatcaagacactcattttcggaaatataaagatagaagatgtccctccatcagttggatgttggtctcgtcttgatcaacttcacattagcagccgaagcctcaagagattgatgcatgtaccaccatgtataactttgctatctctgagaggtagtggtatagagaggattacagattgcgtcataggtctcactcgtctacattggctgaatgtcgatagctgcagaaaactcaagtcaattctgggtctcccctcctccctcaaggtcctagatgcaaatgattgtgtatcactcaagagagtacgcttctctttccataacccaatgcacacactcgatttcaacaactgtttgaaactggatgaagaagcaaaaagaggaatcatacaacgatcagtgtccaggtacatatgcttaccatgtaaaaagatccctgaagagttcactcacaaagcaacaggcaaatccataaccatccctctggcacctggtactctctctgcttcctcaaggtttaaggcttccattctcattttgccagttgagagctacgaaactgaaggtataagttgtagtataagaaccaaaggaggtgttgaagttcattgctgcgagcttccatatcactttttgcgtgttcggtcagaacacctgtttatatttcatggtgacttgtttccccaaggaaacaaataccatgaagtggatgtgactatgagcgagattacatttgagttcagccacactaaaatcggtgacaagattattgagtgtggtgtacagatcatgacagagggagctgagggtgacagtagcagggaattggaagttttgaaactgagagtagcagcagcccagttgggagatttgttgggaaatttgaatttggaggcaacaacaatcaccacacagatggaaatggagatggaaactatgaagcagaaggttccaagttctctcaagatgaaaacatcaaaaccagcaaacgttggttttatgagttggcttcggaagcttggtcagtgaagaagatgaattctcatggagtctcatgaagaccaaaccagtttttggcactttcttagctccttaatcatcttcataaggtactctctcttaaataacagatggagatggagaatatgagcctgaagctgttaagctctgtaaatgtagatgaaaacatccttggttgttggatttagtttgggaagtttaagggtagacgaagaagtacaaaacatgcaacttaggtcgtaggtcttcccattaaccagcataagtatttggcatacactagagaccagtttccttaatttctgttgttgatgtgttgtgtggattgctgtagaagatatattgctctgttctttagtcgtcgcgaattctttgggaacaatcttaagagatggatttatctgagtttgcagagtgatgttagaattgattctggttagaatgtagattgccttagccatagaacgtaaacgttagaagcttatgtgaatcaagctatcaacgcttaacattatattctttctgtttcaggtaggagattgggaatttcgacgcagcacctgattctccagtgatcaaatctaagtccacacaaagagaccatattgtccaatcagttccagatacttggtgcattgccttctgttgtgagcataaaacggcaaaccctatgaaagaaggttgatagcattagagaaaacagagcattgcagctcacacagtccacccatgaactgatgatttttccggattgattgcatcttagaatcataatcctgtttccattggccttaattagctgtttaagtactaagaaaagtcttgttaccttgtgatctagttaattagctgtttaaatactaagaaaaatcttgttaccttgtgaattacttaagaatcataatcttacattagtgagttactttatacagtctacaattggccttgaacttacattcagggagtgatatggcggctgagactggtctataaaagctgctcctggttcaagcctcctaaaatggtcatttgaatgaatcttgtattattgattcgtgtttttactttctactttttagtaattactttttgccagattgattgatcttataatcataacaattgtaactctgtaataactttcttcaacatctcttttactatgaaaccaagaatagtagcagcaaccaaccaaaccaataataaacatcaaatctttaagaaataatattcggattacccaaataatcaaaccttaaggatggggtctcaacgacttttgggggaaacattttgtttttgtatttttctctacagtgacaaattcctttgaaatttcagttccgtatatagcttatccaaaacatcaaattaagcatcgtgatccataattagaagcttgtcattcccaaaagcagaatttagtttcttgtcgaataggtaaatatcaaatttcaacgtttgcaaagaaagtttggttcttcattcttgatgttcaaatggtcaattcgatattattgttaattaacttaatacaaatattctccttttcaaaccaaatattcaataataatatgtacgaaaatagtcattggtcctcgacgactataacaaaacacagagtcgtcgaaatttctcttctccttttcgtattttttcagttccagttacattccaatttcttcgaaacttctcttctcattttacgcgtttttgcttcaataaataatccaaaggatcggagcttgcttttcaaatcatactttcttcaataccagtctaagaatactttcttcaagttcaagcatttgtgatctctcatggctttgtcttcttctttgtcttgcatcaagagataccaagtcttttcgagcttccacggtccagatgtccgtaaagggtttctcagtcatttacacagtgtctttgcaagcaaaggtatcacgactttcaatgatcagaagatcgacagaggccagacgatcggacctgagctcatacaagggattagagaagctagagtctcgatcgttgtgctctcgaagaagtacgcttcttccagctggtgtttagatgaacttgtggaaatcttgaagtgcaaagaagctttggggcagattgtgatgactgttttttacgaagttgatccgtcagatgttaagaaacagagtggagtgttcggggaagcttttgagaagacttgtcaagggaaaaatgaggaggtgaagatccgatggagaaatgctttggcacatgtcgctaccattgctggggaacactctcttaattggtatgtctcaatgaatttagtgctttttatttttctcaagcaatttgttttcgtaaatttagaccaaccagatctatttggttttgcttttgttagggataatgaagcaaagatgatccaaaagattgttacagatgtttcagacaaactgaatctcacaccgtcgagggattttgaggggatggtagggatggaagctcacttgaaaagattgaactctttgttatgcctggaaagtgatgaagtcaagatgattggaatttggggtcctgcagggattggtaagactaccattgctagaactttattcaacaaaatctctagtatttttccgtttaaatgttttatggagaacctcaagggaagtattaagggtggtgctgaacattattccaagttgagcttgcaaaagcaacttctgtctgagattttgaagcaagagaatatgaagatacatcatttaggcacaatcaaacaatggctacacgatcaaaaagtgctcatcattcttgacgatgtagatgatcttgagcaattagaggtattggctgaagatccttcttggtttggttctggcagtcggatcatcgttaccacagaagataagaatattttgaaggcacataggattcaggatatctaccatgtggattttccatccgaggaagaagctcttgagatcttatgtctctctgcattcaaacaaagctctataccagatggttttgaagagcttgccaataaagtagctgagctttgcggcaatcttccattaggcctttgtgtcgtgggtgcatctttgcgtcggaagagcaagaacgagtgggaacgtctattatctaggatcgaatctagtcttgataaaaatattgataacatattaagaatcggatatgacagattgtcaacggaagatcaatctctattccttcacattgcatgcttcttcaacaatgaaaaggttgattatttgacagccttgctagctgacagaaagttggatgttgtaaatggtttcaatatcctagccgatagatctctcgtgcgtatatctaccgatgggcatgtagtgatgcaccactatctactacaaaaattgggtagacggatagttcatgaacagtggcctaacgagcccgggaaacgtcaatttttaattgaggcagaagagattcgtgatgtactaacaaaaggaacagtaagtttaagttcgtacatatataattctagatattgcctatttttagtgataacaatctcatcagtcttctttgggaatattttgtagggtactgaatctgtcaaaggtatatcatttgatacatccaatatcgaagaggtttcggtaggtaagggggcttttgaaggaatgcgtaatctccaattcctaagaatctatagagactctttcaatagtgaaggtactttgcaaataccagaagatatggagtatatacctcctgttaggttactacattggcaaaattacccaagaaaaagtcttcctcagagattcaacccggaacatctcgtcaaaattcgtatgccaagcagcaagctcaagaagctctggggaggaatccaggttggtatttggttattctttcttgtgcttctaatgattcaatttaaataaatatgatattttctcatttgttgtgtttaacatgcagccccttcctaatctcaagagcatagatatgagtttttcctatagtttgaaagaaatcccaaatctttcgaaagccactaatctcgagatattgagtcttgagttctgcaaaagtttggtggagcttcccttttctattttgaatctacacaaactggagattctgaatgttgaaaactgctctatgctaaaagttattcccaccaacatcaacttagcatctcttgagagactcgacatgactggttgctcggaattgagaacttttccagatatctccagcaacatcaagaaactcaatctcggagatacaatgatagaagatgtccctccatcagttggatgttggtctcgtcttgatcacctttacattggcagcagaagcctcaagagattgcatgtaccaccatgtataacttcgctagttctttggaaaagtaatatagagagtattccagaaagcatcataggtctcactcgtctagattggctgaatgtcaatagctgcagaaaactcaagtcaattctgggtctcccctcctccctccaggacctagatgcaaatgattgtgtatcactcaagagagtatgcttctctttccataacccaatcagggcactcagtttcaacaactgtttgaatctggatgaagaagcaagaaaaggaatcatacaacaatcagtgtacagatacatatgcttaccaggtaaaaagatccctgaagagttcactcacaaagcaacagggagatccataaccatccctctgtcccctggtactctctctgcttcctcaaggtttaaggcttccattctcattttgccagttgagagctacgaaactgatgatataagttgtagtttaagaaccaaaggaggtgttgaagttcattgctgcgagcttccatatcactttttgttgcgttctcggtcagaacacctgtttatatttcatggtgacttgtttccccaaggaaacaaataccatgaagtggatgtgactatgagcgagattacatttgagttcagccacactaaaatcggtgacaagattattgagtgtggtgtacagatcatgacagagggagctgagggtgacagtagcagggaattggacagctttgaaactgagagtagcagcagccaagtggacaactttgaaactggaggcaacaacaatcaccacaccgatggaaatggagatggaaactatcaagcagaaggtttcaagttctttcaagatgaaaacatcaaaaccagtaaacatactggttttaggagttggcttcgggagcttggtcttaaagtgaagaagatgaattctcatggagtctcatgaagaccaaaccagtttttggcactttcttagctccttaatcatcttcataaggtactctctcttaaataacagatggagatggagaatatgagcctgaagctgttaagctctgtaaatgtagatgaaaacatccttggttgttggatttagtttgggaagtttaagggtagacgaagaagtacaaaacatgcaacttaggtcgtaggatacttatgattagggatactttttcgcttgagtatatctgtaatgtattaaaaattagttatgcatttgatcggtaaagcttaatgattactgattctggacattagccattagtgaaatcgagtttattcccgtcatttgtaaacttgttattgctttaggtcttcccattaacgagcataagtatttggcatacactagagaccagtttccttactctctgttgttgatttggttgttgatgtgttgtatggattgctgtagaagatatattgctttgttctttagtcgttgcgattctttggggtcaatcttaagagatggttttatctgagtctgcagagtgatgttagaattgattctggttagaatgtagattgccttagccatctaacgtaagcgttagaagcttatgtgaatcaatctatcaacgcttaacattatattctttctgtttaacgtaagggaacattaatgccatagagactgcaaaggcagaaaaaacagaggaaatcgatatagtgctttggcaggggagaaacgacgtctatagaccctgtttctctactaaggagacgtggcatcatatttgaaacagatcaaataaagttgcatggcacaaagctgtttggttcccttatgcgactccaaaattctcgttttgtgtttggctagctgtccttaacaaattatcaacaggagatagaattgagaaatggaacatcggtggattgtgtgttctgtaataacatgttggagactagggaccatctgctcttctcatgtgtttactcctcagcagtttggtcggccgtagcaaagaacatcttcaagtccagatactctacggattggagcagccttatctacatctctaaatgcaacataatcggatagagagattcttagctcgatacatcttac

SEQ ID NO: 811 - DNA, 79109 bp, Arabidopsis thaliana
aagcttcagtctatacactttggagagagagaaatggaaggaggcatggtgaggaccctaaccctgcagctagactcatacggtggatcgacaagcaaatgcgcaatgctctttcatccatcaaagagatgggcgatcgaagatatgatacgggactacaactgtggtttgcaactgcaaattaacctctgttgatctttaattttctcagctgttttcaatctaaaggtgcacttgttgtaagaaagatatttttacttttgaatataatttaacattacattcaaaaaaaggagatagggaatttcgacgattctccagagatcaaaactaagtacacacaaagagaccatatggtccaatcagttccagatactcggtgcattgccttctgttgtgagcataaaatggcaaaccctatgaaagaaggttgatagcattagagaaaaccatgaactgatgatacttttactatttttttccggattgattgcatcttagaatcataatcctgtttctatttggccttaattagctgtttaagtactaagaaaagtcttgttaccttgtgatctagttacttagctgtttaagtactaagaaacgtttttttatcttgtgaattacttaagaatcataatcctatttccatcggccttagtgaattactttatacagtcttcaattggccttgaacttggatcttaaacttgcattaatggagacttgatggagtttggagagcttcaagaatatttggcggctgagactggtctataaaagtttctcttggttcaagcctaaactggtcatttgaatgagtcttgtaaaatcaaaaagatagactccggaaaactctctcgggcacttttctcgaggctgctcagagaagttaacgttttcaaaaataacagatcttaaccactttttttaactattaacggaaactttctccggctccctcatctccgaccgtggttttgaagctttcttccggttactctttcctgaagttcttgtcggctcgtccccggacaccccctgctgttggtgagttcttattggatggaaatgttgttttccctctgctttaacgaggttatgcggctgggactgcttgagtttgtgctgatccggatggaggtgttctccctctaacctcagcttcagattcttcttggagcctaagtgctctccttcctgcttttctgcagtttttacatgcattcggttctataactccagtgtgctactggtttttggctttgtttaggtcacgtagtaactggtctcttgtttacctgctcagataggtaccactcatagacgcgtaacgacccccgatatagaacctctcttcagtgtcacaatgtcgcagaagttctctagagctgagaaggagaagtgggttactggaactaacaaaccggctaggcgttctcctgttagaattcctgagagcgacaactcctctctaattgaagcaaacaagtttactctcattggtagggttacaaatcccctgattcaaaaacctagagctgtggtaagctattttcctcagttttggaatctagactctgtagtgtctggcagagatctaggaagggaccgtttcctcttcaagtttgagactgaagaggcccttcagtcaatcttaaggaagggcccgtaccactacaagagatggatgctgattctccagcgctgggagcctattgcttcagatctttttccggcactactcaccttttgggttaagattcatggactacctgttcatcaatggactccccaaaccatcagaactattggaagtgaactgggtcaaatcaccggaagtgaggctggtatcgatgctgaaaatgggaggatccgtgtccaggtcaatgggctggaacctctagagatgacgttgcctatccggatgcctgcgggggaggtcatcacagtagaactggaatatgagaaattggagaagcattgttttacatgcttctctctccttcatgaagaaagcgactgccctaggcttaaagggaaaccagccaacccactcagggttcttggaataaatcagcaaaagactctcctcaaactggaggctgaaaaacaaaagtctgatctcagaagaggagtggtcagacacgctagctctaacctcatcagagattcaaatcccagaccgtctcctgtggtcacccatcgggagagtaattcccatcatcaccaaaccagacgcttttcacctggccgagggagagaacatggaaaacagagaagatctccccaagacttctcacctaatcagaactctcgctatccctcttaccaccatagggataatcgatcccctaataacagtgccagacattctcgttccagaccctttcactctgataactatcactctcaggctcattattcgcataccccttaccataaagtaccttattctaaggatccttcacctgcaagaacaggagtttctggagcccatactccggtgcagagtaaaccctcctctccctctcctcgtccagcgggttctgctggtaaaatactaagttcaaaggggaaggaaatagcctcatacccatctaggagtcgtcgtcctgctctggaacgcatcgctcagaacacctctccggaggttcagccgcgagtagcggcggtcagttctaactccaatcgcttacaggaggtcgccattcagtatctcgaggataccaaccactttggtggtaccactaatgatccaggtgagtcaagtaaggtggtgagatctacctctcatttacctctggaagctaggctgtcctttcccactacttctcaaaactctcagctgcaagaaactagaatccacacttccctaagattgggccctcaagtggagactgttacggttactatccctactgctaagccggacaataaaaccacaagaaagaggaagactgcagcagaaagagcactagcttcagctctgccaagaggtgcgcgcagccctctaaagggagcaagcctaaagaaacaaggaatcatcagaacaagaggtaagcaatcacctaagaaaagactgagaacagacaacttacctgagattcaggatagctctcctcccccccccccccggttatgattcctgctatcacaaagaatggagtggattttcaaagcaatccacatcctcttccttagcgataacatcctggaactgtcaaggattggggagctccatgacagttcatagactccgcgaaatgcgccggagtttcttcccggaggtgttattccttatggagactaagaaccaagatgagtatgtaggtcgggtgttccaatggctgggatatgcgcatagtttcacagtccctccgtcaggacttagcgggggattggcgcttttttggaaacacgaaaccgaccttgagattttgtcattctccccaaatttcattgatgttaaaattcaggtaaaggcaaagtccttctttcttactctggtttatggagatcctgtccaacaaaatagaagagctgtatgggaccaaatctcctccctaagaggcttctctgaggaagcttggctgctagctggagactttaatgagctattggataactcagaaaaaagaggtggtcctccccgttcccaaaactccttcattaattttcgtagctttgtctcccaaaatggtctctgggaccttaagcattcaggtaacccattttcgtggcgaggaatgaggtatgactgcttggttagacaacggttagatcgagccatggcaaataattcttggttggagagtttcccatcgggtcgagctgagtatctgcgtttcgaaggatcagatcaccggcctgtagtgatttttgtggatgaatccagggctaaacgtcgaggcctcttccgctttgataatagactccgggaaaataaggatatccacaaacttattcaggatacctggagtaacacaagagagacctcagttctctctaaaatgaacagctgcagactagaaatcataaaatggaccaaactccagaatttgaattcagcctccgcgattagagattaccaaatggctttggaggaggctctctcctcggaccctccagaccctgaagtcataggagatctcacagtaaaacttgaacaagcgtacaaacttgaagaacagttttggcaacagagaagcagagtgcagtggttgcatagtggtgatcggaattcaagttacttccatgctatcacaaggaaccgaagattccagaaccgcatcactgtattagaggattcttcaggagtgcctagacatgaggatcaccaactatcccaaataatttcggagtacttccaacaaatctttacctcagaatcagatggagattttcgggtggttaatgaggcaattgaacctatggtttcccaagaagacaatgtcaggctaactagaataccagacgctgaagagattaaggtggcagtgtttaatattaacgcaaccaaagccccaggacccgatgggtttacagcgggcttctaccactcttactggcagattattgcacccgaggtgatccgcgaggttcagcttttctttagcactagatctttcccacgacgtatgaatgagacccatatctgccttattcccaaaggtttgggaccacgtaaagtggctgattaccgccctattgctttgtgcaatattttctacaaaattgtagctaaaattcttaccaatcgaatgcaacagatccttccaaagctggtatccgaaaaccaatccgcttttgtccccggtcgagctatctccgacaatgtccttataactcatgagattttacattatctccgactctcctcagctactaaatatggctcaatggcgattaaaaccgacatgagcaaagcgtatgatagagtagagtgggacttcctcaaagcagttctcattcgttttggatttcatgagatttggatggagtactcgagtgtgtcacatccgtctcgtattcattcctgctgaatggtgctcctcaaggcaaagtttttccgacccgagggctgcgacagggagatcccttatcgccgtacctctttatcctgtgcacggaggtcttatctgggttgtgtaaaagagcccaactcttaaaccagctcccaggcatcagtgtatctcaaaatggtccacgcataaaccatcttctcttcgccgatgacacgatgtttttcataaagtcggatccaaagagttgttccaaacttgctgaaatactgctaagatatggcaaagcctcggggcaaagcattaacttccacaagtcttcgatcaccttttcatccaagaccccaaacggagtaaggaggagagctaagagaagtttaaaaatcacaaaggagggaggggctggtaaatacttaggtctccctgagcattttggacgcagtaaaagagatgtttttggcgcaattgtcgacaagatcagacagaaatctcacagctgggcgactcgcttcctctcctcagctgggaaacaagttatgcttaaagcggtgttggcttcgatgccactctatgccatgacctgctttaaattgcccatctcgttgtgtaagaaaattcagtccctgctaacacgtttctggtgggatgataagcctgacaaaagaaaaacatcttgggtggcttggaccaagctatcgacgcctaaaaatgctgggggtttgggctttcgtgatattgagagatgcaatgactccctgctagccaagctggggtggcgcatcatccaaaatccggattccttgttagctcgcatgttgactagcaaatactgcagagactcctcctttatggagtgtaagattacttctagaccttctcatggttggcgtagcattatagcaggcagagcgatattaaaacaagggctgggatggctaatcgttaatggagataaagtcaacctctggcaggatccctggctatccatctcgaaaccgctgactcctgttggacctgcagctagagaacatcaagaactgaaagtgtcccacctgattaaccaggttacaaagcaatgggactgggaacgtatctctcagattctccctgggtatgaacccctcatatcacaactgcctggaccagcttgcagaggagaggacaaattggtctggttaccggttaaatccggttgttatacttcacgctcaggatatggactgacctcggtggagtttgtgccaccagctcttacgcgcttcaattggcaaaggcaactttggaaactgcctactatgcccaaaataaaaaccttcctgtggaaagcggcgagagacgctcttccagtggggctgcagctagtgagaaggcatattacgcctcaaggagagtgtcatagatgtggggctttggagtcaaccacacacatgctatttcattgtgaatttgcggtgcaggtctggaacttggctcctattcagatggaaaatatcccttgggggtcttcagtcacggatgctctgagtctactcaagaggtctcgcaaccttcctccgtcaggattacataaagcgtgtctgtttgcgtggatcagctggcacatctggaaggcaagaaaccatctgatttttaataacaccaattactctgcgatagagataatcacgaaagcagtgcaggatgcacgggcatggcaatcagcccaaattatttgttcggaaaatcgaggagtgtcatctccttcattagttccccctctttctacacagggattcatctgctgtgtagatgcggcgtggcaggcacagacgtcgctagctggctccggatggatcttcaagacagccacaaatctagaagcggagtcggggccttactcagctggatgcatccgcgttcattcagtcctcgcggcggaagcttgggccattaagtcggccttgtgtcatgccttgcagttagagaaaactgagctcgtgttgtgttcggactcaaagactttagtcgatgctctgacttccaatacccaaatcaatgaagtctttgggttacttgaggaaattagatcacttcagactagtttcctctccctatcctttcgttttattcctcgtattgataatgtgatagctgattctgcagcaaaactctctctctgtagttttggtaacagtgggggtttcttccctggaactctgttattcggttaagtttattgaatgaatacaattggtttgacaaaaaaaaaaagaatgagtcttgtattattgattgatgtttttactttttactttttagttattagttatttacgaagaaggtggtacccttcaatagagaagaaaaagatagagcagctaataagaagaatgtagagaaaatacatatcaataatgtttctcactaggggtgaccataaaaatcaatattcaactggattttcttctaggccattcttcggagcaaattacttgaggagacgattcggttaatcacgagactcgtaatacacatgagccgtatgttcagtggctgctcgttgccggtttgaaaatcgcctgtttataatcatcatcacctactgtttgagcacatttataagttactgtttaaaacaatattagtttatgaaatttataagaagttgttttcaaatcctaatgatacattattattgactttgagtatacaaaatctatacaaactcttcttttttttaaaaaaaatgtcttgtatgataaatttattgcggtagtttttaacattcgtctattgttcttgcagtgaactcatcagatctgtcagtacatctatttgtatccttagaacccttgcaactttgtaataaatttttcaactggagtagtagtaacagcaaccactacatcaatggagatcaaaagactatgaaactttataaaaaaaaaaaccacaagcctacatacataaaagatggcttaaaacaagaaagtagaaacattagtaggaataacttaaaacatttaaatgatttgaaaagcagaaattattttcttgttgaattaagtaaactcaaactccagcgtttgcaaagaaagtttgttttttgattttcaagtgtagctccaaggcccataactttgataatagtaaaagcccaaaggcccagatatgaaaagctcgcttatctttttttctttctatgacacggtgatgatgcgaatgaatcgtgtgagaagagagactgaagaagagctacaaaaaatgagagagctcctgtgaagtgacgaagagacgaagaagaaagagaacattaatggcggctactccgtggtactttgtcgcagtacttctcaccattcttaccagctctcaggttccaatttccaaccctaattctccaattcctttctgtacttctcttgctaattatgattgaatcgagattcgtttcctctatgtttcgacatttcctgaactcttagaatttcggcgactttatagatctagaaattgagttatcgttggtgttattgtcgccaaatctagttctggatcatgtatgtcggttagagtgtgataattgctattttccacggcttcgaacaatgtcatgttagatcggtagattcgattattccagttgattctgctgttaatttgcgagtgcttgattgatttgatttttcgatattatatgtagctgaagaagtttagtgagaatttgttttcaccaaaagctgttattagtctaacacaagtcatgatcatcattctttatgttcttctggctttaggttttagatagaaactgaacataattcactggatagattcgaaaatgagagaagtttttgtttccattctctcactgtgtaaactttatgcctcaggggattctaacaactctttctcaaagtgatggaggttataagtatgattatgctactgttccctttcttgctgaagtttttaaggtattttcttcttctctaaaaacttgatgactggtactggatttttgcatgtcgtatttagctgctgagtttgttttactattgttaatttcttctgcagctgatcatttctggtttatttctctggagagagatgcggacatcttcctcaacaacttcaaggattactacggattggaagagtgtgcgattatttgttattccgtctcttatttatctgatacataacaatgtgcagtttgctacattgacttatgtggatacgtccacttatcagataatgggtaatttgaagattgtgaccactggcatactgtttaggtatctgttttgtgtgccttctctttctctgttgtgctgagttctctctgttgattaactaatttgtaatctgtcgttgtgataggttatttttgaaaaggaaactatctaaacttcagtggatggcaattggtcttttagctgttggaacaactaccagccaggtgaggtgatgcatacacattaaaattgtgtatgctattttcctttctatcttattactcatagtcttatgtttttcaaaatggttcatgttattctacttagctggtagctcactagttttttactggtaatttaaaagctaagctggcatcgaaatttcaaccattcaattggattgtcgtttcaggttaagggttgtggagaagcttcttgtgattctttattcacggcaccaatacaaggttatttgctgggcatcctctcagctggtttgtccgcgctagctggaatctacacagagtttctgatgaagagaaacaatgacaccttatactggcaaaacttgcagttatatacgtaggtatctcttctttgcatcaaactttctcatgcctagagtattattgtcacacttcttattcaacttaaaagcctcgtcgttaggcataaggcgatgatatccagttcaatcatatctttgctttctttactcaccaggtttggttcacttttcaacgtagctcgacttatagcagatgatttcagacacgggtttgaaaagggtccttggtggcaacgtatctttgatgggtacagcatcaccacttggctggtagttctgaatctcggatccactggcttactggtctcgtggttaatgaagtatgcagacaacatcgtcaaggtgaaagatcaatcttgttcttcataatcaaccaaaagaatgttaaaaaaaaaaactgtgcttaaattcacattttacatttttcttctaggtttattctacatcaatggcgatgctacttactatggttgcatccatatacctttttagcttcaaaccgacactgcaggtttgtatatgatttatcttggatcggatcttctttcctgtattcgtctcatttgtcttctttacctgaaacaatcctgcagcttttcttgggtattgtcatatgcatcatgtcactccatatgtactttgctcctccacacacgctcgtggacttgcccgtgacaaacgaagcacatgccaagaccttaaagcaagttgtcgtagaagaaaagacagattcttgaattaaattggacgaaaaggttagttgaacacatagaaaacaatttgctaagtaaatgaacacaatgatcttcttctagcttcatttctattagagaatgagaaacttggatgtgagttcttttgaagaaatgatctgatagtttgtttattcacgtaccgattcttttctttgtaaatgtacatcgaggtgcctagaaatagtaaattcgattgttgaagcctgttgtttactttttcttacgctgatgatatgtaagaagtgtctaccagataaactattgtgttcctttttttgaccggctggtctgatatgtttgggtcatctggagttggttcaggtttggtttataggcattgagcttttgtataggagttggttcgggtttggtttataggcatcgagctttcttaagtgtggacgttctcaagcacgacgctattacggattcggaagaaaataaatgttataccacaaaacacaacatatagaacaaatttgatttagcttccattcttgtttgaaacaatggtcacatgtcgtaagcaacacagtacagattgacaataaaatcattacctatgtaacttttgttttatatcccgtctttttcccccgcatattttcgttggtacgaagttacaaattgatgataatcaatcattttcttaataaatggtagtttatccaatttttttaatacgatttcgtatctttgcagtgcagatcaaaacttaagaaaaaatgtagttgaagtctattatactagtgtgacagattatggccacgagtcactctattccattggttcttattatttatgacacattggggaaagtgaaatgctaagccaaatccgtaacgataggggcacttgtattgcaaacattaaaagaacacgacgtactagtcgtcgcatgcatgcaactagaaagatttagatgtttccaaagaatcaagaatgggtccatcttccctcatttaaacccattttatccccaacgaaaattcaagaaacgatcacactcctcctccactaataaattcgatcaaatattgagctttagatagatgatcattagggttattttgaccaatagagaatctccattaacttgcattttaagtctgatcataaacctgagttaacgatgttcaacgcataaactttgataatttagaaaattgaattattttttccatcaccaagttgccttcaacactaaattcgatcgtagtctttacagttactaaggaaccaagaagaagaagcattaaattcgcttttgttgtgtgaaaacgaaaactaccaaaaattcaacgaagccaattaatgagaaatacaagacacacaaaagagttatctcagtgcatttaatatgtgaagtgattaatatagcagcctccaatgttgaatttgttacaatcaagggattaactaagaaaacaaaaaacaaattaaattggcatcgaagtaatatagtatgaccttgaaactgtaaatcaacactttagtgattttaaaatcttcctagaaacagtcatagccgtttaacttttgttcttgtttgacatttttctaaaaataaataaaatcgggctttaattcatagttaaaacacaattttattttcgactgaagtttgtgtgtttaacaatgaattagaggtattttaggcataaaccatgagacattaaggtcgagataacttggggtctcgggttgtgtcttttcatttatttgtcaaaaagcagctgtgatttggttactatgtgaggaaatgttattaaaagttagtaatgaaatatataaaagtcatggtatttttattcattatcaagtgtatgtgaaatacacatacttttggacatacatatagaaagaattagatttgtctattacaaatttatatcgcatttgatgtagtcgacgaccgagatgaatcaaatgaacaagatacataaaaaagacaaacattaacacacaaaagaacaaaactaataaaattaacatagtatcaaaaaatgaaataaagaaaagaaaatttcaaaatctagtacgtgcttgcatctacatgatccaacgaagttcttcgcctatccacaatatattgttttgcctatataaacacatctcccatttcctcataagaaacctcaagccctaactaaaatctcaagataaacctatagttgtcttgtcaaacaatcaaaccctttttagatatagaaaatgggaatcaaattcagccaaggtccttcgaatacaaccattcacaacagaagtcatcaagatggtgaggatcaaaggaacgagacggcgacgaagatcaatcatgacaagcctcaaaatcaatcaagtagctttcagattccacttcattatccaaagtatacaaagagtgattatgagaaaatgccagagtggcaattggatcggcttctgagagagtacggcttgccggttatcggagattcttacgagaagaggaaatttgccatcggagcatttctctggtcgtcggagaacgagcactagatcatatgttatcgtaatagacgtcatcgtttcatatggtactgtttgaataaagataagttggtgaaagcgtggaaaagaaacatgtttgcatgtagatattatcctggacatgtatgttttatataatatatatatatgtattaatgtatttgtatatatggtgtgtttctctactctccatgtatgttacctcatgggcacgacatttgtaataactatactaagcttaataattttctagcgttttcacatatacaattaaaaataatcattatttagttattccaatattttttttacaaaacagtttttataattgtgaaccaatagtaatctgataagtttcattattttgaattattgcatcttgaagtttataagttattaatatcattcaattagaaaaaaaaaactagaaaatcaatcttaatttgtgaaacaaaattaaaaaagttagaacatcaatttattaagaacaaaatggaatatatatgtgacaatattttgctttattattttactctccatctaaacattcttatttttgcgatttttgatatactagtatgtgattaaaaagcgagaagtacttttagaaacacgaatccatgaaatttcttgcaacacacatgacacatccaatatacttgtacgagtgtgtgttaaatattgtggatttataactaaagaataattgacagttagtgaattgactaaaacaactgctttggtggaagacatgttggcaaccttagggctgttagtttgtttgacactgcagatctatttcacgtcatgaatggttttggcgtttttgttagggtttcaggtctatttcgtgcagattcaaacgtatacatggattttttttaataagtaaaataggatagtttgattccgttacaagttcagcatggacctatcaagctccacgctctatgatggacgtgtatgtgcttattcgaatgaccatccgaaacagaaattttcacgaattgaccacctttattcgttacgggattcacccatacacgtgaacgggtaatgactgttttaaattgtaatgtttattccagttttcagtatgtacactttgcttcttgttatctatatatacatttttgcagccattttatgaaataaatcttggatttgggatttatttacagtagttgtcactggcatttaataattgtttttgataattagaaagaaaatctttgaattaaatatttgacaatcttcccaaaatctctccacattaactacacgattagttactaaaataaacttccgaaatatttaatatcatttaattactacaaaattatcatttttgatattgtttttctacatgactataataattcgattataatcattaaaccgcagagatatttgataacatttaattactacaaaattaaaaaatatttagacaatgattcataaacatatcataaataaaaccagtgagttttttttacggggcggattggcgggacggatttgacaggacgttacttaataacaatcgtaaactataaaataaaaatattttatagataaatacaatttgcaaacttttatatatagtaactttaaaaaataaattgtctccgccgtataccgcgggttaaaatctaattcttagtatattttctttgtgaaagaacaaaatgcactaattgaaagaactcgaatacgcctggacaaaactcaaaacaatttagccttcaagcagcaaactcaaccgcttatccacatgacaaaattaaccatgaaaatcaatcggtttttataggtacgtagtgtggtagtgacaatgtacatgcatgacgttgagtaactgaaattgagaaaacttcttaaaaagtttaaacttacaacaattttatgaaaattcacctcaacttttgtaaaattttggatattttaatgagagattgagagcatatatgtacttgatgagtagttttaaaaattattataagaatttgagtgcacctttaatttttaaacaaagtgttttgaatagtgataaggaatttcgttgatttatctgattcaccaaatagtattttgttagtaaataatgaaaaaaaaaaaaaaccttattaaaaaaaaattattaaccaaaactttaggcgtataaccaaaaattagccaaaaaccttagtaaataattatgcgttttcgttacctttaggctttcacgctttagctaccgttccttttgagtttgcttcgattgttaaaaaatgatgcatttgggtcaatgtgacaaagacgaattcttgtataattgttttgtttaagtttttaataaattatgggagacattgtctccccatcactacaaaaaaaaaactaagaaaccttggagcggaaagtacgtagtgcttcttctattgagtaacacctacaaacacaacaaagcagcaaacaacatagctcattacgaattaaagagaccaaaccaaatagctacgaacagaatcccgtggagacctaatctctgagcagtgagcactagacaacggatgacattttttgtaacatccccaaatctaaaatgtgggccattttgaattacagcccattaaggcccaaacataaattcgtaaaaactaggagggttttgtcgtgtgtgcataatgtatcacccttctcgtttgagccgcaaaagaagctttgagtatatataaatccaaaagcagccagctagccaccaccgcgggtgggagcgagagggaagttgaaccaccatggttgttcttatcccgtcgtgttgacgtattgttgcgttcgaaaggatccgagaactagcaaagttggagagagccaagaggtcaccggaacttcaccggagaatcaccgcgagtcaccggaagttagtcactgtcatcggagctgtcgtagtccattggcaaggtcgttaagggtaagagaaccctagatttattatgtaacttggtcatgaagtttctgactttgtcttattctctattgatttgtttgcatgacaagccaccgtgagcttgaaccgctttgccgagctgcccaggtgatccgccgaaaataatcgccgagaaaggtaaacgaccaagctgaactttcgtgtctgtgatatcttgtgttgatcttaaccagtctaaaccgaataatcttaatctaattaagacaagaaccataacttaattcatgtggacgtgagttgacttgcggttgtcgtcatgtgtagaggtggtggtttcatgcgattagtcttggttttgttttggaatcgtttattaaaccgaaattgtggagttggataaaggtcacgtgattgaagtttttgagtttctaaactgagagatttaattaatctaattaatcagttcttaatcaaggtttagaatttggtttggatattagattaaatcatagattataattgcatttaatcttgatcgtttagtctaaaccaatgcagcccgagattgttcctgaagccgtttttgttgttcctagttcaaaaccgaggaatcaacccattttgttaaggtgaggacgcgaccttgttttatttgttatatgaatatatttagttgattatttagtttagagttaagccgaatatatctatgagttacatattgtttgatgtgtgtctatgactgcttgtcttaggtttagactttgtgattctagatatatttatatatggaaaatttgtgagctctaaggtttaccttcaatgaaaaattttagattgctcacccctctcttttttgcaggttggttaagttgagagttcgttttccattattaattggtagttttgcgatgaaagttggttttgaaccgggctaagaagtgaatacgttgaccagctccttgtaccagattcgggtcctttcatttttaatctccataattaaaccagccgcgagtcttgaagaagaagtatgcagtcgatagtttctttcttccagagaatatacatcgaagcttgataggtaatcctaagaaagtaaggatcgtagtcatatttttgtcttagaacggattcttaaggcatctaacaccatcgccaaatttatctctcatgacagttattaggtttcaaaactctccaagattatattgaattgcacaagaagcatgtcggaagttgaaacaaaagtaatgttgctgatctaagaataaattttgggcttgacttaattgtagcccattatataacattcaggtcagtgtataaatcattttaatttattttctttccaaaatcatatataccacaacgaaagcataaaaaccacaaaaaaatattaaatgaaaaatacacattccaagaagaaggtaaacaaatcgtgaagtgttttgtgggtttaaatctctaccaatctcactttctttttttctgagagaacctgaattttttttctgataatggacatagcgagtaccaaccggtttaagaagaaggtttgtgatggttgcagtgaagctatgccaactgggaaaaagcggaagaatgaaaggacgttaatgaacaaagatgtgaatgccaaaagattgaagaaagatgtgaaaaggtgagttctcaaaggttagagtggagtgaggaagacgagatccgtgtgctacaaggtatgatggatttcaaagctgtaacagtacaaaatctttctaatgatatgaacgtaacttacgaaatcctttaggaatatataagcgttgatgtttgtagctatgcatttgtagagaagatgaagagtatgaaaaagaaattaatggagaaaatgaggattaacgctaaagatttgtcttcttcggttccgagttgttgaaacttatttggggatgtgatgtgaaattggcttgttctatcttaagtaagttatactcaacaacagatttcacatcatatctccaaatcagttttaacaactcagaaccgatcgaagaagacagatctttagcgttaatccccattttctctattaatttcttcttcaaactcttcatcttctctacgaactcatagctataaacgtcaacgcttatatattcatggaggaagttgtaagctccggtcatatcatcagaaggattatgccttgttagagctttgaaatccatcataccttgtagcacacgatctcgtctttttcacttcactctaacctttgagaacttacttttcttggcattcacgtttttgttcgttaacgttctttcgttcttccgtttctttccagttggcttagcttcaccagaaccaccacaaacctccttcttggaccggttggtattcgctttgtccattatcaaaaaatgttttaggttctctgagaggaaaagagagcgagaattggtagaaatttaaaccaacaaagcacttgactatttatttacctttttcttagaaatgtgtattttttatttaatattcttttatagattttatgcttttttgtgatatatataattttgaaaagaaaataaattaaaagaatttatatagtgacatgaatgttatataatgagccataattaagtcaaacccaagattggttcgacaattcgtttttggttaaattgatagcaagtgtgggcgtgagtggagattctgtgaaaagaagatggagtttgttgcacacaaacaagataaagatgattgaagacaaatggagagtcttgatgaccaaagaagataaatttgtgttgcaaaagatagagcttttgcatgaagtggtttctctgatcatttacgttgaagcatttactcactagatgcaaaatgtttcttgatttgctttttttgttggatttttctgtccaagtttttgctttatattatgtcattgttgcttctatgtttagaatctgacctctattaaatgtgaaacttcattagtatttttggttactatgttgctctttcgttgataacaactttgaaatgttagtcgcaccaaatttagtaaaaccgttttcttatacatgttacaaagcttgcttgaaggctataacaaaagatttcaaagggtttaacaaattaaacagatactaaatttgtgtttattacggcccattaagaacccaattaagagcgatattgggctaagactgatattttaatattaaacctattacggcccattaatagcccaatcaatatgtaaacatatgcgtcttcgttccatgtctccaatcttatttcttcttacccttttttccaaaatccagaaaccccagagaaagcaaaaccgcgagctctcatggcttccggcggcaaagattccgatcgtaccttagggtacatgacacggaaagatacagaagtcaagcttccaagacctactcgtgtcaagaacaaaactccggcgccgattcaaataactgccgaacagatattaagagaagctcgagagagacaagaagctgagatccgtcctcccaagcaaaaaatcactgattccactgagctttccgactacagactccgccggagaaaggaatttgaagaccagatccgtcgcgcgagatggaacattcaagtttgggtcaaatacgctcaatgggaagagtcacagaaagattacgctcgtgctcgaagtgtttgggaacgagccatagaaggagattataggaaccatacgctttggctcaaatacgcagagttcgagatgaagaacaagtttgtgaacagtgcgagaaacgtttgggatcgagctgttacgcttcttcctcgtgtagaccagctttggtacaagtatattcatatggaggagatacttgggaatatcgccggagctaggcagatttttgaacggtggatggattggtcaccggatcaacaaggttggctctcgtttattaagttcgaacttaggtataatgaaattgaacgtgctagaacgatatacgagagatttgttctttgtcatcccaaggtttcggcttatattagatatgctaagtttgagatgaagggtggtgaagttgctcgttgtaggagtgtgtatgaacgtgctacagagaagcttgctgatgatgaagaagctgagatcctctttgtggcgtttgctgagtttgaagaacgttgtaaggaagtggaaagggctaggtttatctataagtttgctcttgatcatattcctaaaggaagagctgaggatttgtataggaagtttgttgcttttgagaaacagtatggtgataaggaagggattgaggatgccattgttgggaagaggaggtttcagtatgaagatgaagtgaggaagagtccttccaactatgattcgtggttcgattatgttaggttagaagagagtgtggggaacaaagataggatcagagaaatctatgagagggctattgctaatgttccacctgctgaggagaaacgatactggcaaagatatatctatctctggtgagttttttctttctcaatttggtttaatgatttttggtaattacgcattatcgatttagaattggaatgttggcttcttatattgatcatggttttgataagaatgctaaaatctttgaaattggttgtcttaggcagagattagttctatcatatatgtcaagcttttagcacatccgagtcattaaatatatcatatatgagaacagaatcttgcattccatggaaagctattgctgttgtattttgttagcttatggttctgcggttttctcaaatactaatactgatgtgactaaattgtgtaggattaattatgcattatttgaagagattgaaactgaagatattgagcgtacccgagatgtttacaggtacgctaaagtctatattcatttacgttttggtcatggctattttgtcaaatatcacctgatagtttaaactaactaatttgtctttgtcttactgaaattttcagagagtgccttaagcttatcccccacagcaaattttcttttgccaaaatatggttgctcgctgctcagtttgagataaggcaattgaatctcacgggtgctcgccagatattaggaaatgcgattggaaaagctcccaaagataaggtaagcctataaatcgtttaaactatgatcgcattcctctcctttagagacgcaaatgattttacttaccgtggtgatttttgtctgcaaatagatattcaagaaatacattgagatcgagcttcagttgggaaacatggataggtgtagaaagttatatgaacggtatcttgagtggtctcctgagaattgctatgcttggagcaagtatgctgaactagagaggtctcttgttgaaacagaacgagctagagctatttttgaacttgcaatatcccagccagctcttgacatgcctgagctgctttggaaggtaagttttttaagtcgaatacattcatagaatcgagattcctcagacttttgaaaccaattggataattgaaattctatattgtttgtggcaggcatacattgattttgagatatcagaaggggaattagagaggacaagggctttatatgagcgactcttggaccgtactaagcattacaaggtgtgggttagctttgcaaagtttgaagcttctgctgcggaactagaggaagacgagaatgaagatgaagaccaggaagaagatgttattgaacacaagaaagattgcatcaaacgtgccagaggtaactttaaaactacacattatatcagttttgatgattccttgcaacatgttataactgtttattctctctatatttcttctactcagcaattttcgatagagccaacacatattacaaagactccacaccagagctgaaggaagaacgagctacgctcttggaggattggctgaacatggagagtagctttggtaacctcggggatgttagtattgttcaatcgaagcttccaaagaagctcaagaaaagaaaggcgatcactagagaagacgggtcaacagagtacgcattgcgtatatataatatctcgatttttaatatctttcgaatgtgattagttaaatgctaaagcttaacgtgaaaaattgtttgaatgtttaaacaggtacgaagaatacatcgattatttatacccagaagaatcgcaaacaacgaatctcaagattcttgaagctgcatacaaatggaagaagcagaaggttgctgcttctgaggatgattgagattaagcttttttcttaagttatatcaaaagtcaaaactgtgaaatgtgttttgtattcttccttagctctttgtacacatcgtttggtttagcagtaatttttgttatccaagaacctaacaaaactcaaatttgtcctgttatgttttgttttggttcgaattttccggtttagaaattaatcaggatacttcttcattccggtttatgttctgatctctcggtttgtgatacgtttgaaacggaatctagtttaatctatatatatacattttagtttaatctatatatatatacatttttgctgtgaaataaataatggagttggaacttatttataatcgctggcttattcaatgcaaaaattaactaccaaatcaaagcaaatcttattcaaaacaatatgctcttattctatggtctaattatttttgctaaaatggttaaaatatttaaaaattaaataatcatttgaaagaaaactttaaattgatttaaattataaatcttttcataaaaatattattaataaaaaaaaaaaattcaccgaacatgattagatagtaagactagatggtagggcgtgtttataatattataatatataaactttataacaattaaataactatttgaaagaaaatttttaaattgatttgaattaaatattttttaaattaaaatattattaaaacaaaaataacaaaataatgtctaattttactgaacggggttagtggtaggacgagtttggtcgatagtattacgagacggtataccacaagtgaaatccattagatatgtttaatttcactgtggaggattagatggtatgacgggttttgatcgataataatacgaaacgatatactacggataaaatcctagatataacaattaaaatctatatacacattattttaaacactaaacaaagcaaacaatattaataaaacgaatatctacatatatattttattccgcgggtcaaaatctagtagctggatgaaatggtgtttatatattacaccaactttggttatattcaaattaccgaataatcttctactaattttgtttattatttgctttcttttcacttttgagtcggctaaatggctaatcaaaccttcgttaaatactcgaaaaaaattaaggtcacttggcaacttgcagatcaagcaatagatgtatgtcacgtggcaagattacagcttcagctaaacgagtggatattggaccaatcacctcctttggcaaaatatcgagagacgacgacgagaaattatgcaaactctttcgtttgtgtgtctggttatttccgtaattattaacgaaattcaatggcatttagataacacaggtagtgccaaattttgcattccctctattattaagccaaaaaagaaacctttaaatataacaatttattagactaaaaaagacacaacccctcgttttatctgactctgatcccattttgctaaaatcttctctttatttttgttttgttttaggcctctcttctttttcgttctttctttatcagcttcctcagccgcacggagaaagaaaatttgatcctgattttttgccggtgataatctaaacctattaatttctctgcggaaccaaacattgaatttagggtttaaattgcatcattggtggaacccagatgttttctcctcctatattaatggtcattctcggggtagggtcatgaccatgaccttcgtttagtttacatcctcttacatgttcttaattattcttccatttatttttccaatttctaaattctctgatatgttattacctatggaaccataatgaaagttacatatgttgagtctttataattcttctagtcaatcttaacgaaagaattaatttttgaaagctttcttgggatacaaggaaattatggacattccatttagggtcatgctgttttcgttagcttgcatgctaagttaaagttgttttttttgcatgaatttgatcgatgttgttaatttgtttctttgtgttttgcagagctttttgaatttgagctctttgttggctttcttttgtgcttaagcggagagttatagacaaataagcttcacgaagaaaacgaatctgttgcaaatggaggaggcaaaaacaggtacgaattctaaatttttcatctaagaggcaacgttttcttatgtaagacatgttgttacatgtgcagaagtggagaagaaagtgtctatacttttaaagtttattcaaaacaaaaacaagatccctaaggttacaaagaaggagcttgttgggattgttgaagatctccataagcagtgtcagctactttactctgtgtttgatgattttgggactgatggaagaaaaggaaaattgggtactgcttcttcatcgaggtctagttccgatttggattactattcctcagaggaagtagagatcagtgctgataatgttagtgatacattgagctcggattacgatgtgatgctcagaaagctacaagagacagagctaagaaatgaagatttagagagacaggtgagcaatctgaaacaggaaacggtttttttacgcgatcaaaacatggaagtcgcgggagatattgaaggtaagagaaacgaggacagggaacatctcaaggggttgatgacgaaacttgaggctgcattgttgtgtaaccagaaaagggagttggaaatggagctggtgaagaaaaccaatcaagtttcagagacgcaaatgcgtttgaagcgtctagaggaagaaacagagaaacgagctaaggctgagatgaagattgttaaagaaaaggaagctttgtggaacaaagtacagaaacttgaagcgggcgttgatacttttcggaagaagagaaaggagtttaatgaggagatgaagagtaagattactgagaatcagaagctgcatacaaaaattgcagtgattgatgaaattgaagacaagagtaagaaacttgagtaccaagttaaggaacaagaagatatcattcaacggtaagaaagaacaggatttgtaaaagctttctaatttattttatgattaattaccattgatgttaattcactgcaggctatcaatggagattaaagatcagaagaagcttcttaaggaacagaaagatgccatagataagttctcagaggatcagaagctgatgaagcgttggtcatttggttcgaaattgaatactaatcttctcgagaagaaaatggaagagttagcggaagattttcggatgaaaatggaagatcatatccggatacttcacaggaggatccatgtagccgaacaaatacacttagagagcaagagcagctatatcaagacgcgagacaacacacaaacagaagaaaacagaggaaacagagcagtctctgaaacccaattcaagaaaatcaaggaaatggtggaacaagggcttgctggaccagagatggcgataaagaagctggaagaaagcggggaattagggaaccgagtaacgagattagctaaagagatcgattcagcgagaaagtgggtgaaggagaaggacaacaatatgaagcatgaggtggaaactctagaagcgaagctagaatgtagagaagcgcaagaatctctgctaaaggagaagctatcgaagctagaggctaagctagcggaggaaggaacagaaaagctgagtctatcaaaggctatgaggaaaattaaaaagcttgagattaatgtgaaggagaaagagtttgagttgttgagtttaggagaagggaagagagaagccataagacaactatgtgttttggttgattatcaacgttgtcgatatgatgatctcaaaacttccatttgtcacgtagctcttcaagcatagagttcacttcttcttctccttttgggtgtaaaatgtaaatattatatgttgcaagatttgggtattttttcattaatggttgtaaactaaactaattttttttgtaaataacacattttaactttattttttttgtaaataacatattttaactttatttttcaaatattcttaatattgaacatcctacgcgttttataaaagtctccattagtttgttaacttttttttttttttgtaaaagtctccattagtttggtatgttttggccttcatatatttaatcatccttttgttggaagttaggttagtttgtattaaaatgttttaagttatcatcaattatagctcatctggtcaccactattttatagaaagaaatccagagaagaattatatatgaatgaaaatctggtaacaattaataaataaaaaagcataatgtgaaaaccctattaataagaacaaatcacaaataaactcaaaactaactactaataaataggagaaaatgaaagaaatataattgaaatgaaaattactcctaagaaaaaaagaaataaatcagtctcattttataatgtgaagataatgtagtctaaattaggattacgtaagtaaaatcagtctccttgatagatttcctaattaatagtatagatataagaaaatagagtcatatttcttttgacaaagacccaccaaaaaaaggcgggaaacgcacttagtgattgtgaggcattaatcatgtgttataaagttaagtacggcattagacatgctaaacaaaaaccaaaatccagctaatttgtatatctccgtggcaaatacgtaataatcttgaacattgataactacagtcaaatgatattttgaccggtgttgacgagaatttgaagagaaaataaaagcgtgtgatggcagaagcgtaataatctgataaaagggaggggtgtttgtggtaagacgaatttccaaaaagattcctccagtcttcgtctttctccctcaaaattgaaaacacacacaaaagttgagctttcataactgttctctcctctcaaataactccaaaaaccaaatcacctttttttttctttcttcttcaatctctcttttgcttcgatttcaatttcgtaatcttatcatctctgtagccaaaaacacacacatcagaccagagagaagagcgagagagagtttttctttggtagttttctggactttcttcaaatctcaggagcttccgtaatccgtatccaggtaaaattctaggttacgaaatgattttgttggcttcgattattgacttttgaagtttatttgattcttcgatcagcttttagtttacgctttcgttgcttagtagtgttggatcatgacttcatgagtagaaacatctgatggttttgtttgtttgttgatgtgccttttactggggaaattatgagtttcttgttatccagttcatcttaagtctcgttgaggttttgatgatttgcatcagattacctattggattatcgttgatttggttcgttagaaatagagtaatagggtttatatcaggtgaatcaaggtcatgagctgcaatttccaaatttgtttattattattcaagtttttgcgattgggatttcatgtttaggcacagtaactagatgtccttagattttactatcaagtcatctttagtttctcatgttagtagattttgtaatttaagcttctatcaactgctgtgtaatcatcaaaatgctaagtagaattcttggtttctatacagggaaacacgaaaaaccatagaaatcgattctggaccttaaaggaaattcgagagataaagtgtaagtgaaactagaaactctactcctttccttgtatttacagttttactagtaactttctttttaagaaagcgttggatgatcggatcgagattgttttagttgaaactgtattgttaaagccttaaaggtagtaagtaacatataagaacaaaaagaaacaactcacattttcctgaggtatgaaaattgaataatgatagctgtcttttatcggttctagaggtatgtgctttctggtccatttccaaaattgctgaggtggctccacttgagatcttttgtcttagccaatgccatcagattccaaatttagacccggcactaaaaagtgattagctttaatccaaactcgaaactctaatcaaattggcatttgttcttgtaacttctgttgaagtaaaataataatatatcacttggtaagacagttactcattgctgcaaagattttggatctatgatgatgttctttgcgggtcccacgaattctattattatctgcgtaccttgtcagagtacaattgctggatctacttctattattatattctctttatgttgaatatcaagatgcttaacctatgatctggattctgtaaaagccaaattattagtattagttttctaatttgttagtattatatacgaaacaaaaatgtgaaaaggatggtacctcttttctaattaaataatcgcatttaatgtgaacaagttagttttgctagtcttaacatttcttctgataagtttctttgtgaattgtgtttggtcacaggtgaagattgagtttctttgtttgatgataattggttgaagaagttatcagagaaactgaaggaaaaagacatgaaaaagcataagtttagagaaaccttgaagtctttctttgagcctcattttgatcatgagaaaggtgaaatgcttaaaggaactaaaactggtaattttcctacactactaagtttgattcacatgtaaaatgagattcttagctcttggtttaactgcttacatgaaaagtactaccatcgtctgatgcagaaatagatgaaaaggtgaacaaaatcttgggaatggttgagagtggagacgtcaatgaagatgagtccaatagacaagtggttgcagacttagtgaaggaattctacagcgaataccagtccctgtaccgccagtacgatgatctaactggagagattaggaaaaaggtcaacgggaaaggagaaagctcctcttcatcaagctcagactcggattctgaccattcttctaagaggaaggtcaagagaaatggaaatggaaaagtagagaaagatgtagagttggtaacaggtgccctgaagcaacaaatcgaagctgcaaatcttgaaattgctgatctgaaagggaagttgacaacgactgttgaagaaaaagaagcagtagattctgagcttgaattagctttgatgaagttaaaagaatcagaagagattagcagtaagttgaaacttgaaactgagaagttagaggacgaaaagtcaatagcactgagtgataacagggaactgcatcagaaactggaagttgctggcaaaacagaaactgatctgaaccagaagttagaagatataaaaaaagagagagatgaactgcaaactgagagggacaatggtatcaaaagatttcaagaagctgaaaaagttgcagaagattggaaaacaacgagtgatcagctcaaagatgaaacttctaatctcaagcagcagcttgaagcatcagagcagcgagtttcagagctgaccagcggtatgaatagtgcagaggaagagaacaaatctctatccttgaaagtttcggagatttcagatgtgatccaacagggacagaccaccatacaagaactaatttccgaattgggagagatgaaggaaaagtacaaggaaaaagagagtgagcattctagtttggtggagttacataagacccatgagagagaatcatcaagtcaggtgaaagaattagaagcacacatagaatcatcagagaagttggttgcagatttcacccaaagcctgaacaatgcagaggaagagaaaaaactgctatctcagaaaatagcagaactctctaacgagattcaagaggcgcagaacaccatgcaagaactcatgtctgagtctgggcagttgaaagagagccacagtgtgaaagagcgagaacttttcagtttgagggacatccatgagattcatcaaagagactcatccaccagagcaagtgaattagaagctcaactggagtcctcaaaacagcaggtctcagatttgagtgcgagtctgaaagctgcagaggaagaaaacaaagctatatcctcgaaaaacgtggaaactatgaacaaactcgaacaaacgcagaacacgatacaggaactcatggctgaattgggaaagttgaaagacagccacagagagaaagagagtgagctttctagtttggtggaagtacacgagactcaccagagagattcatcaattcatgtgaaagaattagaagagcaagtggaatcatcaaagaaattggttgcggagttgaaccaaaccctgaacaatgcagaggaagagaaaaaagtgctatctcagaaaatagcagaactttctaacgagattaaagaggcacaaaacaccatacaagaactcgtgtctgagtctgggcagttgaaagagagccacagtgtaaaggatagagatcttttcagcttgagggacatccacgagactcatcaaagagaatcatccactcgcgtgagtgaattagaagctcaactggaatcctcagaacagcggatctcagatttgactgtggatctgaaggatgcagaggaagaaaacaaagctatctcctcgaaaaatttggaaattatggacaagcttgaacaggctcagaacacgataaaagaactcatggatgaattgggagagttgaaagaccgacacaaagagaaagagagtgagctttctagtttggtgaagtcagcagatcaacaggttgcagatatgaagcagagtctggacaatgcagaagaagagaaaaaaatgttatctcagagaatcttagatatctctaatgagattcaagaagcacaaaaaaccatacaagaacacatgtctgagtctgaacagttgaaagagagccacggtgtgaaagagagggaacttactggtttgagggacattcacgagactcatcaaagagaatcatccactcgtttgagtgaattagaaactcaactgaaattattagaacaacgggtcgtagatctgagtgcgagtctgaatgctgcagaggaagaaaagaagtccctgtcctcaatgatcttggaaattacggatgagctcaaacaggcccaaagcaaggtacaggaacttgtgactgaattggcagagtctaaagatacactcacacaaaaagagaatgagctttctagttttgtggaggtacacgaggcccataagagagattcctcaagtcaggtgaaagaattagaagcacgggtggaatcagcagaggaacaggttaaagaattgaaccagaacctgaacagttcagaggaagagaagaaaattttatctcagcaaatttcagaaatgtcgatcaagatcaagcgggcggaaagcaccatacaagaactcagctctgagtctgaacgattaaaagggagccacgctgagaaagacaatgaactttttagcttgagggatatccatgagactcatcagagagaattatccactcagttaagaggtttagaagcgcaactggaatcatctgaacacagggttttggaattgagcgaaagtctgaaggctgcagaagaagaaagcagaactatgtccacgaaaatctcagaaacttcagatgagcttgaacggacacagatcatggtacaggaactcacagctgattcgagcaaactgaaagagcagctcgctgagaaagaaagcaaactattccttctgacagagaaggacagcaaatcacaggtgcaaataaaagaactagaagcaacagtagcgacactggagctggaactagagtcagttcgtgcccgtataatagatcttgagacagagattgcaagcaagaccaccgtagttgagcagttggaagcgcaaaacagagaaatggttgctagaatctcagaacttgagaagacaatggaggagagaggaactgaactctcagctttaactcaaaaacttgaggataacgataagcaatcatcgtcttcaattgagactttgacagctgagatcgatggcctacgagcagaattagattcaatgtctgttcaaaaagaagaggtggagaaacaaatggtgtgcaaaagcgaggaagcctcagtgaagattaaacgtttggatgatgaggtcaatggtctgagacagcaagtggcctcacttgatagccagagagcagaactcgagatccaacttgaaaagaagtccgaggagatatctgaatatctgagtcagattacaaatctaaaagaggagatcataaacaaggttaaagttcacgagagtattctagaagaaataaatggtttatctgagaagattaagggtcgtgaacttgagttagagactctagggaaacagagaagtgagcttgatgaggagctgagaactaagaaagaagagaatgttcaaatgcacgataagatcaacgtagcgtcttctgaaataatggccttaacagaactgatcaacaatctgaagaatgagcttgattctctacaggtgcagaagagcgaaaccgaagcagagcttgagagagagaagcaagagaaatcagaattgtcgaatcagatcaccgatgtccagaaagcattggtagagcaagaagctgcttacaatacgctggaagaggaacacaagcagataaacgaactatttaaagaaactgaagcaacactaaataaggtaactgtggattacaaagaagctcaaagattgttggaggagaggggtaaggaagtgacatccagagattctacaattggggttcatgaagagacgatggagagtttacgtaacgagctggaaatgaaaggagacgagatcgaaactctcatggagaagatcagtaacatcgaggttaagctacgcttgtcgaaccagaaactgagagtaaccgaacaggtactaacagagaaagaagaagctttcaggaaagaagaggctaagcacttagaggagcaagcattgcttgagaagaatctcaccatgacacatgagacttatcgaggtatgatcaaagagatagcagataaagtgaacataacagtagatgggtttcaatccatgtcagaaaaactcacggagaaacaggggagatacgagaaaactgtaatggaggcatcaaaaatactgtggactgcgacgaattgggtgatagagagaaatcacgagaaggagaagatgaataaagagatagagaagaaagatgaagaaataaaaaagcttggaggaaaagtaagagaagatgaaaaagagaaggagatgatgaaagagactttgatgggacttggagaagagaaaagagaagcgataaggcaattatgtgtttggatcgatcaccatagaagtcgttgtgaatatcttgaggaggttttgtctaagaccgttgtggctcgaggccaaagaagagtgtcgcagcgaacttaaggactcagtgccatggtacgttgtttatctttcccaagcctagtttccacctcacatgaatgcaaacaatgaaacaacatatatgtgtttattaggttttggactctggtcaatcaagaagctggtggagaggtatttttggttggggacttttggtgtacttgtgttcgattttgttgcacttttatatgtttgttaacttttgttgtattttgtaagtcaaaatttttggtttattgtgggcaaagttggtggtggtttttatgggaggtcagggaataaaggggctcacacaaatggagttgatatttttttttctttgggcgtcggattgtatagaacgattaaatgctactgttggtatagtgcttttgcttgtttggaatttgttatagtatcatctttgctctttcataacaaaattatacacatcgctttacagagtttcgttctctcattcatttcttattttattgggttttttttttttgcattagcagtcgttatatctcgccttgaatttctaatgtgaactagtttgaaatgtttgaaatgtttattctttaatagcaaccacttttttttcaagtgtttttcacaaccgaaaaagtcagccatgtgaatgatacacaaaataagtcagccagtaaggtttggtgatgttagatcaatcaaatatttgagaaaaaattccataactagttgatatttcctaaatcgaagttaattgaaaattaagtacaatttggcaatatcttaaattattaaattttaaatagaaactctattcacttttatgagtttatggaaacacactactttctcctctaaaatcagacagtgattatactttgaccttaaaatttgaaaagagtctaacacgttataattcccaattactttattatctgattaattcaccaagatacattaaatctaaaattatgtgatagatattcatataaatcatattggattattccaacaaaaaaaaaactcttaaaatttgtttccttatttacaaacaatacattactgaaaatttctaaataaaatatcaaaaagtaatttcaaaaccttgttttgtcaatttaatatttttatttttacaaaaaaaaatctgaaacatgcaaagaagcacaagtaaagtacaagtggaaatgtatgaaaataggaatcataaaactaattttttaatttaatgataggaatctgaaaaaagcaaaattttatcacatcccgaataaagaggaaaatgcaaaatatgtctccttttctcactatgacaggttgtttctttaaagaagcaacggaatttaacattatagcaaacattaactatcaccagctatcatgcgcccacctctccaccgtgctctccatcatcatcattccatatataaatcattcacttgtagaatcttcttctctttcacactaaaattcatcgatgacggatcctcccagacccgacccgtttcctgttacccgactcgattccgacgccggtgctctcttcgtcctccaatcaaaaggttaaacccatatatttatgatatcaatctccaattttggaattttaactgatttgagaattaattctcaggcgagtggtggcacgccggatttcatctaacgacggcgattgttggtccgacgatattgacattaccatatgcgtttagaggattaggatggtggttagggtttgtttgtttaacgacgatgggactcgttactttctacgcttattacctcatgtctaaggttcttgatcactgtgaaaaatccggccgccgtcacatccgtttccgggaactcgccgccgatgttcttggtatcattcaaaatctcttctttgtatttattaatttgctttttttggataaatccgtaaaggttggatcgtgtttcgatttggatactttgacttcttgttagattcgccatcatcacacgtgtcttagtttaccgtaccggtctaggttaggcctgtgtatttcggtttatagatcggtttacgtcataaagtctggtctttccggttattgagttttgggtttaagggccgatttcgaattttgagccggttattgtgatgtggtgcaggatctggattgatgttttatgtagtgatctttattcaaacagctatcaacactggaattggtattggcgccattctacttgcaggtcaatgtcttgatgtaagaaagaaacctaaattttgattacttgttaaacaaggtactataagaaccgtacggatcatcctctgtttttgtgttactacacagataatgtattcgagtcttttcccgcaaggaacgttgaagctttacgagttcattgctatggtgactgttgtgatgatggttctctcacagcttccaagttttcactctcttagacacattaactgtgcgtctctgcttctcagcttaggatatactttcctcgtcgttggggcttgtatcaacctaggtataatgattcttacgttagcgaagaaacaacaacttactaatgttcgaaaatttagattcattgcccagttttggttctacaggtttgtcgaaaaacgctcctaaacgtgagtattctctagagcattcggattcagggaaagtttttagtgccttcacatcaatttcgatcatagctgctattttcggaaatggaatcttacccgaaatacaggtgagaaatgtttgcaatttattcaatacaaacattgtatgttatgtgtttgagatttatgagatgattatatgtatgcaggcaactcttgctccaccagccacagggaagatgttgaaaggactattgttgtgttatagtgtgatcttcttcacgttttactctgctgcaatttcgggatattgggtttttggtaacaattcgagctctaatatcctcaagaacttaatgcctgatgaaggaccgactctggctcctatcgtggtgattggcttagctgtcatctttgtccttcttcagcttttcgccattggccttgtaagtttataactagtgtgatcgttattcgatgttacttggctgtgagacgagtgactaaatgtttcttttttttggtaactggttaggtgtattctcaagttgcgtatgaaataatggagaagaaatcagcggatacaacaaaagggatattctcaaaacgcaaccttgtgccgcgtttgatactaagaacactatatatggcgttttgcgggttcatggcagcgatgctaccgttctttggggatataaacgcggtggtaggagcgtttgggtttatcccactcgatttcgtgctgccaatgcttctatacaacatgacctataagccaaccagacggagcttcacgtattggataaacatgacgataatggttgtgttcacttgtgcaggactcatgggagctttctcctccattaggaaacttgttcttgatgctaataagttcaagttgtttagcagtgaagttgttgattagatggttttgatagtgtgataaaaacataaacaatacttgttttgtggttacacttgtacatgaatttctcgagttgattcattatcacacaaaatgcaaaaccaaactagttacaaaatgcaaaaccagacaaggattatcacacttacgtcaattgttcttgagatgaatatgttttttttgttaaatgattttctatttaaatacaaagttcctttgggtataaacactaaacagattactgggttcagtaaactctctcagagtgtgttaattttcagtattcgtagctgattggttcggtttcggaccgattggatatccaccaatccgaaataatacattacatattattaattttatgctcaattcggatcgtgtaattcagaatttcatatttgatatagtaaatttcaaataattttgataattctgatcggataattcggatattttggatttcatcggataattcaaatccaaataagaattaaaaccatacatattttggtttcgaatacacttgggattctaaaatatcaataaaaaccgatttaagtctaaaaaaattagaatcataaaattgtttggattctaatcggattctatcagacctaatctaatctgatccgatccaaaattcgaatgcccagactatcacatactatggtcatggatttcggagcggatactccaatctcatttgcattttgtcttcttcttctttttttttttaattattaaaaattaccttaagaatctaaatggaaatgcaaaacaatgtggacgtaaagaacttaggatcaaggtaatctagcaacaacaaaataaatggatatatagtaaatttaaaaataaaatatagacacaataacaaggtactattttttaatagcatttcaatataacaactaaaaacaaatcatgaggaacaaaaaaataccgaaaaaagctcgcgcatagtgcagatactcacctaattatatataaaggtttgtattcatatagtatcttttggccattttctgtaaatatatattatattgagagtatgatttgaggatcttcatcataaatgaaaaaaataaatatatgtggggacaagatcaaattaatgatttatcatgtgatgtatcagcgatagtatttgttaaatactatttctaaggtttacgtgttaggattaggaatttaggaacgagcacgaatagtcaacatacagaacctaactcgttttgtgttaattgttttagacacatgtgtgtaagtcagtaaaagtttttttcctaatggcaaaagtaattcatccattcaagatagaaatggccattttctttaagagaaaaccaatctgatgaaatagagtttacttagaaaaagataataccacatgatcgtgcttttttgcaagacactcatgtggaaaaagagtgtttgaaagagctaaaatcttctaattctgacagtaaaagtttaagctcgtttatttattacatttttcgtcattgtcaactaactatacatgagtacttcataaaatccatgtgatttagcttacaaaaaaaaaaaatgtaattacgtacgtgtatagaacttaaaattcgctaatggtttggtaaacgctagagttggggcttaataatggttaaccaaattttaccacaagtcactaaaatatgatagtttagtatgattattgtagtactataatatatagtcagttgcattacattcacgtgaaaattccaccaagctcgggacacgcgtagaggtaggatatcacttctcactttccagacatttaatgatttttaatcgagcttatgggtcaatcatatctatcaatttttattttcttaaacatatctatcaattactctaaattataattaaaaaaatgtattaagctttgtgatatacaaaattatggtcagttcaattagttgagaaactttcagcattaatagatctaaatttggccacatgagataattatgtattttactagaaaaatgttaaattagagccaaaaattccaaaatttcaaccaaaaacttagaatttttatttgtctttcactaagaacgtcgttatcgtgggattaaatatttaattaataaacattagctgcaatactttcatgttcatacatatataaatgttaaatgatcagaccgtgaagcccataagaccattcataattaaccaccaagtacccacttctctctctctctccatacatatactatattatagataaatatcccatcaatacgtaacaaccaccgagatattacaattcacaggtttctagctattttatatagttattgtaaaccaaaagaaaaagatttttggggatagatcaatctcttgcgttcatttttcttctctttggtacgaaaatacaaagatggagatcaaagtcaaagcaaaagatgtagagtcgacaatgatgtcaactaaagaggaggatgagatcaagaagatgaaagagtgtgtggtgattcagaaggcagatgaggaggttactaaaggacaagaaactatgaagattttggatggttcaagacaaaaccaagatgaaacaagacaagctgattctaagaatattgactcaccatcatcatcatcacttgagatgaagaagaagttggaaattggtaagtttctaatctttttgtccctttatgtttgataaaacgtcttcttcttatccttttggtatgactaattcatatattaaaccaactaagttatgcttacatgtaacaatttgagacaaaaatataacaaccccttcgaatttttctcttacatttatataccaagtcttagaaatttgggtgaaaaagatataggaattacaattttttccaattttttaaaatttttttattcatttacctgttaactcttttgggaacagagattatcaaaagttaagtagtgtttcacaaattttgcagaccaaaaatttacgagtcaaaacgaagaaaacaccaaaaaggaagaggagaagaagaaagagaccaacaataacaatctttctaacatgaagcataagaagacgagttcacacgtatgggactgtgggagcactctctacgactcgttcgagctcaactcgttcaaacgtcaactcgactcagccatctctgcttcctccgccagaactatgtccatgtctcacctccctgaccgccgtatcccttctctcagctcactttcgccggagtactctcctcctcttcctcctccaccgacaacttcttcttcctcctcctccggtggaaagaaacactcgaacaagatctctcgttctctacagagattcttgaagtcaatgttcaaacctaaacagcaccaaagcttaaccactccttcttcgccggtctacaaggcggtgggtcacggcggtggcgataaagatcgatactacgtcgtttacgacaaatcgggttcgttgacaactattccagagtcaacggagaaagaagtgagccccgagatcaactctcttgttaggaagaccgtgtccgagagattcccggcgagtagagtcgttggtatttcatgtgcatgattataatattaatctaagtcgtatatttgatataaattaataaatataaacatgttatatgacttatgagattagagttattttttttttccctttttgtttttataaaatatacattttggaaatgaataatcgtgttgaaccttggacgtatgtgaatgtatagaagttttttttttcttttcaataattaatgtgtagaattgaattttgatgcatttatgatatgcaacgtacgtatcgtaaccgtttagtgtagattttatctacctttgaatgtgatgtataacaatagcaagggttataaaggaaactacgtgacggttttgtgttgaagttgaaaaatatgtgatggagttacgttcagatatagtggaatatatttattaacaattcatatttaatgagtcattttcatggtgacttgtgagtattgaaaattaggtgtggactcacgttatgtttgcgcgtttgatttattattgattttgttatgaattttaactacttcatgtaagtagacacaaagttaaaatacaaatttttgttataaattttgtgattgatgcacgacatgaggtagggtctataggataagtcaattaaagtgttccttaataaatgaaaggtagatataataatagtatatagtatacaccttggttttatttaatgcattgcaacgtcttcaataacgttgatgttttgatgagatatgtctcctctatctatgtaccataacctcgatttatttgcgtacggcgaaaataatgacattatattatacgttttgctttgaatctacggactacgaaaaattgataagtcctataaattcattttgtcttatttcatctaattccactaaattaaaggttagtcaatgaatgattgtaacgatatgtgaaaatgatgaaagatgattagttgttctgttttgctctgtttcttgatcgttctcgaagattttagtctgtataataactctattaagtgcagtggcgttgcttaatatatagcaattcataataatgaagaaagtgtcatccattccaagaagtaaacactgagtgctaattttcttcagcagtctagaagaagagagacaaacaaaacattatcaccattctcagtcaaaagaagaaagcatgtgtttaccaaaaaacaagaaagcatgttcgtaattttcaattgaaccggtatcgtaatttttgattaaactcggtttactcggaccggttcctttatataataagattgttgtttttaggtttccggtgggaaccctaaacaagaaaacgtcattgtgaagcaattccctatatctcaatgcacggtcgtaagagagaggaggatccgaatccagaggagaccgcagctaaagcccttgagctccggtctctccagtcccagttcatgtccaatcaccatcaaaagatgtacatacagtcttcttcttcttctctttcctttctctctcaaccaaccaatcatttgattttggttttccagttacacaaaggaagcaattcaattaagcgcgaagcttctaataaccaatccagagttctacactgcttggaactatccgaagctcgccttcgagtcccgactcgacgaggactctgatccaagcttggtcaactcaattatcgatgaagaactaggagtcgtgagtggtttataattgctagctgtgttagcttgcacatcccattcatgtgaaagttttctcatgatctcttggttgttaatcctcaggtacaaaatgccttggagaggaatgtcaagtcatatggggcttggtatcatcgaaagtgggttttgagtaaaaaagggcattattatccctccttagaaaatgaattgcaacttttgaacgactatcaaaagcaagcccatcaaaagcaagacgatgaaaagcaagacgatcccagcaggaactttcacgcttggaactatcgcaggtgagagaaatacagggccttgcttgattcacattgtcaatttcttcatatcttgtcttgtttcaggtttgttgtggagctaaccaagacgtcagaagaggatgagttgcagtatacaactgatatgatcagtgatattagtttcaccatctattctgcgtggcattatcgtaggtatgcttgcatttttaaagaactagttagatggtgagagagagagagatgtatataatttgctgttgtttctgcagtgtacttgtttcaagtttagtggcaaaaaaggctgatgggtttatgccaaaggaaacgattcgtcgtgaattggattatgtacatagtgctatttttacgttagaagagaaacaaagtggctggttttattacctttggcttcttgatcagactgttaaaatggagattcctcttcgcttttcctcgtggccttcagatggttccattatcattctatctggacctgactgcttcaatgcctcttcttctactactaagttgactactttctgttccgagtctggttcttttccactgattctttactttgaccaagccgtaagtggagtaagctcgtcaactgttactattggatctgaactcaaagaccttgtttgggaaccagtttcggataagaaaaactctcaagtggactcttgtgtttgggttgctcgtctgaaatttgactgtagagaaccttgctttagtcgtaaggaaaccaaagtcaaggtcagccttggaggaattgtttcttccatgggatgtaacttgaccgctccttatgagtttgtatttacactgcgtattcatgacactgtcgaagtagagttgtcacaacaagaaagcattgtttcatggacggatggttttgacaattgggatgataatgcactgtcgaatgatttgaattctcttaccgccttaaacgctgatacgggttttgagtggcgtaagaaagctataaagatagagattgaactttttcgtactttgcctgacaggtacaaaataatctttctagatttaatggaaaagagaaatttgtatgtagtctcttgaccttttgagttcttgttctttccttgtttagcaaaattggaaagctcattcttgcaaggcttttgatggctgaggaaactatgatctcaaatggtgtccattataaagaaatcctccaactgtataacgatctaatggctcttgattcttggcataaccagtactacaaggatgagcacagcgtagctctaatccacaaggtacatactttttcctgaatctcttaagttgagtttctactcttaaatctctcaagtcatacagagaatgttgatgcacaggtgacttcaagaactgaatccatgtccagacacctctttcggtacaggaatatgaacaatattatatgtttaaggctcaataacttaacactatctcggatagccgcggtcgagaagttgctatttgtccaaatgttagatctcagtcacaatgagcttcattcagctgaaggtactacattatgtagtgttttctaactctttttgagtcttgttcagtatcagttgttgcaactttaaaatatgtatgggtctgtatgtaggattggaggcgatgcagcttctctgttgcctaaatctgagtcacaacagaatcaggagcttttcagcgcttgactctttaagacatcttaagcagcttagagtgttggatgtttcacataaccacatctgtggggaactcccagtagacacaacaaggtacctttgttcttcgccgctctctaattcgggtgaaactggaagagaggtgcctaataaataccaggatgcgtatttggtgcttagagatttgatgaaactgaagcagttagatattagaggcaacgacctaatatttgcaggagaagagttcagctcctttgtccgccaggttgtgccaaagcttgtatggcttgatggccacaaactcacaagttaaatgttagttaggccacttctttttacttaagaaatttttttcgtttttttggttcagacctaactaaataaattatggcacttgtgtgtttgatttggtttaacctgacaagcaagtttcaaacacgtcgaattaaaaacataagaaaacacaaattcattactaaaatcaacaaaagaacacaacaggttcacaggtttgtaagacaaaagccaataaaaagaagaaaaaggaaataacaaaaggaagaaacagagtttttatagcaaacttgtagcagctggattgcctgaaacatgtccatggctgagaaaccggaaaagatcttctaacggaaagtaaatgataagttgaggttatcagagattatttggacctcacacttggctgaagctactctacgaagcttcttaagtttcttgaacactttcatcacatcttcatcctgtggtgtattgtagtacaatgtcacttgttcaagatccggcattgtctctaggaattgcttgacctgctttatgtgatccgctacatcttcaacaatttcccaaaactcacaatcttcttcaatctcccaaaactgacaaaaatcaccagtgtcaccaaagttcaatatctttataacctttaccgaacttgatgataggcaagcatcaatatccttcttcaccctcatattatccagatttttgcacatgcacggcctattctcgtccccgcaagatcttcttttcctatatatatgattcagtccctgaaacataaaagaattagtatcaaagtctgattatgtgtgtgtttcaaaagcatctcagtcattgatttataggatgtatacagtacctcgaagacaagggtttgtagatttggacagttcttgagtagaggtggtaatgatttccatcctacatgtagtccagtcttaatagttaactgaatcagattctcgaataccggcattgtttcacggcagcaaccaagtacctaaaagaaaaccaaatcaacgacatatataattactcacttgtcaatatctgagtagaaatttaaaagattaggagaaagatgtgactaaccttgagagcatcttcagtcaagtagagaatcttgacattacatattcccatgaaaagctttgttacattattattgtcatttttaatctgtttagaggtcttacaaagaccaagacgagcttcaacaagcgagtcaaacctcacatgttgatacttgtccgcaattgtatccaagtactctaggtagactagatttggaatatcaaatgaccataacacgatcggtttaaaatctttagccttcacaaaattttcaaaacgagaaaattttagtatcttcagagttgggacagacacggttacgtagcaaggttcaggttctgaagactcctcccatatcaaattcatcagcaataattctttgagcatgtgacagccagaaagaagtttctgaaacattctagtatccatcttaacataatcaagatggagagtcttaagcattggaagagaaacatcacattccacattaacgttgacaccatcctgaaactgtatcttcagcctaaccaatgtcttgctcacaaagatctctgaaggcagaggataaaaagtcgagttggaaccaaaaccgcgagatgacgggatatgtagatcaatatctaacacaccacgtttcaacactttaggtatccattcaagcaccgagttttgatcaacaccttcacacttaacgtagaatctgttcaacgtagcattcgcttccgcttgcaaagtcaatacactacccacgaaaagcataaaactttcagaaccctttctcctctcttcacaagtcattagaggatcgaaatagaaggattcatcaaagtcaaggtttggcataaaagcaagcaaaggcttccatcttttggcaagaacagtagttgaagcagcttcttttgttggaaggaatgataagatgtggcaaatgagtgcgtctggtaaaccgctgattatatctctaggaccatcaaaacacttctttttcgaacccattttgtgaaagaaacagatcaacacttacaacctgaacaaagacatgtaagtcttgtaagaagaagcacgtgcccacaaaaccaaaatcgttggagagacataccaaatgagaagtgagaccataagaatgaaaaatggagaaaactttttttagaccatttcattagctctatatttaactctaaaatagagagggtttctcaacaaagtatgcatgtattctctattctaaaaagaaatattcttaaaaatattatatttctattttatataataatgccttatatttatataatttataatttaactccataaattatagttttgcaatatttccataaattatgatattatttaaatttaaaattcattatattaaaagatattttctataatatatatattgaaaaatgacctcgatattttcaagtaattatctaatttttaattaaaaatatactttgacaagcaaaacaataataacacagttacaaaatatgaaaatatgaatgattctatggtgaatttttaagaaataacttttaataatacttttatttttgaaattatataaaaaacattaatgtaagaaattattatgatccctataaacaatttttttgcctccaccactagcctctctatgagtctcttactaatataattaactattagtgtttttaatgtaattaaattgtttaattaaattctaaactataaaaaaaaattataaccaatcataacaggaaaaatgtaatttggattttttagagtttgttgtttaagagagtcttcctactctttctcctcactaattacaatttttcatactcttattgatgggtctctaattaagaagaccatcaatgaaattcactttaaatggtcatagtataatttataaactaaattaaataagtgaaattcttctataaaaatactatttggtttctatatattttgaaaaactgggtgattggttcgtctgtatctgtagatttattgcaataaaaactttattttagctgtaatgattgtagctgtaggttttatttatgtagaaattaggtagtatatttttactaatataaaattattatataagtaaattggatttagcaattaaatttggattgtatgtatgtatttttaaacaaaaataaaattggtaaataatagttatgtgttatataatattattctcaaatatcaattttataaattatgatatacataacatatatatgatgtatttaagaaacgatctgacttatatatatatatatatatatatatataacccaataaaaagagttatatatatatatatatatatttcataaagaagtttttttgcagaatacttatatccacaaaaataaattttcataatatatatggatgaaactataataattgttttaaaaaaaaaacaaagtggaaagaggaagaaaaaaatggtacatcccacctaaataccataacattgtattctaaaaaattgtacttacaaccaaaatataacaaaaatattgtttaggctgtgaaaaaaataggaaagctaccataaggattgtagcttttttgttggctttattaggcttgggcaaaaaaaacgctaaccgaataaccgaaccgaaccaaaaaacatggtttggttcgggtttggatagtttaaaataaccggctggatattatatgtcttagatttcggtttcggttaggttagtaaccgataaccaaaggataaccaaagcatatatgtatgatagataatatatcacatatattgtatgtattgagacttaactatgttattctctttattagtttgcaagttgaatttcgtgagttgtgaatcaggtgttttaatattatggagagtatggaccatatttgcatctttgtgagttgtgaatatgtctttttttacgtacgttctatatcagttattggtcaattgttttagttgtttcgttttttagtcggttatttcggttttggtttatttatggttaccaagtttaatatccgaaccgaaccgaaccgaaaaatatctgaaccgaaccgaaccaaaattcctcaaatatccaaatggttcttatattactataaccgaaaccatacgcaaccgaaccaaaaccgaatacccaggcctgtccaaatggttcttatattactataaccaaaataaccgaaaccatgcacaaccgaaccgaaaccgaatggttaaccgaatgcccaggtctgggctttatacatattctattgcccaaccaatcataccccaaacatttttttaaaaaaatattaaatatattgctcaacaaaaaatattatatacaataaaaaaatgaaatcagcaagattatccataacaagggacatgcaaaatatcatggatctgagttttgatacaattctggaaataggtgtccaaagcttatggatccaaattcagatatttagatattttatatgatattttctgttaacctttttactcattgaaataatagttaatcttattttcatctatttttttgcagatatgtatagtcgcatatattggcggatctagatcttgaaatttgttttatggatctaacggatccaaatccggatagttggtttatagatccagatccggatagttggataatggatccagtggatccggatctggatagttgtttcacggatcatctagatctgggtagcccaaaatttcacggaaactaattcgtgttcatctttctatctacgaccggaaaaaaaaacaacttgagaaattgaaggagttcgatgatatgagattattacctgtttgagtaaagcacggaatatctcgtctccagattactaaggacttttctcgaacaccgtcgtcatgtcctttggttgttttgaaaagtaaggagaaaaaataggaggccgagcaaatagatttaattaagattatgttatagaattcagagtgacgtatatttatataagatggtcaatatattgtgaattctagggttttcagaagatttatttcctaaatgtaataagtttttcgagacaaatatttaaaattttagtaaagacatttgtttgataaaacttggaaaaaaaataataatgacgaccgactatattgttaaacaatatcttactgacaaaattgaaataatcgcccatcagatgtttaaagtaaaatatttcaaataaagttccatagaaactattcctggaaactgttctccggagaggtccatagtcctatgcggagtgaatgctggtcctccagaagtggcacccagaaatggacccattcacactcaacttcatacccttttggatccaaatcagaggtataccactacagttcctgaatcgtggggtgattgactcaattgctatgtctcttggcgacaagattgatgtcgactttgatgaagacaatgtttcacgggtgcaatttgtccgagttcgtgtggcgtggaatgtggatactcccctgcgtttccaacgcaattatcaattctcaccaggagtcaacactatcctaagtttcttctatgaacgtcttcgtggtttctgtgctgtctgtgggatgattgacgcatgattctggtcgctgcttactacatgatggtggcttggagaactctgatggcgacaatgacgataatgatgaagggaaccagatggttcagggcaatccaggtgggcagattgaagaacttggcgagaatggcccacctgtcattgatgatgttgctgaggggaatgataatcctcaagggaaccaaaacattgctgaacaagggatgaggggccagctttccgacattgatcctcatcacaatgcacttgaaggcatttcatctggtgaatgggcaagtgagggtatcaatactattaacacttttccttcttttgttactgattcaggggcccctccaagtgcgaaggagttacttgacagggagcttcgcaagaggaaacagatctatgaagatgacgagagcttcagcccccgtaagaaaaagataggatttggtttccagagtatgttcaacaacatggaggaaggcagtggttcaggagaaagctctcacaacaaccaaattgacggagccgcggtggggccggtaccaccaccagtcccatgagagttggattttggaactgtcagggaatgggacaacccttgacagttcgacgtctagaggagatgcaacgtgtgtatctcttggacttgatgttccttattaaacccaagcaacaggacaactacatcagagatttgggagtcagcttgggttttcaaaacatgtgtatagtttctcttaggggtttaagtgggggtttggctgttttctggaaagactacctttcagttcaagttgtttctcatgatgtaagattagtagatctctatattcaatataaatcttttaagttctacttatcttgcatctatgggcaccctattccaagtgagagacactacctttgggagaaattacaacgattatcaatgaatcgttatggcccttggatgatgtgtggagatttcaatgaaattttgaacgctcctgaaaagaagggaggacgtcctcggagtgtcaatagttgcagaaattttaacaacatgatcaattgctgcactatgacagatctcaaatataaaggaaacccttttagttgggtggggaagagacaaagggaaacaattgaaggttttttggatagagttttcatcaattcagattggcagtctatgtatccagcttcagagtcagaattcttacaattggcaggatcagatcatgtccctgttattattgatattgcagaggaggtgcaagcaaagagaggtcagtttcggtatgataaacgctactctcggtgtgatgattttgttaactcagtggaaagaggctggactcggggggtaacagatgacatgggaggaattcaaaataagttgaagtcgtgccgcaaaaaattatctttgtggaagaggcgaaataaggtaaattctgcagaagctatacattctctaaaatttcagttggatgatgcagagcggaatcattctactcctttgcataagcctcacggcctaagaagagacctcaaccaagcatacagagatgaggagcaattctggaaatcaaagagcataaataattggatgaagactggtgaccgctacaccaaatattttcatgcagtagctaaagtacgaaaagctcggaataggttaaaatctataacagatgacagtggcgttgaacacgtgcgaggtgaagctattggcaaagttttcgaaagctacttccaacatcttttcgccacagaccagaccgcagattgtgaagatattatcgctgggattgaactaaaagtcacgtctgaaatgaacaggaacctgactagtccggtttcagaccaggaaattaaagacgttgtgtttctaattggggcagacaaagcaccgggttttgatggtttcactacagccttctatcaccaattttgggacttagttgggaaagatgtctgtatgatggttcgtcacttctttgactctagggagttagacaaatcaatcaatcatacgcagatttgtctcattccaaagactctggatcctctccatgcagctgactactgtcctataagcctatgcacggtgaactataagattatttcgaaaatcttgacgatgcggctcaagaattgtttgggagttataatctcagattctcaggcagcctttgtccctggtcgtaatatatctgacaatgtactagtggctcatgagcttctacattcactcaagtcgaagagggagtgccagaatgggtatttggcgattaaaactgatataagcaaggcctatgatcgggtagagtggaacttcttggaacgagttttatgtcagctgggtttcgatagtagatggcttcactggataatggcgtgtgttcggaccgtcacttatgaggttctgatcaatgggtcttcttatggtcatattcaacctacacggggtatccgccaaggtgatcctttatccccgtatttgtttctcttctgcgcaaaggtgttaagccaaatgctagataaagcggtcgtgacccgacaagttcatggtatgcaattagagagggaatgtcctgtgatatcttatctcctcttcgcggatgattcactatttttttgtcgcgcaactgagactaattgtcagaatatggtgaacattttcaagagatatgaggagatttcaggacagatgattaattattcaaagtcatcgattatctttcgaatgaaaatcccggaagtgaaaagacgaagactgcaacgtattcttaatatcaataacgttggtgggggagggaaatatcttggtcaacctgagcagtttggaaggaaaaaagttgaaatgtttgagtacatagtcaaacgtgtgaaagaaagaacagagggatggtctaacaagtttctttcccctgctggaaaggaaattcttataaaatcgattgcgctagccttgcctgtatattccatgaactgtttcatgttgccgcactcaatttgtgatgaaattcaaagtgttctaactacattttggtggggtaaagagaaaggaaagcgaaaaataccgtggattgcttggaagcgaatgacattaccaaagaaagaaggaggacttggtttcaaagatctccatcatttcaatagagctttgctggcgaagcaggcttggagaattttgagaaatcctcagagtcttttggcccgtctttataaaggtatgtatcatcctcaaacctcttatttggaagcggtgacaggaacctatacatcttttggatgacgttctatacaacatggaaaagagttactttgtcaagaattacgagtttgtttaggaaatggtcaagatacaagggtatgggaggacccatggttgcctacgataccaccaagaccagcttatggaccggctgtgattcctaatctgacggtgtcagatctttggaaggaaggtttacgagaatggaatccagtgatctttgaaggtgttctaaacccggaggaccaacagctagccgagagcctttatctctcaaagtatgcagtacaagattcctatgaatgggcatacacaaagaatgctcagtacagtgttagatcaggatattgggttgcgactcatgtccatttcgatgaagaagatgctattcttcctccaccaggttctattgccttaaagaaggaaatctggaaattacctattactcccaaaatatgtcatttcctgtggcgatgcttatctggtgccttggcaactgctactcagctccgaacaaggatgatccctgcagatcctatatgtcaaaaatgttgtcaggcggatgaaacggtgaaccatattctctttacttgtcctttcgctgatgtagtgtggaagcacgccaatagtattgtgggccacaacagattctcggatagcttagaatataactttggtctcatgattcagttcgctcatattccctccctgcctcattttcaacgtttattgccgttttggattgtgtggagactatggaagtcccgaaatgatttccttttcaaaaagatcatgcgactgccacaaaccgaagtacacatgggacgatccgaggcaaatgaatggctggaagcaaacaattatactgaagacacaagaggtagccaattaaacaaaaatacgggtcaagatagaggttctcaatggcgatcaccgccaagaggatgggtgaagtgtaattttgacagtggctttatgttgggacgatcttttacaaatacgggatggttgataagggacgatgaaggaaaagttttatttacaggctgtgcaaaactaccatcgactcagtcacctttacaggcggaagctactgggttgttacatgtccttcaaatagtctgggctcgtggaataagaaatgtttgctttgaaggagacaaccaagaacttataacaactatcaataatggtgatgatcattctcaaataggggatctcctgttcgatattcgtcattggatggcaaaactatccaacgtcactcttctccacgtcaatcgtgaacgaaatagtgctgcagataagatggctcaatatgttttgtctactactactctgtatcagtcctttattgttcctcctcgtttcttactctcttatttgtatcaaccttatacaatctaataacgttgtagtagtagttgttaaaaaaaaaaaaagttccatagaaatattgtaaaaatatgtttaattctatataaatttctaaaataaaatatcaatacaattaaactgaaataaaactctctgtaactttgacacatcagcctttttgtgtgatgagaaggtggcacatcattaaaacaagaaaccaatcaaaacatcacaaatactacacatcacattaatatctgccacatcagattaaatggatgatttcagcttgttagaaatgaaaaattaaaaagcttgaaaaacctgtaaatttctctttgatctttacgtctttactttctcagtctcgtgtatctattttgaatatttgtaatactcgtatctgtttttaaatttaattttaggttagattttgtaattaatttaaaaactgatgagtgctaatttaaaactttttgttcacgcaaaatgtgatcatgttcaaaaggaaaacaaacgagtgctaattttcttagaaggaagagaagagagacaaacaaaagataaccaatattctcagtcaaaaggaaaaaaaaaagacattaaaccaagtcagtaaaggaaagaacaaaaggcagaaacaagagaatcttggattgagtttagcctgagacaatatccatggctgataaaccacaagaagaatcttctaaagaagagtacctcgtttagtcgaagtagatgacaagctgaggttcttcgatgatatttggacattgcaattagctgacgctactcgaggaagcttctcaagtttcttgaacactttcatcacatcttcatcttttggtgtattgtagtacaatatcacttgtttaagaaccggcattgtctctaggaagtgcttgacatgctctatctgctcctctacgacaccaccaacttcatcacaagacacagcatcttcatcatcatagtcatcatgatcaacatcaagaccatcctcattctcatcctcaaaagtttcaccaaacttcaatatctttagaaccttcaccagacttgatgataagcaagtacggacattcttcttcttcttcgtcccccaatgattctcatatttgcacaagcagccgtccttgtccccacatctctttgtatacttgtgatgcagcccctgaaacataaaagaatcagtttcataatcaaactatttgcttaaaacgtttcaacaattgctctaaaggatgtgaatagtacctcgaagaccaatgtttctagacttggacaactcttaagtagaggtggcaatgatttccaacctacatatggtgtagtcttgatagttaactcgagtaggttgtcgaataccggtattctttctcggcagcaagaaaggacctgaaacacaaaccaaatcaaatacaacatcactgagttatgaattgtgagcccttaatcattgctctactaatagaaacaaaagtggttaataataagattagtagaaagatgatactaacctcaagagtgtcatcagacaagtaaaggatcttaacattgtgtattcccatgagaagctttgttacattaaccttgtctgtttcatcctgatcgggtgtctttcgaagtctaagattagcttcgacaagcgagtcaaaacttacttgtttatacttgtccacaataacatcagaatattcaaggtaaaccaaattcggattatcaaacgacaatgacactccctcgttaatgttctcctcatcatagtcttcataaaaatgaaactcaccctcatagaaatcttcagaacggcaaaaatttagtctcttgagggttgggatagacactgacacatggcaagcttcatcttctgaagaatcagcccacatcaaattagccagcaccaactcttcgagcgcgtgacagccagaaagaagcttgttaagcatactcgtttctatcttaaaataatcaagatggagggtcttaagcttgggaagagaaacaccaccttccacatcaatatggacaccatcctgaaactgtatcttgagcctaaccaatgtcttgcttacaaagatcttagaaggcagagaataaaaacttgagttttcacaataattgcgagacgaagtgatgtgtaaatcaatatctaacacaccacgtttcaagactttgggtatccattcaagaacccaagattgatcaacaacatcttcacacttgacgtgaaacctcttcaacggagttttcgttttcgcttgcaaagccaatacactatccacgaaactcataaaactttcgtaacttttagaatacttgtttcttctcgctcgaggatggaaatagatggagtcatcaaagttaagatttggaacaaaagcaagcaaaggcttccatcttttggcaagaacagtagttgaagcagcttcttttgttggaaggaatgataagatgtggcaaatgagtgcgtctggtaaaccgctgattctatctccagaaacaccaacaacaaccttcttcctcgatttcatcttgagacagagactgatcaacaattacaacttgaatgagtcaattttctcagaatattcattgcacggtttttaatccaccatgaggattaaacttgatgaaaccaagatacagatttaatctgttaaatacatgatacatcttatatgcactaatttaagaagatgaaagacaaacaaaagatgatcaccattctgagtcaaaaggagaaagcattaaacacaagttattaaaggaagaacaaagccaagagcgatgcttagttaaaatagtctacacaacctaaccaaaactccagtttaccattacaaattaagaaaactagatttggcataaaaatgaaagcattagcccattaagagttgaatgaagctatgtacaaggcaagcgaagaaaatgtagtttagcacaagcctctaaaccttgactatgcttatgagctttgagcaagagatttggagacaaaagcggctattgctttcatagcgacatcttcgacttcctcttgtgttaactcctttgtttcaaggtgtttcttcccaatcttgaaggagtgatctccaccatcaatcacatgaacctcagtcacagctttcattttattacaaacagcttcaagcttattcagaggacacatcggatctttgcttcccttttgatacaaaaacattcataatccaaagacccaattataattcattcatgtgcaacaacataagagttatgttacttttgcataaaatacctgcacaaacatcacagggactcccatttccagtagagtctcgtctcttatcgcacctttcgcgccctgaaatcaacgtatacccttaaattgctcattcatacattcacgagaacaggaatcaacttttcacggacataaatctcaaaccttaagtggatatcctaaacatatcacagctgaaactgtaacatcttcattcacagctgaaaccatacagcttactctgcaaggtgataacaacatcacattaaacattgaaacatacccaaacaaaacaacgtgtgtgagctggacacaagaagaaatgtacctagaacccattgatttgccaactaatatcaaaggatgaccagggaatttagcagcagtttctttaacaacattcaaatgaaactctatcaatttctccgctttcggagctactctttttttcccgtcagcaagatctacacatcaattccacaattgaattaagctttaaagtatgaataataaaaatttatgatttcacagaaaattcactcacaaggatagtcaaatgtgaccacttcaacagcttctaatgtcttctttaacatttccttccatctacatcaaacccacaaacatatattgagcaaattcagactaagtgaataaactcagaagaagattagtagttacctaatcatccagtcggaagaagagggagcaccggcaccgtgcgcgaatataacgaccggcgaacatggaatctctgattcttcattcacctttcttcttttcctccgtgaagccatcgagaaacctggaaatctcagacaacagttgactcaaatccccaaggaaaatgggatataggatttgactttcgcgccaaattaattgggccactaaaacttgggcttctgaactaaaaacaggcccataactatttttgtcgattttagaaaacgttaatgatagttaacaccgtttatcatacctttgacaattcagatttccttcttcccaaaacaatggcctcccccaccgctaccgttaccgttaccgttaccgtcaccgttcttttgttcacgttggctctctccgtcgcttcttcaacgccgggaaatgacatcatcgacaaaagcctaaccaccacttcatcagccgaacccgatccagattccacaaacccaagcctttccgaatccgatgaggtcacagtgccggtgaatttcgtcaacttccatccgatcaatcgtcatttccctagacgtccgttaacgacgacggctcctttcaaacgccaaccatgccacgagctgttgggacgtggtcttcagatctcttacggcaacgacatgatcttctccagcgaagaagtcaaggcgacaggtacagacgtagatattccggcgattaagatctttgtcggttccttcgcgtcggaggaggaggatcatagctccaagaagattacggtgaatttagtaaagcgtaaagagaatatgttcaggagaaagattcgcaagtttctcaaccatttggtctgaagaacaaaactcgagtttgttgtgttagaatctaaggaacatttagagaagcacattctggtaaataaatatcattatccatatgatgtgaaaatgatgaagatgattttgtctatataacaaattcagtagaatatgatttttgttttgtgaaaccttaagtctataatttgattatattagtagtctatatagattgtctcaagagtcaagtctcaagtgatttgattatgaagatggcaataaaacttacattaatctacatgtagtctcttagctttggagaattaggattggttttcacaggaaccaccttgttgtgtggttgcgcttagttcagggcaaggtgtggggttgaccttgtcagcggctcctacgacatctgagcatttccatattggagacctttttgttccggtcagtgtaacattggagaagcagagattggtgaaaggtgaatcttttaatccctgaaccatgccagcacgctcgactttgatgccccatacgttcttgatcgttatgcctcttactatgggaagagcggatgtgttgaatttatcgtctggatgatctccggtgtcgccagagatcttaatcccggtccggactttttctaggtaaaccccggagattgttatcccctgtatgcttcctcctcggccaatgtttgtcttgatgtggatgccgataccagaattgtagagagtgatgttttcaactgttacattttggattccgccagaagtttcgcttccgatggctattccagcaaatggggaagatccagtgatgcggcggatggtgatgtcacggcttggacggttgtatgcaatgccatactcgtcccaaccgctcttcaccgcaacaaggtcgtcaccagtagatatgtaggagtcttctatacagacgttagagcttgaatctgtggtaattagtaaacacatcagtcatgatttgaaacgtaacaacatgattaagtagaagagagaaactgataaaaaaacctggatcaattccatcggtgttgtacgaatcagttggagcgaggatagtaacatgatgaacaacaacattactgtaagaaaaaagatagttaagtactaatggccaagtgcatattaaagttcatgagagatttgtgaacctgcaataaaccggatgaagtgtccagaaaggggagttctgaagaacaacatgagagacgaggatgtttgttgagttgttgaattcgatgagaccaggtctggtaaactttagagttccatgtctccacatgttccaccaaggttctccttggccatcaatcgtcccatttctgcctagcaaacgcattgacagacaatctgatttagaagatacatttccacgacatctaagctgacacaaaaaaaagtaacaacctgtaataacaacgtcgttgagtccgtctccgtgaataaagctgatatatcttcgtccaggatgctcccgtcctcttccataagacggcaaaggatcggtcaaaggccatttctccgtatcctaaagtaatcaaacaatcagaaatcgcaatgtagaaacaaacaattcctaacaatcattgaatcaagttatgtaaattagtaatcattcacctgaacggctttaataacagcaccatcggcgaggtataaagtcatgtgactcgtaagattgaagctttgagtcaaatacacaccacgaggcacataaagaagagttccttcgttactgttattggagtttcgtatccgatcaatagctgaattgaatgctttggtgttcaaggtcttgccgtcaccgacagctccaaaatccgaaattgatagcatctcgtttctgtgtttcattggaactataccagagcatgtaatcggagctcccagtgagagatggtgaggcaaaacagtggagagcaagaagagtacgaaaacagagatcggagcttgagaaatcttcatatctgagacgagagactttggtagagagtgaagaagagagagagagagagagtaaaatctcaatggaaatttctcgccggagaattttgattactgtggatctagctagagagaagtaatggcacggacgaagaaagctaaaaagcagggagattgttaacttacgtttttgtccttctcttagcttaaaacggtctgataattaaacttcgaatctaaacaatttaatattttacagcataatcccagtttaactgtaatctaaacaaggccaattaataaatatgcaagcccataactacagtttggcccattagtttttccccgcgccaaatttgccctagttcctttcttctttcccgctatttccaaaatctcccaaaaggtcaagttccagcaaaatgacacaatctttgtaatcaacattgttctccgtcaagcttctccttcaaaattcgtaagctttctgttctctaactctttttggtttcagtatatgaatcaatccgactttggaatctctacttaaaaataaaaatcgatctttttgctgcccagatagtgaataaccttaaaatcgatgacgagagaggagactgaaaccagtggagaggatatgatgattgatgacccaaaacccaaaatcgaaaacgatttcaatgttcattacctccgaatttactacggcaagttttaatctttatcacatttgggtatatgtctcttcataaatcaaatctgacttttttcgctcataacaacatatatgcaggaaatctatttccttacactgatattcacaaatggctttcttatgggcacggtacttgtttgtttacttgtctttctttctttctgtcacactctttaaaggttagaaatggttgtgatgaattgtatatttgtctgtgtttgtgaatctgtagatgggaaacatcctggttgtgatgaatattactttggtagaagagaattctcgtttacgcttgaaaacgatgtttatttgcggtataagtctttcaagaatgcttcacttatggaagctgctatcaaatcgaattttccatacaagattgatattggtgctgtgtatagcgttgatgtaagttgcaaaaatccgtttttcaagctttggtgctggtctatgaaactagatttactcatttgagttttgtaaatgtgttttttcagccggataagagacatgcatatgctcaaagtggaaccaatttgtttactccagtggagagggagttagtctttgatattgtgagttttaatatcttattaagaatttcgtataattggttttgtgtttttgttcttacgtagtttgttgcttgacttgaatatattgtttcctcaggatataacagattatgatgatgttagatactgttgttcgggagccgatgtttgctccaaatgctggcctttaatgacagttgctatcaaagtcattgatacttccttaagaggtatcaaaaatgttttcttaactctcaaatgtatgatacaactagagtttgtagtgttcctgagattttccatccctatgagtttttgtaatatttatagcccctgtaacgtgaatgtcattgtggagttcacttcttgatctagtgtttgtcaatgtgcaagactgcttggtcttatcatagaacaaacttgtagtcactcattctggtcttgtcaattgcagaggattttggtttcaaacacatcctctgggtcttcagtggacgtcgtggagttcactgttgggtttgtgatgctaaagctcgaaggtgaaacaattactaacattgtttttcacttcgcttggtgtatgaatcactttctgcatttcatcttctgttttatgaaatgaaacgttgtgtgattaaatcctgcaggttgactaatgaacaaagatcagcagttgctgaatactttcgtgtttataaggtagtgttctcaagagctcaacgatggtttattttgttggtttctggcattgtgaaattgtctgagttcaattattgcctatgtgacacagggaaatgaaaacaatgcaaaaaaggtcgatctgatgggtcattctcttcatccgtttcttgcgtaagggtttctccatcacctctgcctttctgatttcaaaaacactgtctttgttactaatttcttctgggattttcaggagatcatatgtggactttattaagagtttctttgagggtgagttacaagcaactcaaagtatattctcaagcaaagaaaagtatgagaagatacttgggatgattacagatgaaggtatgaaagagtgttgatgtatttttccgcctacgtgacgtcctaatctcagtttgtgtcatttacaatgatttgcatcttcatgacagatattcaagcagacctcagaggaaagtgggagaattctgcgagatcatctctatcagaagaagccaccagccttttaaggtgggaacaacttaagaaagctcttcaatcgaagagaaacaaggtgtgtaatgttttaaaggaattcaaaacatgtatgttaagtgttgtgaaaaccttatttgtctttcactcagcttttagcttgatgaacttgaatcttagttttgctcatcttcaatcttgtatccataatgttttaggctctatcactgcggacgtgcgtagaagaaattgtcttcacctttacgtatcctcgaattgatttggaggtttgttctactctatgctacaattttcataaacccattgtgctattatggtagatattccctcgccgtattagatcttatagcaactgacaagttttgtgactgtttagttgtatggtttcttcttttattgcaggtttcaaaacaaatgaaccatttgcttaaggcacccttctgcgtccatccaaaaacaggtccctttcattgtttcttgaatatatcctaccaggtaattactctcatattcatacttagttcaatgtatgaatgttgtctggttttcaggtcgtgtctgtgttcctattgacccgaataactgtgatgagtttgatccattggcagttccaactctttcacaggtaaattaataatagataatgtgatacgctagagtgtggatctgaattatttcatcagagagatatttttccttaagcttatacttcatcttctaatgattttcagctaatagaagaaatcaattccggtggcctcagaatggacgtggatgatgatggtatgttctcaaatagaatcagtgttgaattgttttggattagagtttactatcatagttaatatgagttatttaacacttgcagattcagatagtagtttacttgggaaatcaataaagttcttcagatcctcattcctagaacccttactaaaatcatgcaaggtaaatatcccatttctctacttttacccacggtttttaaactgtgcttgatcataccaaaaaaagtaaaacggttctgatgtagttgtggaaagagttgtaatatgttactgcaatgtctgcaggaagaaatagagagttcatacaaaaccaagattgctaagactaaggattcattcagctggtgaccttagtaaggtttataacctgcttatttcagtcttagttttgatttcagtttggttcagtttgtaatgtacaagtttctctaagctttataatctatcagtagagtctctctatcttgttgtggtgtttcctaagaaaattatagcctttgagcgagtgattgaatatatttatatggtaatgaatcacaccgagtcaccgatattagttttgtaattaaagatcgttaagatagcggatgttgaaaggggtagccacagtttggtcaccatcaagaagtgctttggcaacaatgagatttgcagcttcggttgggtgatacgcgtcccagaagacaaacttggacctgtcctcacaagctgcttggcttgagttctggttaggtcccttaaagcatgcaaacggtggaaagtagccgccacaacacggcttgtctgcgttcttcaagccttccaaaaagttcaaaattaaacgtttcagtagatttttatcaatgaatccgtcgctactagaatcagtaaaaaaaaaaaaaaactaattcttaccaaatagttgatagttcaaaactagtttcaagaataggtcgtaagagttggcgtagacaaatgtagtgttgtaatcttcggatcttaactcattgttcaatgtcttaagagagtgtataagcttcatgttataacctcggactacttggttgacttgttcggagcattttccggctggtattaaattcaacgctcgagcaaagggtatgcaaccgagtggccctactccaaccaccacgaacttcctacctcctagctgatgcaatcgctgtaaacacgcaattgacaccgatttagattgtgtttacgtttacgttctgcttattgtaagcttgcttgtaaaaaatttgcaaaaacattttatgttttttttttttttttgcgcaaagatatttatgaaaacattaaacgaaggcatcaacggacccatgtaattctttctattatttcaccacgaatcaactatattggacacaagtgaataagtgatgataacaaatgatcataataaatgtttgactcagacttgtcaaggtaacagaatttgtagcatttttgtctatacagtagtaatgtactattttttattaccttaagatgtgtggttaaatggaggaccatagaatcttgtaggacatcagtggggagcttgtcttgagagaagaaaggtattgatggttgaatataattcaaaatatcatttgatccaattgtgattgtgaacattgcattcttcaacatctcttttgtaccattttcaccaatcactcttaccatatattctctactcttctcaaaattactcacttgttctctcagcggaactcgcccgatctgtcgcatattcgcaaaattttcgtttcgtaacaaataaaaaactagttttaaaattttatttttgtttcacaaaattatcgatttataaacataaattttatttgaaaatgttagtagatggagcttacgaacagaagtccagtgtcgtccaagattccagcagcaccagaagcatagttgattccattgcgaattgtgttagcctcagtgtttggttcaagatatggtggtggtggtgattttgctcctaaggcttcacctaatgttttaatttattccaataaaactatatattagtctatcttatatttatgagtaatgattatgtagtatgtgtaaaacaaataaacacagagtggcatcatcttaaactaagaaaaacatcgagtgattgaagagagctaggaccaattcagaaacggtttactaaattatgaaaattaaatagaactccttaccaaactccatgaatgttgcatttatggaatttgcctttgacttctctcacattacaaaattttaattactcttaactaatttattggtccaatccaattcagttatgactttacatgctttaagaagagtcagcttatcaattagttgacttcaagtgtgtacaagggttttgttctgttagatactttagagaattaaattcatattattgtaactaaccgttaaatcaagcacatttatttctaattacgtagtactcgctttcactatttctgaatgaataaactaaggcagggcaatatatatataacaaatactaattattgttattattttttgtaaaaacatatgcaatgttttaaatctattacttgtgattgttttttttgaatattgtatcagatatatatatggtcgaatatctaacaagctctaaagtgaatataaacaaaaaaaaaaaaaaaataagatctatgttctatgtcgcctctaaaataaacatattacatacccacaatatcggaaatggttcgaccattagtgaatcttcccgtgggttggccgttggaaggtgcaaaatcgatgccataaggcgaagaatcagcttttgacaatgtgaagatatagttgttgtttccaacatctaccaatgagtctccaaatatgaagtttgtgaacgattgagcagcctgaaaatgtgatagccaaaggagaagaaaagtgcaattgaaaggcttgagagaacatctataagtgaaatccatttttaactttctcaaaatatttgccaatgtggtaggaagaaacgaaagagacttgtttggttaaataaacttgattacgttaatactttttgaaccattccttttgcttacgtatgttacagcatgacttgttcaaaagatagcacatggttcttctacgtacactattattactttgttggtcgtgtaacacaaaaattgtttcgtcttgtgtgcacatatactcgacttatatgacattaacatgatctcaaaaataatcctaagttacttataaagaatatctcgatttttgacttccaagtttgtaatcaatgttataaataggacaacaagctaggctaggctgtcttttagatggttaatagtcaaagagagtgatggcaaagagcttaattaatggcacatgtgactcatcgaacacgcttcttcatatcttcttcttctcaaacaacactacagaaatttgtctccaaaaaaaaaaaaataataataacgctaaagaaattttcttttaatatacctctattgttcaatatatatatttggcagcctctatgttcaatatatataatatatatgtgggttagtttcaactaaatacaatacctgactatgtcgggattcaaacaaaacccaaacatttaaactttacaattataaatttaaaaaacctttaaaatgcaactaaaaatgttttcttggtaagaaaacacacaattaatgtttataaaaaataaactaaggatggtatttatttgaatgcttttgttaaatgttatataaatagttttaaagctattgttttaccaaaataaactaaatgtatattataaatactaaatttattggatttaatttattttagtaaattatcattatatatatatatatatatatacataatgttaaaacttaaaagatgtttaaaaataaaatttggttattcatgtaatgactatattcaagttgtgacacatgtatatatcgaccccaaaatagacctcttataaattgtcattccacgtcacttttatccgggattccaggttatatgtaaaaaaacaaaaactgatgttctacatcatttaatagaaaactgaaatgtgatggcacatacataatgcatctcccaagatggtacaaaagtaatcattgtccttattcttcagattcaaccttgagactacccaatctccgtggaggggtttgagcaggagattcaaatatccccaaataacttggaaaagtaattaaaatttcatataagagaacaagtgtgtaagcatgcaattcaatcgagctctcacgatatccccaataggacgaaggaggaactcagtcggaggcggaaagaaaattgacatgatgcagctattcctcgatccgacagatcgtttggaaagaacaatgccttaaaaaccaaacacgttattttttaaagaagaaaaacacattactttaaatatatcataccaaagcaatatatgaaaatcataataacagaagtaacaatatgaaatactgtaacgttcaaaccaaattaggtttgtgtcgagaagttaatttaaaaaaaaaaaaattatcaaagcttttatcaaacaaacgtttcacttgatgtaaaaactatattgtttttttgaatttaatttaatattagattcaaaaacaaaaaaaaaagaacgttccaatactcaaaaagaattgcattggaattatctctctgtttatctgatcaatactcaagcattaggttgtattctaatttaactgttaaaggtccaccggtgtcttcagtgacgtatacgaccttggtacatgtttttttacttcacatgagccaatataccacaatctccaaaagataaacgcaagatgataaaccacaaaattttacatgaatagtaaatcatattaaagagtactttttatttcaaggtaaacagtacttgttattcagactttagtatatgtaaaacagtattttcataggaacaaatatataaactagtaagtcatagtagttacctaattggtacttttagacctcaaaagtctctcaaaccataaattaatatagtacattccaaattataaacatattatgaaaaagtttaattaaaaataaatatttaatttaggtttgcaaaaaaaggttcaacctccacccaatttcatgagtttggacagcaaattattttaaatgaaacaataaattcatatatctgtcttctactataaattaccctctctctctcttatcatcatcatcaatttatataaccctctcaaaacacacatttttaagattcaaataaaatcccttcttcaacattcaccaccacaacatcatgggcattgcacggtggctcaaccgcaccgtgggcttctttgtcttcgctctcctcgacattgctgatttcttgctttgttacacttacaagactttggattacttcttggaatccgagaggaaaccttgctactgctcttctccaccagaggctaaagccaagaccgagaagatcatagtgtcggaacgaggcgggtactcaaaggttgtgtctctaacaagaagtaagatccatttcgatgagatctcggacacgctttactcacgtggcccttcacttctaacgaggctctctaagctcgtgaggtccgtgaaatgttttaattataagggtttgatcatgagaggcaatgtggtggaatcttgtgatcatcatgagtctaagaaaaagattagcaaaggtaaaaagagattaatgactttgaattctaccgtgattgagaaatcttcgacagctccaagatggtcggattgccattgcagtttctgcacttcttggcttacttctaccaacagagattctctgtttgttaaagttcaacaacccaaaggtaattaatttatccacttcctacatttatttgtatgtatattatatatatacacacaaacaaatataaatgaaataaatgattcaaaggttatttgttgtaaaatgctaacattagcttaaaaaaaatcagcaattacaaaaataaattttcttacaagaattataacatttttactagtctatatcaaattatatgattcaaagggttctacattatttgttgttacgtaaaaagtactagaatttaatatactcattactatattttacttgtcgctatccgatatcggatacacaacagttttcttattttaggtaatatattaaggtaacatataaaataaatgaaatatatgtaaaatatgtgcagataacaagaaggcccgagacaacgttgtgtttatacatggttttgtatcatcatccgcgttttggacggagactctcttcccaaacttttctgattcagccaaatcgaactataggttcatcgcagtcgatcttttgggctatggaagaagtcctaagccaaatgactcattatatactttaagagaacatttggagatgattgagaaatcggtgatctctaagttcaagctcaaaacgttccacatagtagctcattccctaggctgcattttggctcttgcactcgcagtaaaacatccgggagctatcaaatcccttactcttttggctcctgtaagtcaattatacataccctctacgaatcgatactcgaggaataataagcttccgacttaatgctaattgacaataagtggttataatatggcagccatattacaaggtgccaaagggagtccaaccagcgcaatacgtgatgagggaagtggctcggaaggaagtttggccaccgatgcagtttggtgcatcggtgcttagctggtatgagcacctaggccgcaccattggccttgtccttatcaagaaccatcaattgattgaatttgtcacccgcctccttaccctaaacaggtacatatattttttttcatagcaaggttttttatatgtcataaatggaaacctaaataaacttgctcttaatcacgtttcaatttatttagaatagattttattttcttttctggtgataaactctagaagtttcgggtctttggaaactagaataagcaacatctagaacagagaagttacgtccacaatatttggataactagaataagcaaaatcaacccaaatattacagtgcatgctgttcgtccgttcggagaacaacgaaatgtgtaaaagtctatacgtttaatgaaccaaccactcgtcttcttcaataccttgaagttgactcggaatggttatatttaatgaacctacaacttttttttctttatgtaaataatctttgattggtacactatagtggttcttacataaattatgtgataccatattaggaattaatagacgagttatgcaatctaatagctttatgtagtagaaaaagttgccttgaaacatagaaagcgacttataacgaccgtgtctcctccattatttggccccattcaattccattttgtcgtttcatatcttaataagtatatgtataacttttaactatttatacgccatataaattaatttattttctttctatgtatgcaggatgcgaacgtatttgatagaaggattcttatgtcacacacataatggatcatttcacacattacacaacatcatcttcgggtcaggagccaagctcgactcgtatctcgaccatgtccgtgaccatgtggactgcgacgtcgccattttccacggtggcaaggacgagctcattcctgtggagtgtagttacagtgtgaagagcaaagtgccacgtgccactgtccacgtcatccctgacaaagaccacatcaccattgtcgtcggccgacaaaaagactttgcacgagagcttgagctcatttggcaaagaaccaaatcaacttaagtgaatatattttatagtgatgaaactctttttttcttttttctgtttctattaagtatatatttttcttattacaaaagttagatagatatcgttttctattcaatgaagattttgttttagtttcccaaagaaaaaaatgtcaagcctctaattttatttttctttttataaaagaaaattagagtatacgtgtattgatttttttttttttttttttttttcacatacgtgtattgctcttgagagccacttccggttatacaaagagtttatgtgattgtaatcgaatactttaatgtttgtcggtgttagaaaaaaatcggtgattaatggtctttatttgttttccagtcagattcatcattcaagtaatgtttgtttaaacggcttttgtgcattttggtatattttgtttaagagtttctaagaaacttaacgaacatatataaccttttccaaaaataaaataggtataatttgcttatatatattcaactaatatcttgtttttattttccctcatcaaaaagaaaaaatttaagactctgtttttttttttttttgaaaagaatgtagcagcctctcttagaccactgaaaatattcgatcctttaaaccaaacaaaaaagatatatatgaagtggttgtgtgttatcgaatagtctaatatttgtcgatgttagaccaaattcggtgactaattaagagaataacatgaatattcgaagttgtttttttttcttaataagatttgagtgcaacatgtgaaagagcgactcataatattacaatgttcgataattaaccaagtggtaagatttagtttcggtcctagtaatcagttttaagaaccgtttgtcaatagatgtactttttatatttgtcataatcatctcatatccatggattagaaaattagttaatttagaaagaaaaaatattaaaatacaaattaaaagaagaaatacaaaagaaatgattttcgacaagagagggaattaaatgaaatgggccgaccataaccatattctatgatggtgaaataagacgtgggcttagtttacttctcaagtagtctctatcagtctatagttcgactatgactctgtgtgagcctattgaatgcattcacgaagaaaaataccttcacgattacaagtaataccatatgtactgtcagaatacacgttgatcaaaaataaaatttcaaaaactatatagtttatatataattattgataaaaataagtgttgcggtaaagttttattaggtatggtcggtaatgaaatccgtatgaaactttccgatggcttagcttccgtatcaacatcaaatacacgaaagtgcctaaggaacctatcaagaatacatgtttcggtagcgtgtcagctcagtcgaaaaaccactgaccacccaagccaagctctaacaatggtatccaaaactcaacatatattttgtcaatttgaggattgggagaaattatttaggtcacgatacctagtcgttgaaagtcaacttactagttcgaattctgaaacgaaaaaaatatatattttgatttgaacttcatatgattcgtgtaaatcaccacatgagtgtcctaaataactttacctcatattcttgttataaaatttttatttactcttcaacaaacgattcctcgaaagatagctgcaccaatcctcggaagataccggaaacgcgtaactgttacataacgatagtgaaaatcttgcaaaatagcttatcgattccaaaatgcctcaacatggtaggacaaattaacgtgaagggtgttgtggattttggtgtccttgaaaatgtacatatatctgttttgtatttcttgaagatgctttataatgaatagcatgtacaagttttgtgaatgtgtttgaatatttctttgtattaaaagatatttcatataaatttgtttcatatatgatggtgttatgcctagtataggcgaagtaaccaatgattatagttaccattagttatgattgttcgagtggcattttatatatagcattcctatctacttagataaatgataaactacaatattaaagtgtttgtgatgtcatttgaaatggattttgaaattaaaacttagaaaagtgatatcggagcatggttggatcatgtgctcatataagtggaaaaaaaatcaaatgttgttcgagtcaagatgggttacaaacatatcaaaatgcagattttttttttcttaggttctattggatgttgcctaaagatcattgcggggttgccaacataattcttaacacacctacactaacttactttctttcaactaccccctgcgcaacatcttggtatttttagtattagccaaattaagaatggcagtagctagtggttcaccaaacttatgtgttttgtctttgtttttgtcttctttagcccggaccacattcaattattttttttaccacatttataagcatcaatgttccttcaatggcttcaaagaacgtatcaaatacattgggagtttgagacatatatctggaacaacatagtacatctgtatttttcctcaaaaatatggggactagaaatttttgaaagtaaactaagctatatatctataaattaaaagaaagacgatagagagatgctaggtagataaatgttttgaaataaaacaataaagaaagtgtagttggtttaaaaacttaagcatatatcttttcaagatcgaatgttattccacattatcccattgtattcacttgcatgaataaacactcgtcgcatcttaaggcatatatatatacacataagaattaaattaattaatatgcaaaaaaaaagagagagacaattaaagataatatgaatggtatatatagtttcacccaaaaaaacatgaatgatgtatagtgacaaaaacataacaaatgtacttgttacattaattatatataaccggtgttggacaaatgtaaaaacataactgaaagtgtgttttaaataagataaatagtactacaagttaaacatgcaactatatttataaaagttagaaagatcaaaacggtttttacaaagttatctagaacaatcatatgaataagtttttttttttacttcatcttttttcttttcgctgtaaagacacattcgaaactttatagagtgagtgaaataggattgattctgtagtttcacctttgtgaatcatacgtttccaaagatataaagtaaaaatgcaacaagaagagaattcactcaaattctattaaaagtaattttttgtaagcatcacctaaagcaaagcatctgcttctctcttttttttttttttttcctgcaagcatctgcttctcttatcccattccacttgtccttctttattcttctaattctttccacttacataaattcaggttttttgaaacaatagataagtaaatatataaggaaatgaaacaagaaacaaccaaaaataaaataatttaataatatatttacgaaaaagctgacaaataagactttattgagtatatacatcgatcttgaattacgttttaactagtttttctgtgattttgagcataatatacatcaaaactcggtttgctaagtttatgaatatttgttctccgtacatatacatgatacacaaagtaagaatctgctcttgttttcttctagctataaaattaattccgaagtcaactatcaacctcaaacttgtgtaattaacctatacaaccaattcatcacttgagattaaaaaagttcgtagcaaaaccaaacaaagtaatccattaccatccatagaaattgaagttgcttgaacttcaaagaaacaaagctaaaccaattaccacaaaaagagaagatgaatgaaaccaaatctaacctggagatagtttactcaaagaaggaaagatcgaagcgatataattgaggggaatgaagcctggtccgacgtcattaaccgtaaaatgatcattcatgtatagactaatgaataaagaagagacatatatatataatcaaatatagatctaagttaagggcctcgtgccagacaacattcccctcaaaaggaaaagcttcactgaagaacatggactccatataagaaaaccctagcttttaacagagagagagagagagatgagcttaatttataaagaaataaaagctgaaagaggaggagacaagaaagcaatgatgaaaagaagagagggaggatattattaggaaaagattgtggaaatgtagggggtaaaaaaaacaaaagcttaataaaaaggcaattcgaaaaagatagaaaagtcgaaaagaacaaacatatattaaagtcataatgataaaaacaatttgatgacttatttccacctctttttttagttcatctttgaatctaataataatgatttcacatgtaaatccgtgagtcgtcaatattctagctcttggaataaaatgaacgtaaaactatctcgtgttttttttttaaaggagtcaactattttttcttgaatatatttgattttgaatgattactaactaaaaccttaaaagtctatagtcgtcggatcgtttttattataatgaccaaaattaagtcaaggtgtctaatgagaaagtcaaaagattagttgagaaaggacccaatataggtaaatgaatgaaagataaaaaagaaagaagagtggtgaattattagaacatgattaggtttggatttgacgaagatgtcattagagagagagagagagaagtgtcttcaccgtcctcatttacttcatgtgacaatcacatgcctcccatctctcccttacccacacatacaataaagatactttcaaatacataattttaaattagtatttgacaaatacacaaatattctacataggtacaatacataataactagtaagaaagaccgacatttttttttttatgaatgaaaattattcagccaaagactacatttacaaattacaattacatgcaactttttgccaaagtttaaagagaagatcaaagtaaaaacagattgaggtttagttggttcgaatgtgttttcgttgatacttacgtatttcggtatcaagaacacgattactaaaacaaattttgaaagcaatgttaaatactttagaaggagttacgtttttgatttatgagtattctttcatctaatattgcaaaacaaattcgtttaacgaagtcatagaaaaattatttaaaattgatatacaataatcttttatctatttaggtaatattcggaaaattttagatcgaaactcatacatctttttatcggaatatcaacttcgcaacctttagaaaatcctatgaaacacaaatctttaaaaagtcatagaaagctaccattagaccaaaaccacttggttataggtttctactttctaccactaagatatgtaacattattactctttgatcatattcactaatcatttcgattgtcataacatatatcaccaaaactcatttgcgtttttaagtttttaatggaacagaggcacaccaaactcatttgtgtttcgaagtttttgctgttcatgttggaggtagactcaaagttcttcaggacttagctcactagctgactctgcatccccaaaaggtcgctgtatggtttcagaatagacgagccaggtccaacaccaagcattacgttggatgccggttacgagtctcttgagcctcctccctatggacagaaccgcgtccttcatctttctttacaacagctcacatggtgtcactgaaaactggttttctgcagctgcaggagaaccaagtattgatatggagactataaaagcagagccatagtgtctgattaaacgaagcagagccatagtatctgattaaactacaaatctgtatgatcccttggtagttgaaatagtaaaagcgtgaaggaagtgatcaaagacatttatcaaaatgtgtttgtaagaatggttgagaaaaggaaatatatctttgagagcatggttttcggtgatgagaactattggaaatagtaacacaatgcttaaacacacagaccatcaatatataaataccaccctctagttggagagtggtcaaacagaagccaatctaaacacgatgcttgtgtagttaacattactacagctaaagataatgagaagctt

SEQ ID NO: 812 - DNA, 83689 bp, Arabidopsis thaliana
cctttaaccagagataagacaaaaattgaaattgcaaccaactcaatgcaaagccatatcacttcttctttcggcaagaagattatcttatacagaaccaagattaatcgtcctagtaaaaagcaaatcttatgtctctgataggaatctatcacatactaggtacaaaacccatcgatagaactaagagactagtctatttgtaacctatgagtgactatttaacagcctcatgagtcatgacctcagaaagctaaggagaaattctcaaactatattagtcaagtgcaaaagaaccaacggatgttatagaaattccaagaaggcttgttcgtttacatcctcattgatctacttgaaaattttattctaaaaggcaagattcatagctcttatagctcactcttgaccttagcatccccatttggtaacacactttgcgtttgagccaaccgttttgcttcctgaattcaaatgaaaataaatttatcaccttgactaactattgtagaaactatctcagatgagaaacaaaggaacgtcaacaacttacagcagcataactagcacgtatgtctctataccgatcgacttcatcaggaaaagcctgttcaagctcctccaagagatgttttctcaaaccctgtaccaaacaatgtcgactttaaaatcatgagtggccaaattgagagaaccagtagagcaaaaggagtcaccttaaaagcatcactctttccctttgtaacttgatttttagcaatgcagttcttattaagaacatcttttgtaaactcatctgggttcttcccatcatcaatcaagctacaacaaacaaagatatataaacataagagagcaacaaaaattctctaaagagtctaaaaagggacttgttctcacttaagaacctcaatggggacttgaatgttgcatttatcagacaacttagccatattatcaagctccatcacaagagaattgctgcagatagagacaaaatttcaatcacacaatactcaaaacaatggatcaatagagaagaagaaaagttacaggcgttggaggaggtgaagctgagaagcaggtgtgaaagaagagacggtgagttttaattgatgaaggagttctaaaattttctgattcgagtttataatttggttcagcttctcatttgaatcgtcgacggttgcaattgcattgatttcggtttttatcgaaccgttgatttcaccaattccggcgattgtgttctgtgtttgatccatcaccgaataactagaaacgcgattaaaacacacacaaattagggttttgaatcacggaaacatagaggttgagggaaacaatttatgtagagatcaattccaattgacacaactggatgaaatttctgggaacgatgaaaccctaggaccaccgacgaagaagaagaagaagaagaagaagttcagagagcgtacatggatggatttgagaagaagatcacaggcgcaaagtcaaagtggtcaaaagaaaattaacaatcgagttttgaatttgttgtagtcattaatgggcctttgggcttttatatggttttcaatggagttaagtcatgtccatttacggttacttaaactaatgggtctattgttttgaacttttgattttaaaaggtggagatggttctgaatctctctggttaagtatcaatccatgagaccttttttttttttttttgaatgaatgtgtgaaattatattcaactaaaacaactgttttacaaatcaaattcaactaaaacaactgacaaattaaatctctctggttaagtggtacatttttaatgtctctagtctctacacataaacgattaacatgagagttcaccaaatcttttccaattgggtttgttcacttggtttcgttggttttaatcttcacaaataaaaaaatggttttaagtaaatagaaagaaaaaagaaaagaaaaaaagagtaatcgaaggagctgtaatcttcacaaagagcacttgattataacattgaatcttttgcaaaaaagataaaaatcttttcaagaaactgatccatccaaaatactatcttgtcttcactcttcaaaattcctgtcattactctctcgaaccctttctcttttcgaatctccacttttttttctatcttctgcttcttcttcttctctcttcaatgattccactctcacaaaatctccatgactacaaaacgcatagacagagatctcccatcttccgacgatccttcctccgctaaacgccgtatcgaattccccgaagaaacactcgaaaacgacggtgctgccgcaatcaaactccttagcttactcctccaatgcgccgaatacgtagctactgatcatctccgtgaagcttcaacacttttatccgaaatctccgagatatgttctccgttcggttcctcgccggagcgagtcgtcgcttacttcgctcaagcgctacaaacgcgcgtgatcagctcttacctctccggcgcgtgttctcccctctccgagaaaccactcactgttgttcagtctcagaaaatcttctccgccttgcagacttataactccgttagtcctctgatcaaattctcacatttcacggcgaatcaagccatttttcaggcgcttgacggagaagattccgttcatatcatcgatctcgatgttatgcaaggtcttcaatggccggctctatttcacatcctcgcttcacgtcctcgaaaactccgatcaattcgaatcaccggatttggttcctcctccgatctactcgcttcaactggccggagactcgccgatttcgcatcatcgttaaacctccctttcgaatttcatccaattgaaggcataatcggaaacctaatcgatccgagccaactcgcaacgagacaaggagaagctgtggtggttcattggatgcagcaccggttatatgatgttacagggaacaatctcgagacgttggagattctacggaggctgaaaccgaatctgatcacggtggtggagcaagaattgagctacgacgatggaggaagctttttaggaagattcgtggaggctttgcattattatagcgcgttgtttgacgcgctaggagatggattgggtgaagagagtggtgagagattcacggtggagcagattgttttggggacggagataagaaacattgtggcgcacggaggaggaagaaggaagagaatgaagtggaaagaagaactgagccgggtcgggtttagacctgtttcgcttcggggtaacccggcgacacaagcgggtttattgttgggtatgttaccgtggaatggatatactttggttgaagagaatggaaccctccgtcttggctggaaggatctctcgcttttgactgcctctgcctggaaatctcagccgttcgattgattttatttttattttataatgcaaactgcaaagtgatcattaagattttttgttttgaaaatatttccaaacaaattacgataattacgataaaaaaaagtcttcattgacgcaaaaagttgttgatattgagaatgagaaggttgttgatactaaaaatgagaaggttcatgttagataactatatgcataagagaggttcttgttagataactatatgcataagagaggttcatgttaaataactcaataagcataagaggttatgactatacacatatctgttaataaagtcagctacaacaaatagaaggtctaatatcatagacgataccaccatgaaaaatcatcatttctcatagtattcatgaaaaacatcaagtggaatttttatgagaccatcaacttcttacatttagtgaaactggtttttaatttgttccttcaattcttaaatcaaatctagaattcatacaacttgagattcttagaaaattcaggatacttgtctcttttttcttctttttttgtacaattttaaaagaaagatgtagtgcaaaagccaaaaatcgaaaacaaaaaccaaaaactaacaaaataaaaataaaatgacaaccattcttttttttggggggggggggggaggaggggagggggggaaagaagaaagaatgacccaactgtatgaaggcccattaaaaaagtgggcccaatttctataaacgaccttcgactttttcaataatcaattttcatccaattcaactcaggaaattgctatgattttactctgagaatcagaagaagaaatctcggtgagcaaaatccctagttttgggatgatgtttccacgactacgattgacgaaggtcttcttctccccgatcatcgccgggaaatggatcgtctttgccgacggtagcagcggcggcggcgttggtagaaatggctactacggtggattgtggtcgtcggccgttattccttccaatgttggtttagctgtcgctgtcaccgtcatggccgtggccgtcgctttcaccgtctactctcgtaggtatacacacaaaaacgatctgatttatgttctaatcgatttcttcaaagcaaagaagcaatgcttgttcactacttagttaagtagttatttggtatccatagatttgattggttcttgcttctttgttacctcaccaattcgaggctggatcgtcatgcctttaggttcgaagaattctctgttagttaggttattgtgattgagttcttggtccaatgttagctgctaactcgtacttccactacctcttcttgtcatggaacttgtaagactctcaggctgaacatagtcctggccatattctgtattcatagactctgatgcgtataatgattttgaggctcgaagcactaaggctttttatagtataatgagggaaaatgtaaccaatgtttaatgtttacttttaggttgtttgctgggttgtctctttttgtatgacatgctctcttggttagtattgaacaaacaaagtgattctagaagggtccttaggtggaagtctgaaacttcatgaactttgtataaactcctaaaggaactctcgataatcaactccccaagctttgtatttgtgtttcttcttttgcaattttgtcagatacataagctttttgttgctaaatctcttatcatcgaattcagaaatctgtttttgttgttataactctttctacaacccaagcaatgaagctattttgtttaagttctgcatcataaatatgcataccatgaagagttggatcgaataattgcagcctgatatgatcttttgtcttctggtccttattctaattcttggcatctcttggactgtttctgtatgtagtgatgaagtggttaagagtcttaggtcttctgatgtgtgatagaactccattgatactttcaattatttttaacatatatgaatataggacataacatgtaccatttagcctgtcttatttgttcaaagaaagctttttatcactacatttggtttggttttatgtaattttttttctttctaaacttactggacgaagttgctcattttctgctcatctacttcttcagaggaagcattggatcaccgtggtcactaaggagaagaaagcgagttcttcaacctaaacaatggaatgcttttttcacagaggaagggcgactcagtgatggaggtgtcaaatttctgaagaaagttcgtagtggggtatgttgctaaataagaaaaaaatctgctgtaatctgcagttgataaccttttgacactttgatatactaatttttatttttgtttcagggtgtacatccaagcatcagaccagaagtttggccgttccttcttggagtgtaagaatcagcatcttgtcacttttccttgttttttgtatacttttatgagttttatctttttcggctaccattgggggttttctgttcggccttatgttcatactcatgcatggtctattgatattagctttttctttggggatattgatgttatgtaggtttaaggttgaataaacagtgcatcagtaaagcattcattaactaggagatcagagagttgccttaatgtttttctatcaagagatttataagattagtcctagtttcgccataccaaactccaccagccgtcgccctacattccattaacttgataatgaaacctgtgcaagttatttgtagtctttatcatctcgacacattgtaaccttatgctacttacctctcacaggtatgacttaaagagcaacaaagaagaaagagactccattcgacagctgaaactgtatgtttgcttatacttattgagagtttaatggcttctcaactttctaccaaatgttacgtttcccatttatctctgttctcctaggtggcagctggttattaacttgctcaatgtgttgataaaactaggaataagaagtagtagtttggaactcctacactgagatttcgagtcagtttgtaagtaacgtcttttatatctgtaaatcctgcaggacggaatatgaaaacctgcggagacagtgtcgcgagattcatgaacgctatgaaaatgtctgcgactcaaaggagacagctcagagcagcaacactgaagacagtcaggttcttgaatcccatgatattgaggaagtcgagagttccacaagaaccatcaccgtagatgaatcagagaagttgaattctgaatcgattatgcaggatgagaactgtgaaaagagcgatgtcaccacagaagatgctgctggtaatgattcagactcaaccaatcctgaagaaaccgagacttcaccttttctagctaacgaagaagtagaaagccacaatactgttaaccaagaaaaagaaatttcgtctccatcatcaaagccaaaatctcaggcagcggacgaggatttcatgtcaacttggcagagaattatccgcctagatgctgtgagagcaaatgacgaatgggtgccctactcaccaactcaagctgctgtttctgagacaaaagcccggggaatagccattcaggttggtctcaatgactatgaccacttggaaccctgccggatatttcacgcagcccgcctggtcgggatccttgaagcctacgcagtctatgatccagaaattggttactgtcaaggaatgagcgacttactatctcctttaatcgcagtgatggaagacgacgtcttagcattctggtgctttgttggcttcatgagtaaagcacggcataatttccggttagacgaggttggaatcaggcggcaactctcaatggtatcgaaaatcataaaattcaaagacattcacttgtaccgacacttggagaaccttgaagcagaagactgcttctttgtataccgtatggttgtagttctgttcagacgagaactaacctttgagcagacgttgtgtctctgggaagtaatgtgggcggatcaagctgcaatacgaactgggattgcgaaggcgacatgggggagaatccggttacgagcaccaccgacagaagatttgttgctttacgcgatagctgcaagcgtgctgcagaggaggaagacgataatagagaaatacagtgggatggatgagataatgaaggaatgtaacagcatggctggtcatcttgatgtttggaaacttctagacgatgctcatgacttagtcgtcaatcttcacgacaagatctaagactacttatatctttcactcttgttctctctctttacttgtttgttgcattctttgttatttgttacataaaatgtgataaaaaccgttgtcctaaaacgcatgaaaatgtcttcactattgctaaaattaaatgtagaaaaacttagccaaacgagaacccgctgaggctaaaagaaggacttgactttatttggttttaagagcctctggttgagctagaggtgtataactgtaacaaactaactattcttcgttttcaatttccagatacatcagatctcttcttcatcttcttcctcttgggagacttgatttattttgtgatcagtctcggattgtaacatactgcgatcttttttcagcttctctaatggcggatactgttgaagagcctcaattacaaaatggagcggcaccagctgagtccgaaaccgagcaaaatccgattccggaaccacaactccaaactgagcccaaactaaccggagaaattccggaaatagaagcggatttaacgccggaggaagtacaatcggaggtaacggatgcaaagccagaggaagtacaatctgaggtaaagccggaggaagtaaaaactgtggtaaccgatgcgaaaccggaggaagcacaatctgaggtgaagccggaggaggtacaatctgtggtaaccgatacgaaaccggatttaaccgatgtggatctgtctccgggaggatctgaggagatcccgatccggtcgacggaggttgaacaggaatctactacttctgttctgaagaaagatgatgatgggaacaagacatttaccatgagagagcttcttagtgaattaaaaagcgaggaaggagatggcactcctcacagttctgcttctccatttaggttccttctctctttctctttagtttcagctgatttgagttgaatttcataatttgatcatgtaactagtctttggaatttggtttcactttgtttgtgctttatcttatgattttgctcagtcgagaaagtgcttctcaaccagcggagaacaatcctgcaatggatctgattaacaggatccaagttaacgacgaagagggtcgatctcgccaacgtgttcttgcatttgctgcccgcaagtatgtaacgattttgatctcctgattgcattcataaaatttgttgctttgtatcaatgttagttgattgaccaatgaattagattgttgtttttttgtttggaacttatacccttataggcaggattgatagatacagagatttagtaaactagtttcattattgctcattggaaggtttgatattttatgtttttgctgtttcgggcggtgaagttatacgctgcaacttttgtaggtatgcaagtgcgatagagagaaatccagatgatcatgatgcattatacaactgggcacttattctccaggtttggtttcttttcgttattatttagcacttctctctttcaatccctttcttggtctctcttatatgtgactggctttagttggacgtattcatatggaaataattaacgagatggatttgattttgcttattacttgcttgcaagtgttgtttaaactgttgaaggaaagaattgaaagacactgaaataagaagctaaaacatacatccaaaattcattaaacactgggaatgaaataagagtctttctgtaagagcttagaagtgtctttctttggggacattagaacttttttcgttcgtatgcttactgggaataatactgaattcatcatttgccatactttctccacaggaaagtgctgataatgtcagcccggattctgtttcaccttctaaagatgatttgctggaggaagcttgtaagaagtacgatgaggcaacccgtctctgcccgacgctgtatgatgtatgtattaataggattctatatctgttagttttgtttctggtttatgtaactgcaaatgcaatgtaatcgctttcagttcataataaatggcttcaacttttatgtatgacgtatgataggcttactacaactgggctattgcaatctctgatagagcaaagatacgtggtcgcacaaaggaagctgaagaactatgggaacaagtaagtagctttgcatgttatgaggactgacctgaccttatcctgctaattgtgaaaactaaaattatcgtagtttgatcttaacttctaattctaaagaagtatgtgtttgacattctgatttcaggcggctgataactatgaaaaagctgtccagctcaattggaacagttcccaggtatggtccttcatctatgtcatctgatatacgaacttcacaataccgtctcatcagaaccagacctttgtcactatatgatgtcctttttaagcctgtgtcgtcaatttgtagtcttttgattatctgacatatgatttaaattatcaacttctgcaggcgttaaacaactggggactggtcctacaggtaactgactgacatgtgtttatctccatgatatgttgtgacataaaaatgtgtttttgtaaaaattaagatgctaaaaaacttagaatattccctgggttttgtcattaggaactcagtcaaatcgttcctgctagggagaaggaaaaagttgtcagaactgccattagtaaggtgcttattcgtctgtcgaactaatgtaaacattgcatttgatatgcacgattgattttttactgtcccttgtcgcttgttttaccatacagtttcgggcggcaatcaggttgcaatttgatttccatcgagccatatacaaccttggaaccgttctggtcagtttcaatcttttcacataactctttacatgcaggattgtaattccaatccagttaattaaccactgtggatttttctcacatttacagtatggattagcagaagacacacttagaactgggggttcaggcaacggcaaagacatgccccctggtgagttatacagccagtctgccatctacattgctgcagcgcattcattgaagccaagttactcagtaagcttattatctccattttgtactggaatcaagatgtttgaatcatacttgtataaaataagattgaatgccagactaagattcatcgcttcaacatctttgggttaggctgatccttttcctggtccaggtttacagcagcgctttgaggcttgttcgttccatggtacattccattcactttaaacaatcaagttgttttcttgtggaaatgaccaaaaaataaattgaatttgttttggcagctacctctcccgcatcttaaagttggatatctaactgcaccacctgtgggcaactcacttgctcctcacagtgattggaaacgcacagagtttgaactcaatcacgagaggcttctacaggtatcctctcagtttgattacgccaaaagataatgtataatgtttctagagatttaaagtcgctgctgggcttgtaggtactgaaacctgaaccaagagaaatgggacgaaacctgtcaggaaaagcagagacaatgagcacaaacgtggagaggaagacggtaaaagtgaacattacagagattgtatcagtaacaccttgtgctgatctcactctacctcctggtgctggtctctgcattgataccattcatggcccagttttcttggtaagtgtctccaatcctggtttttggtttaagatctgttagaaccggatatggtttggatttttagtttggttttggttatgttatggtaaaaataaaaccaaatgaaaaattgaattggataacaggttgcagattcatgggagtctttagatggatggcttgacgcaattcgtttggtttacacaatttatgcgagagggaagagtgatgttttagccggtattatcaccggttaataaatacttcatttaatatgactattttgcttttttatctgtagttttgtgatgtattatgatcttagcgaaatttttttgtcattttcaaacgctttttgggaccctttttcttattttcatcgaatacatttataaaattacatgtttaccaattgtcgtctgaattatccttgagtgtgaactactgtgtatgttcttgttgtaaaagaaaactccaaacatatactactacggacttgggaaactttttagtacagccgtattagatgttgggctaatgggcttataagtgtctaggctttaacggcccattaaaaatccgcctctctcgctttctcgtaaccgtagtcgtgtcccggaatccggacgatccaccgagctcgaagctcaaaaatcatggcgtctctgtcgtgtctcccgatttgcggactttcatcttccgcttcactctacaccaaggcccgactactttcttcttcttcttcttccccgtcgccgcttcctctagcctatcctctacaaaaccctaagaaggtgatcgatcaaaactagcaatggttctctcaagatatttttctcaataactggttcctttctttgttttctcagctatgtagaaagattgagagagtaatttgcagagcggagttttcacaggacgcaccactcgtaacagcaattggtgcgtgtatcctaagttcatttgtttttccggtggcgaaacgagtcaacgatgaggaagaagaagaagaaaactcagcgattgtgtcaacagatatgagattagccgccatgggaatcatcagcttcataccttacttcaattggctggtttgtttcatttctccttaatccttagtaaatctcttataattaaatgtttaaacactaaacaaattcaaaatattgtgatgattaaatacagagttgggtgtttgcttggcttgacactggaaaatctcgttatgctgtttatgctcttgtttatcttgttccttatttgaggtaattaatcttgtttaagatgcataattgttcagtctgaatttggtcatctggttgttctagtttagtgtttgagtttatattcatgtttaatttggcagttcaaatctgtctatttctccagaagagagctggttaccaattacaagcattgtcttgggcattattcatgttcaggttctcattattatgtctttcttctataatctgactaaaactctgatttgcaacgtactttgtgtttcatctttttttttttggttgggtagcttgaagcaagcatcgcaaatggggatgttgagacacttgcattcttcagaaacacatctgatgacgatttttcatctaagaaaagaatccattttaagaaacatttcaaggtaatctaagtgtctttagtaaaagagaaatgctttcaaattcaatttataactggacttttgatttgttttctttttctttttgcaatgtagggaaaaaacagtgacgatgaaaattaagaataattcgcaaaagacacaaagagaataaatgaatatttgtaacagactttagctattagctttgttaatgtaattgccacaaaatccgaattttaaaaggttaaatttgatgtagacgaaaacaaaattatatctcttttgcacatttgaattttttttatacaccgcaaactcaaagtattaaatttgtatttgaatttgatgactgttatttggtaacatgattaagaaacaaaagaaattttaaggcccatgggcctttacttttaagcatcatataaataggtggaagaggcccatttggcattttatcatttcttcgtgagatgatgttttcggtaacgaaaggtttaatcagaaacttggccttgttccaagttcgtcttcctcctctcgtagcagcagtaatggctccttcaagcgtcgttagggtttactctaccgctacctctccttctccttctgaaatttccgtcaagaaagttggtactcataatggaagctttcactgcgacgaagctctcggctgtttcatgattcgcctcgtcgataaattctccggcgctgatatcgtccgttctcgtgaccctaaggtaactctaacaatcctcctgaagtagctctggcttaggaaatgagtattaggagattgattagtagctagagattgactgcttaattttggaattaggggtttttgatgtaaatctgggttaattgtgaggaggatatgattctatgttgttgtacggtacatgtagatattggcagaacttgatgcagtgcttgatgttggaggtgtttatgatccggagcatgaccgttatgatcatcaccagaaaggttttgaagaggtttttggacatggcttcaacactaagctcagtagtgctggtcttgtttacaaggtattgtagtgtttgctctcattctcactgatatttctatgaatatgtcaatttcgaattctgaatgttggtgttttactctcagcattttggaaaggagatcatagctaaggaacttaatgtcgaacaagatcaccctgatgttcttcggttgtttttagctgtctacaagagcttcatggaggtaatttcagaagttcctattgtttattcttcatatggatataagttcttgtttgttttgatgacgttatgttgcttaatttttacaggcaattgatgctgtggacaatggaataaaccggtatgatactgatcagcctccacgatatgtgaacaacacacatctgtctccaagggttggaagattaaatctggattggattgaccctgaccagtcacaagaaaaggagaatgaagctttccaacgtgcaatggctctagctggaaaagagttcctcgaagtaagatctcttttatataacattatgtgcttattagtttttttatgtccattgcaatggtagtttcctagagacataacatgtttcataaaacaaatgtaagcttacactagtttcttttatattgtgttgtagagtgttcagttccatgcaagatcgtggttaccggctcgatcaattgtgatgcagtgtcttgaagaaagattcaagacagaccccagcggtgagatcatgatattggatagattttgccctgtaagtgtttcaatactcgattcctcttgtccatgctattactatttgagtctaaagatattaaactctggttctcttgtgagcagtggaagcttcatttgttcgagcttgagcaagaaatgaagatcgagcctctcatcaaatacgtcatttaccaggtacacctttttagatagaacctttcatcaaataatggatctctaaatctggtttgaaatgtgaaaaaaaaaaaaaacaggacgagagagcaaagcagtggagagttcaagcagtggcggtcgcaccagacaggtttgagaaccgaaagcctctccctgagaaatggagaggccttagggatgaggaactctcgaaagctgctgagattcccggttgtgtctttgtccacatgagtggctttatcggcggaaaccaatcctatgacggcgctctatccatggctcaaaccgcactcactctctgagcatcaaaagaatcatttacccattactcatagagagagaccgagagttttgatattgccattatcttctgcaatttctgtttcattgagtcttctcgtgacaaaaaatttaagaactagatttgtagtctcaagctgattagatcatattatatgtttgcttcctcttgtccgttttcacctttggagtagatttgtagtagagagcgtaaacaatattagctgaaaaccacaacaataatgttcagtgcttatctacactataccagaataacacatagcaaaattaacttattaaactctttagctcactgtttttatgaattaagtaatttagagatcaagtaacaatcatttgaatgtttgttaaaactccattactacatttggagtcttgagatgattcaaaatattatgtcaaccttcttcatgtctaagcttctattttcaaaagtaagattaaatatttacttatatttttggtgtttccattttttttttattttttttttggggtgatatacatgttatttcaactctaaaaatgtatctaaccttattactaatataaggttttacggtatttcgacatataaaaattaaaaaataagaacatcagtttataaattgattttcactaaacagaaatattgtcgaacatatggagggcaataaacgatctatatgatcattgcctccaaatcggagatttttcacttttattcttccattcttctctcttatttcaatcgggtttgcgtcgaaacccgaaacccacttatctcttcttctctgaagactctatggagatctccggcgaagaagataaagaagaagctgttactctccccaaagaagtaagcaaaatctcaatctcagatggtaacaagttcgtataccaaatcctcaatggtcctaacgaacaatgttttgagaatttccgtatggataagcctgtcttctataaactctgtgatctccttcagaccagaggcttattgcgtcacactaatcgaatcaagattgaggcacagttagcaatctttttgttcatcattggtcataatcttcgtactcgagctgttcaagaactcttctgttactctggtgaaaccattagccgccatttcaacaatgttttgaatgcagttattgcaatctctaaggatttttttcaacccaattcaaattctgatactttggagaatgatgatccgtatttcaaagactgtgttggtgttgttgatagcttccacattccggttatggttggggtcgatgagcaaggtccgtttcgaaacggcaatggactgcttactcagaatgttcttgcagcttcgtcgttcgatcttagattcaattatgtgttagctggttgggaaggttcagcttctgatcaacaagttctcaatgcagctttgactcggcgtaacaagttacaagtccctcaaggaaaatactacattgttgacaataagtatccgaatcttcctggctttatcgcgccgtatcacggtgtttcaaccaattcaagagaagaagcaaaggaaatgttcaatgagcgacacaagttgttgcatcgagctatccaccggacttttggggctttgaaagaacggtttccgattctactatcagctcctccgtatcctctacaaacgcaagtgaaactggtgattgcggcttgtgcattgcacaactatgtccgcttggagaaaccagatgatttagtgtttaggatgtttgaagaagagactctggcggaagcaggagaagatagagaagtggctttagaagaggaacaagtagagatagtggggcaggaacatgggtttagaccagaagaagttgaagatagtttaaggttaagagatgagattgcatctgagctttggaaccattatgtccaaaatatgtcaaccttctaaactttttagtttttttttaacaggtttcgtgtgtttagtctgttagaaatgatataagtcaaataccactatttatgtttgttgtatcaaatcaaatcaaatatatatatccaaaacaccaaatgtataacacaccgatctcagcaaagttgaagaccaaaagaagagtaaaatatcaaaaacagagcttttgaatcaagagatgttaactgctttttgctttttcgtaatccattttcgcttagcgttctctattgcatcctctttcagtttcagcagatcttggaaggactggttaaactgtgactcgatcaggtttagttctgtcttgagatcttctgggtaatcattgtctgaaatggaaagattgtaaatggttgacatcattgagcaagaatccagatacgagctcatcgactctgcatctcgaccagcttccatggcagcatttccgtcgtttgctgagtagggaaagtaatagtctgctgatatgtctgacttcattgattgtcctgcagcttcttcatctttcgagttcacagtttgctgatttgctgcttcatgatcctcatgggttagacgtggagagttttggttatgatgcgacgaggtccggtcagagagaagttgcattatgaagtcatcgatcatatcagctatcacaacgacctcttggctagttaaatgcagttcctcaaccatttcctcagcgattgctgttgctgtgtctgactccagatagaatgcaaagtgtacgattctacatttacctgtattagggcattgaattgattttcagtaaatgaaaactgtgagaggaatgaattggatagaagatttaattttataagacgaaccagacgggtcagcaatacggagaaccatagacgctgtgacatcatcgctcctctcacctctcaacctgaactctttattctctgcaatcctctgaagttcaatggtttgggaccatgggtagtcttcgttgcttgaaacacttttattctcgttatgatccacatccatgggaagatgttcaagctgtggtggtctcacatatttagatgatgtgcttgatgaagcaagcagagcagagtccttgcctccatcccttgcaaggaatgggtccttcgagagctcgagggcagttggtctggaagaggcaggaagaagacatttctctataaattgcctaacttgaggatcgtcaactttgccaagagactgaggctttatgttctgcaaatgcaaagtttcaaacgggagccccattgcatagataattgatgaaagtaaagattgtgaaagacttaccgaggtgacctttttataaatttgagcctggtttctgcactcgttgtatggatattcacaggttaccatctccaacatacacatgccaaaagaatagatgtccacaagctcattgtattcctcttcatacagttcaggtgccatgaattcaggagtacctgattacgctcaaagttttcagttacagtaaagttttcagggtctaggaaggaaaatggtttatggtgtattacctatcacacttcgagcagtgggctgctgcagtacagttgcgagcccgagatctccgattttgacctctccagtatttccattgacaaatatattgtcacacttcagatcccggtgaattaccggagggttctgagaatgcaaatagttcaggcctttgagaatctgccttgcccagttcttgatggccttgggatcaaccttcctatgcttcttacgatatcttcacatcaaatgaaatggtgtcaacccatgtgatgcacaggaaaaaaaaaaagaatgaaggatcatcaatacaaaagagaagtgggggagatacttacaccctgagactaccagaggtgaaaagctcagtgatcatgttaatagtcttgttcttttcgtcaacccaagagtaaaagagtttgatgatgttttcatgttttagagcctttagtagatgaacttcagaatatagcctttcaagttgaccaggcatctgcattacatcttcaatgctaactaggttccaagcaacttcaatcccgtctacttcgtcaaacgccttatatctatacaagagttaataaacaaatcagaatcactttcctttacaactaaaaacataaaagcataatagggtgtagaaaacatacacagtcttgaaagctcctctccccagaacatcatcatactaaacaacaacaacaaaaaaaaaacgaatcgatcaatcactatatgttttccaccatacaaactcgaaaaaatcagcaatacaacatgatcttaagcttgattgttccaaatgtacaattgtacatagcttaaaagtcgaaaacacgtaacaatgaacaaaacacacattgctataaaccaataatcatcaccatacgatcaaagtaacagccctcattaggtagaactacaaagagaactcattaaactaggtcaaaattctcaaattctgatcaatttcctcataattcaacaataaaaaacactcaaccaaacgagattgaatgcaaattcacacatgaatcaacgaagacagtgacgtaccctgatgtaacggccagaaggatctttctcggcaaaatcagcctcttccatggacgatatctgacctaaaaatccagaaccagaagccatatatgtatgcacaacacaacaaacaaagcaatcgagaacagaaggagaagaagaaaaaagtggagaatttaaggtgagattgaagatgaaaagaaagaaagctgaagaggacggaggttattacaaagaaaaaggttataagaagaagaaatggacggaggagatacaatcggagaaagcctcacgagcgaagcaataagaatcgattgaagaagttcgaaatcgagatcggaaacggagtttggcggcgaaagaaatccccatcatctccgattttccgatttcccgatctcttctcccgtcgtgattccgtctcttctcttttatccgattaaatccttccattgatgatccaccatgattttgattttggtccccgaaagaatctgctagatcgatagagaaaaaacgaaggatgatgatgatgatgaaatcaatgaaaggaatttcggagaaagggaatttaggaagaacaaaacaaaaaaaggttggcggccaaataaatcggaaagtcaaattatctgtctttatcaactaacgcactttctcttatatttgagattattctactaattatgtatcctctgttttcattttatttcagctgactttaggccatttatgcaattacatgtttcaggttatgaataatttctactaataaaacattatgctaggtgcaccaaaaaaaaaacattatgtaaatcctcagaaatacgatgttatttcctttgtttcaaaatataaaatgtttaaaacaatcacacatattaagatcattctttctaaaaaatattatttatagaattaaaaattttaactaatcataagaaaaaactgcagaatataaatgatcacaaattatcaaatacatttaattttcatagaaactaacaaaatattttttaatatttaaaagataaacttttataacatcttatattttaattagagggaatagtaatctatttaaagttttttttctgtgcatggaaatcaagaaattgtggaatctaaattctataagtttaataaaaagatatagctagttcaaatttaatgaaccttggatagtatagcattaatacgaaatcattttgtcgttgaataatatattttgtgttaaaagtccaattgcttttattgaataagttggtgagacagagtgtgtgatgaagaaaagaaaaaacaaaaaaattgtaagtttgtcttaaaaaaccaacgaggcttaatcgtgtttattgtaatcattaggtgaatctaaatctaatcctcatcaagttgaaaatatgagaagaacaaaaaactgataattttagatatttattcgaagatgttttttaaaatggtattttattcgaaatatttttcacggaagcactggatggaaaatttggtagcaaaaaaaaaaggatttcgaaatttggcagctaaaatttgttcaaaaataaaatgaaataactcttactaatatggtcaagaattaacttcagaacatattttgaaaatgtaaattaaattatcggatgaaaaggtacgggtcgggtcggaaaaccggtgtgttttgtaatgggcctctatgtaagctgacaagaaaagtccaataaattaaaaatatgagtcgtcgtggtttatcgagtgacgcgttgagagtcttgagacagagttactgataatcattgttttaggctaagatcggtgagccacccaaccaccttcctattttaatttaatgcttctttttaaaaaaattgtagaaaataaaaagcccagaaagagcccaaagaacgcagcagagaaaaaaaaaacaaagaagaaagaaaacttgctcaacgacgattcatcaatcatcatctccgatcttcttccaaatccctccggtgaaaaagacgatgtacgtaagagcacttccgacgacggatgtgaatcggaacacagagtggttcacatatcctggtgtttggactacttatattctcatcctcttcttctcttggctcctcgttctctccgtcttccattgttctcctggcatcgcttggaccattgttcatctcgctcatttcaccgtattattcccgatctcctccgatccaatttcgaaattgttggtttctagatttgaatttttgagtttttttgttttctaggtcacgtatcattccttccattggaagaagggaacaccatttggagatgatcaaggagtctataatagattgacttggtgggaacagattgataatggcaagcagcttacacgtaatcgcaaatttctcaccgttgttcctgttgtcttgtaagttccttctctcatatctcattaggattttgttttgcatcatcatctcttgttgatcttgttcagtatcgaaaaattgaatgccttaccttattttctatgattgtttctgtatttggtgtaatttttgcttaagttatgttttagagatacattgatcttcgtttccctacctacttgttctttatcttattgtagctcattttacatctggttatatagagatgctagtcaatgagcttaattacaattctattcctaggtgaagtggttgttttgacaatttgatttgcaattattactacacagaatacattttgacatgacaatcagatacacaagagtcaagacactaccgttcttctcattttgatttctgtttgttgactagtgcttcaaatctgttcactgattagggttggacctaagtttcctactatgattaaactcgcttgattattaaggtcttttagctagtgctcaagagccttggatttagatttagatttagacattcgtacaagacataaggtctgttatgagtttgctgaatctctcttaaaagaagcactactagattatgtgtagtggaatacctcaattgtgttgtgtgtgacgaatatgtaatcaatgattggatctttgtgacataaaagtctgaccaaactttgtatgtaggtacttgatagcctctcacacaacagactatcagcacccgatgctctttctcaacacactggctgtatttgtcatggtggttgcgaaattcccgcacatgcacaaggtccgcatatttggaatcaatggagaccaatgaaaaaacttgagaaaacaaagaaaaaggtctgtgtataatgcgaatcagagtatttggaatgtggaatccaacaacaaatgccatcatcatcattcaacatgtctgtactatacagacattgaatcccttaaccggagaaaatgtgttatttggtcacatcccatcatcgcatattcaaacctttctactctttgtttggggcttctaatcaattcatatttgatctcttttgtggttctcttagtttcttatttgtataatcccaaaactggttacaacagaaagttgtttagcgagcaatctagggtttgaatgaatagttggggaagatttatttatatataccgtttttgatatatatatatatatcatctttataactaaatccgatgattttgttgttgttggtgaattacgttagtgacaagggtaaagacattttagcacacgtgaggtaatgtattgagctcaaaagggaaattgacaaaatcgtgttcccaccacctgaaaacaatattttttttttatattcaaatttactgttagtgtgtaaatgaataattagatgacattaaaccaaattaaaaacaatagggaatttttaaaaacaatttgtccatttgtaccctgagttatcaccttgttcctaattgtttagtgaataggtgggtaacatatatcgatattgactcacacaaaaaagactagaatttgttcatctatcaataggcaaataactaaaacaaacaatgaccaaatcaaaacgtggaaaaacaaaaaaaaataatgggaaagatcaatttttcttaaattaagatgtagtataatgtcgtttatctcaaatcaagagaagaaaagtaaaaatacattaaagaaagacaaatcaacatatgattattgaaataaaagtgggattagaatattcatgttgactaagtaagtgcaaacaaatgtttgactatttcaaaattagttttttaataaataaaaaaacaagagagaagaaaaagacaaaagaagaaggaaaggatctttgttctgttttatttgtttctctcttcctctcttcttcttcttcttcttcgtacaatcgaagaaacaaaacctctcaatttccgaatatctcgctcttaaaccctctccaatatctttctttcaaaacccaaccttttgtttataaaaaccttcgcaaggatttgcgactttaagaaacgtgacccgaatcgtcgcaatgtttggataagagttttaaactcattcgtttcgatgcaatcattttgaccagacaaagactatttataagaaagagcagaattttgattcaaacccggtttgattttggtgaagatgtaagtaaatctctcataaactcttcgttttctctgttgggttctttgctttacccttaagtaatctcctttttgccgatggtattgatttgccatgagtttatcttactacttccttttggtgttacgtgtggattagttttattcgaaccatggttgcaaatttctgtcctttttcagcaattgtgtccgatatttgactttgtgaattctgacgaaatctgtgtgtttttgatcagaagctgtgagatgggtactcgagggaacgaggaagaggaagattggttttctgatgctcgtgaggaggtttcatctgtttctgattgtaactctgaagtcgccgatgactttgttcaagcaactggtgatttagatctttggactatgaatccagagagtgttactaaccgtagacaaaagttttttcaatctatgggttttagtttcaaaaaacgagactttgatcttgatcttgatctgttgggagactctagttccgaccatattccggtttcgaaacagttgacctctgtgtctgaaactgatcacgaggaggaagagaaggaggagaagttgttgaggaatgaatctacttcctctggatcctccgtttcatctttctcaactgcatctttggctgaagcatttagtttcagaggttcttttcagaatcgtgccaagaacattgatgatcagattttgctgacgagagactattcaagtaatagtagtagcattgctgagggattgagtgaatctgattcgagtaggtttgatagctatggagatttaccgaactctccaatgagtcgttatgaagaatcgcctaaaaaaggagctaaagggtggttaaagaagttaggtgtgttaactcatgttcttgacaaaactgaagagtgcactgatggtgagtcaacgagatcatcgatacggaggcaattaactcgagttcagtcttttaagaagcaattcaaggagctttcgtctctgtgtgtcggacaagagttctctgcgcatgatggatccatagtagtgatgaagttttctcatgatgggaagtacttagctagtgctggtgaagattgtgttgtgcgagtgtggaacataattgaagatgagagaagggacaacgagtttgaagtggctgagtctgattcaagctgtgtttactttggaatgaatgacaagtcacagattgagcctctcaagactgagaatgagaagatcgaaaagagcagaggattgttgaggaagaagtcagaatcgacttgcgctgtgttgccttcaaaagtctttagtatatctgaaaccccgcaacacgagttccgaggacatactggtgaaatcttggatctttcatggtcggagaaaggggtaaaataagttctgactttgtttaatcattatatagtctgtttgtggtaagatgagaagatagtactaacagcttgtgaatgtgctgcagtttctactgtcatcttccgtggacgagactgttcgtttgtggcgagttggttcttctgatgaatgtatcagagttttctctcataagagttttggtgagtttctttctttatctgtcttcttcaatgctgcttttggtatgttttcttaattaggcacattctctcttccttgttacagtgacttgtgtggcattcaatcctgtggatgacaattactttataagcggatcgattgatggcaaagttcgtatatgggatgtgtctcagttccgagttgttgactatactgatataagacagattgttacagctttgtgctatcgccctgatggtaagggtgcagtagtaggttctatgactggcgagtgtcgcttttaccatacaactggtatgttattcaccttgcgtttgattaccaaacttgcaactagagtcatctatgttttaatgtctgcatcatcttttgaatttcagataaccagctgcaactggatagagatatcagtttacatgggaagaagaaggttcctaacaaaagaatcaccggttttcagtttttccccggagattcagacaaagtgatggttacttctgctgattctcaaatacgaataatctgcggtgtggatacaatctgcaagcttaagaaaggtccaagtcaagtttcttctctttcttcaggatatgtgaaggatcttgtgagtttgtttgttattgatttggtggatatattgcagcttcaagtcttcgaacaacactgatgagtccaacatttgcttcattcacatctgatgggaaacacattgtctcaacaatagaagagtcaggcattcatgtttgggacttctctcaacccaacaaaaaggcatcttctcagaaaccaaagaccatcagatcttatgagggatttctatcgcgaaatgtgtctgtggccataccttggctaggccaggggaaggaggacagtatcatagcagatttggaaaaaagttttgctcatttccctgttcccttggactatttctctccaatgaaaggagcaacaacatggccggaagagaagcttggagtagtagcaggtacggctgcagcagcggtttcagctacagtcagcagcagatctaagttgaggctcttaaaaagtgtgtgccagaacgttcatggctcgacgcctcacctgtgggggcttgtgattgtgactgcaacgtgggacggtagtatcagagtattccataactacggtttaccaattcgagtctaaagacagaataagcagcgcatgtagattttgaagggaattgtggcagtgtttagtgcagcattctttcattttgtttggaagtcacttagccttattcttatatacacataagaattgtgaactaagtgggtctctttgcatttgcttttaattggtactatttgtaattgtatagtgtgagatctatttgtgtgtgtgtgtaaagttataaaaatacactctttcactaataaatgggcagctaaatctctttgtgatcttcatagcagctctgtatattaggaggattgagacaaaccctttcgtggagatatcatttcatagcgttggttgaatcaaaacttgtaggcgaaaaggggagatcaactaaaagcctcccccgatgagaccatgtttgagtacccgcattccaaactcatactgataacaccgaatgtaatgttacagagacaactaaggttgaggatgatgaaggagaaatcaacagtggcacgataagtcttctaagcgagaaggtaaattttgtgagctctctgcagtcttcacttccaaaccaatcgagattcttggataaagtattgatcgcgttttctttcttgtagaaattttgttgttgttgatgtgtttgaaaataatttttatcatcaaattattattttattttttgtgtagtaccctttcttttctaacttctgatcattattaattattatcttatttcaaaaaaaatcctagaaaaacaaatatgagcaaagtcaataatataagggaaataaaagatagagttaacagagggataaaaaaaaaattaagataatgaagattttaaaaagagttagtaagatcaaattacaaacgataatgaaaagactctcacttcttctcttctttctcagcctccgaagctgaggttctcttagctctagcaccagcatatattttcattgtgcgtgctacacgaagagtttgataagcgttgaacaacttcatgttggaattgaggtttacaagctcacttgttggctcgtcacgaacaataggcatgtagtgtttcatccttttaacgaaaaaaacaaaaatatgagacaacatctcaaagagatagatcacatccaacaataaattaaaataatatctagtatcatcatcagatctaaaaaatgtgttaatgacaaatttgaattagtttactacatgcataaaccttttttaatctctaaaggtgaacaaacaacgaatcagccaactcagaaaaactcataatgaacaaaacaacgaacatagagaattctaagaggtatcagaatacaaagtaacgaattaatacatgcctttatcgataagtctttacaaaacctgaaactaataatatacttactcgagataggcgaaaagaagtagaagaaattgatcttcacaagtcgcagatttctttgcgtcaggacactgaaaatataatattgatatttagggtttgaaggcttctctatatatactcacgtaaaccctaaatatttcacagagtacgggacgaaaacaaagccattaataattgaaatccaaaagccccgttctaaaattcaccgcctatccctattaatccctgcttaatcattaggctctaccctatccgcttcgattaatgactaatcccttaaataatagttgctttattattttctgtttaattcgatttttattctgattaatcttcgcctaatcttgtatatcctaattacttttagattacaagtataaaacaatttttctttttattatttaatcatttagtttgagagtttttgatgttttacaataacttaagttcaaaattttaataaaaatcataagttttgttttaaaatataattttatgtgtttactataattttgaaagcaatattagattaatatgttttaaaaatattaaaataattttaaaactaatcccaattactccttaattttaatccgattttccgattaattgctaagtccataccgtgaatccaattaatgtctagcaatttttttaacaaagcccaaaagcaaacgatgtgctggtcaggtgagcgttagcgttttcgaatttttgtattttaatgaagttccaattctgtttcgaacaatgttttacttcaaaaaattactatcggtttacttggtttttgtcattaaaccgtaattttttgcaatgaaattagaaaaaccaagcccagacctaaatttatcgatcaaatatatatactagaaaatttatagttgtaaagctaaatcgacaggtgcgactaaaaatcatactaaatttaggcaatttgtatttaggcctatacacacattcaactgagttcatatataaaaaagaaaaaaatcaccgacatttccaaaaaagaaaagaaaaaaaaaccacaaaagtccaaattatgtaattccgtatgcatcatcaaaagcacagaagaggttatatatagaaattgaacatcacatttctcccatataaacgattttatttaaatcatgcaggcaaagggacgtcattaacagttttggtgctcttttcgtcgacactctttctaatctcttctgcaaattcccaaaggcaccaattcattgtcaaaatgtaacttgcgacttatgatccttcatccttggagaaatgttaaccccacgttacttacttttaaaactttatcgatgtaacttggtgcatagagtgtatctgatgttgaatagaaaaaaggtatttgttatgaagaagtaaagttatcagatgaacataaagagaacgtccagggagactaaagaagggacgctacttaatctctcccctttcctaaaaatccataagaaaaaggaaaccaaatacaaaaaacaaaaacgacgtttcatcctcaaaacttgtctctatggtttaataaattaacaataacagaagacatctagagctcatcgtgagactcatcttcctcctcagtcgatgattctcctcctgcacctggtgctccgcctgatctctggtaaactgctgtgatgattgggttacacactgcctctacctccttgagcttctcgtcgtactcttctttctctgagttttggttctcgtcgagccactccaaggcctctttcgtcgctgcttctatcttctccttctcatctccttccaatttgtctgcaagcttgtccttgtcgctcacttggttcttcatgttgtacacgtatgtctccagggcattcctggcgtcgatcttctccttcaccttcttgtcttcctctgcaaactcctctgcctccttcaccatccggtcaatctcttcttggctcagacgacccttctcgtttgtgattgtaatcttctctgatttaccactcgccttgtcctctgctttcacattaagaataccgttggcgtccacttcaaatgtgacctcgatttgaggggttcctctgtcaaaacgagatcaggataattattttgatattcaaaatgagactaatttaccatttactaaggggtaaaagaagaggaagcaaaccttggggccggtgggactccagtgaggtcgaatttcccgagtagcctgcagtccttggtgagacttctttcaccttcaaagacctgaatggagacggtggtctgctggtcttggtacgttgtgaaaacctgagatttcttggttggaataaccgtgtttcttgggatcaactttgtcatcactcctcctacagtctcgatacctaaagtgagtggcgcaacatcaagaagaaggatatctttggtctcatcaccgccttctccgctcaaaataccaccctgaacagcagcaccataggcaacagcctcgtcggggttcacacccttgtttggctctttaccttcaaagaagtccttcaacagttgctgaacctttgggatcctggtgcttccaccaacaaggacaatctcatcgatctggctcttctgtagaccggcatcatccatggccttcttcacaggtcccatggtcttcctgaacaaatcattgttaagctcctcgaaacgagctctggtgagtggctcagataaatcaacaccatcaaagagtgactcaatctctacacggacttggtgctgactgcttagagctctctttgccctctcacattcccttcggagcttaccaagagccttgttgtccttgctgatgtccttctggtgcttcttcttaattaacttgatgaagtactccatgatcctgtggtcaaagtcctcacctgcgcagatcataacaacaaaaggttagcaccaacatcacactaaaacaatccctccattctgacacatgttattgactatgattagcttggaatatcgacaattgcaattggcacagcaatcatttgttattgaacacaatgcaattcagaacaattcattcttaatgcaattcagaacaattcattcgtggtcacaagtattttacctcccaagtgagtgtcaccatttgtggagagaacctcaaacactccgttatcaatggtcaagacactgacatcaaaagtaccaccaccaaggtcaaatacaaggatgttcttctcaccacccttcttatcaagaccgtaggcaatagcagcagcagtaggttcgttgatgattctagcaacattgagcccagcaataacaccggcatccttggtagcttgcctttgagcatcattgaagtaagctgcgcatagtcaaacaccaaataaacaatcaatcaccaatacagataagaaatttatctctccactacatatataacagaaaacccgaattaacaacaaactaacctggaacagtgacaacagcgtccttgattttctttccaaggtaggcttcggctgtctccttcatcttagtcagaatcatggcactgatctcctcaggactgaaaaccttagtctcaccatccttgatcttgacttgaatgtatggcttaccatccttgttcacaatctggtaaggtacaagtttcctgtccttttgaacctccttgtcctcaaatctgccaaatacaataagaaagaattaaaccaacaatatcatcacaaacatatagaagaaaaaaaagagaataagtaattactttcgcccgatcaatctcttaacgtcgaagacagtcctctcaggattaacagccgcctgattcttagcagcctcaccaatgagcctttcagagtcagtaaaaccaacccatgaaggtgtaatacggtttccttggtcattggcaataatttcaacatgaccattcttgtaaacaccaacacaagagtaagtggtaccaagatctatcccaataactgatcctaacttcgtagcctcttcttttgcagtggaaaacgcaaataaacatcctgaatcgtaaaaaatttcaatcgtcaataaaactatcaaaaccaaaaacaccaatcaaccaatctcaaaacttaatttcactctattatcaatgaaatgaatctctaagatcgtgattgtctatgtaatcgagatctaacctttaagatcgtgaaattgcaacacaacattgtaaacaaacacattcaaatccaggaacaacgaacacattacatcggatttacagttctgagatcaagcaacaatgcagaagagatctaaatcgaagaagaagatcagaaaatcactcaccgaagaagatgatcgcaagcacaacagtgctgtttgctccaaacgagcgagccatatcggaaacttttgcgtacgatctctctttttgatttgaacagagagcttccttttgttttctggtttttaagctttgaagaagaagttaggatgcttaaataggtccagtgcccgaaggtgatggtgaagtagtcgctttttatggaagacgaagaaatttaactatgtcatcggagatgacgtggaccaattatcttacgacgatctataatgtcaaccaatcagatttggtcttgtgttggagtaatcgtggccgttggttacttcgtttcttcttcttaattagacaatgagcttttgttgggccagtcttcttctattacatcattaggagtggaaaagaaccggaacctgagtaaccgactcagaactgacccgaaaaattggatttgaaatcgaatacgaatccgaacctgatcgtatctaaatattttattcgaatatataaattttactccatactcaaatttaatccgaaaatccaagtatttacttgaaatttcgggtttcgattccaaaaaagaacctgaaaattatagccaattgatccgaaccaaaaccgaaccaatattttagatttattttattggatcataaatttatctatccgaatgactcgtacccaatcaggttttactcgaatccgatctgcgtacccggatgtccacccctaaccatcaccgttaacaaagaaattttttcactaattaacttcgaaattatgaaataattatttgcactattagaaaaatattgatggctcgtactaatatatttttggatgtaaccttaaagaaataaagagagattaccttaacgtgtgattttgactatcttaagtcaaagataaaaagagcggtgtgtagaagaaagtgacgaaactaacagtgaaaatagttttcgtatggtttctgttgaattgcaactaaagcatctgaaagaaaagtactaatatcgacaaaataagcatctctctctcttatttcacattagttttgtacaaatcttttcatttatcaaatacaaggagagattttagtttctcgacttgctcatactcatcaatgccttgaacatcagaatcttcttcccttttcgcgatgaagattgctttatctccactatctctgtatttctcgacacagatatagctctttgaggttccggtaacgctaagggcttttacaatacacaaaagatagcagcaaaagtaattaactaaccaaagatgttgaaattttgaagtaaaataatctttgtaagtgctattatctatatataccggtttctttggttggcttggggagcttgaacgtttcagtagagatcctgaacgtaagagagggaatctcataggagagtttgatctcttatctgcaacattacacacacacacacttaattgattgaacttattctgattaaagtcaagtaaagaaagatggcggcttagttattgtagtagtaagtacttggtgttctgttgttgatgttgttgtgtacgataggtgcaaaagagaagcttcctgtcttgttagctttcctgcatttcacaaaccaatcgtattacaaacaacaaaacaagaagaagaagaagagaatcaagattataccttgcagtatttgggaggttttctagtattgttgatcgaacagctttcaagcagcagatcaggagaaagattcagatatcgtataaacagaagcaaactaaacaatcagatatagataaacggatttagttaccactcgtgaaccggtgtgagtcatctcctgcagagaaacttgtgcctcttccttgttctgtgaaaaaaaaccatcgatataagggcggattatgattgaacggatcaattgtgtgagggggaaaagaggttaaaaaggtatacgagggaagaagtaacgcttatgatggcgaggatattgaaatagaagcaaatgctgatgagtgccactcttccccatgtaatctctgcatagtctcatcctctacaacaacaacacataccaaatgtaagacagtttcaagagtattcatgattcaagatttcgagtgtttacttgttcaagagaagataaacgaagatgagtggtggagaaatgagttgagttatcagagagaaaagagttgaatttgtcagagacagaaccaagatgatccactgtgttcactactgcctttgctgcatactctttcaacgtctctatcactctgcaatcattcatcaaaatcactcgccacaacaaacacatggactagttcaaaaatactatcgttagtatcaagaaagacaagtaagattacgtttctttgtgttctgctttgccataagatgtttcgaagtactcagctgctgagtataactgtttccgcagattctttaaatccttaaaacaccaaaacagaacagaagatgaatcttgaatgaagacaaaaaatcacaattgcctattgatcaatctatgtttgaggagagaaagagatagagagaacgatcatacaaaccttgagggtttctgagaattgaagagtttgcttcatgaagagttcgtcatgattggaagattgatgaagaactatcgctaaagatgtagagctcgccattaatgagatgagggaaagagagagaagaagataatggagtaagtaagaaagatccaagtggagacactatacacacatactcgacacattccatacgttctttacaagccaattattttcttttaaatgttagtaactaataataccaaattacatttcattaaagactgaaaaataatatattaaatttattacgaggatttaaaaattgaaaaaagcagtcgacaaatcaaaacataatgacccggaatattgtatttagagcacacttttcaattatcaaaatgctttttaagaaattaatttataagttattaatgattccatcaattattaaatacacaagtcaagaaaaaatcggaagaaagatttgtagttggaaaattaatggagcagaaagtagagaagaagaattatttaacattttgttaattaaagagaaaacaacttctcaacaattttgatattcttgtccctctttcttgaataaaaaaaataatacacataatatatttacaagcagtgggacacaagaatcaaaattcaatcacggactcatttaatggagttgcctttatgagccagaaatcattcatgtgaccataacatataagttgcattataaccagacgacaaaagaaagaaaggacagagctaaattatctgatgaatcaaatcaactgtttgggaaaatactagtgatgactgaggcgtgtaagtcaaacaatggtaacacttgaatgggatttacaagatacgctcgagctctctggtgtaactgagagtctggttgatgagttgaagtgacggtatctccttgcacggtgcggtttctctggttttttggaagacaactaacccgtctttaacttcccactccgggtgctcctcgttcacatatgttaacagttgttgatcagacgagaagagtaacatcttacaaccttcactgattgagagatgatcgtatgctttctcactgcatccagctatttcatctctacagataaacaatgatgttttaagtcacggcaatgagctaaagaagagaaagggtcaaatgacaaatgaagcctatttacctaatggtttttgccaagagatccatgaaatagacgtaagtctcatcaggtgcggtttgtctagcactcaacacacggttataagcaccttccatgaaggattgctcgagctccaccgcatgcttgatgcaaggattctccaaggttgcagatgaaagtaatcccagttctgtgtggaattcagctattctgttctgaacaagcagtctcagtaggttcaaccccatgattagattctcttgcggagatggcggaatacgattcctggtacatagaaaaaacagagcacacgtaagcaaaagcaatgcattcagtgagagtgatataagataatgatcaaacaactctaaatcaattggttcaacttaggctctctactcattaataaatcaaatctatattaaactttgacattgatatattcaaggttttatctattgatccgcattgaattagggctaaaaggaaacagtaccttaagctgagacaagagactggaacaggtatcgaaatcttttattataaacgcagctttaaacctctcgaactgctgtgaaacctccattagttgcggatccatctctttctctatgaatttttctctgtcaaactggcttcaggaagaagaagaattgaagaataagattgccttttctaattgggccgtacatgggcctgttgaatcagtaattgaatgggcttaaagtggggaatgtaacccaatagaagcttccggggaattttaatacgtgttatacagagtcgaaaacttgatgctgacacactcactgtctttctcgtcaacgcgtttttggtgtttggtccacaatccttagcctctaagacaaatcaacccaaattttcaaaacataaaattaattagttttgaaaaaaacaatattttaaaattagatatttgttactatcggcacaaataaatctcctctcaaaagtctgccacgtcataattgcaattgttccgcgtctctgctgctacatgctcattcactcgcaaatcgcaattttcttcttaaccaaatttttatacaaaaaaaaaagctcagacagaagtactaaatggtaaatttgacataattaattggtgtgtaattttataaatacagaagtacttgtgtcttgtatttattagtattccttatttaataaattacttttcacttaatcatccaactttgtcagattcacacgcaaccttgaaaaaataaaatagaatggtattgtgactttcgtggaaatttctacttagatgacacagttgctccaattaaaagcttacaactttttcttcatctttctttatatttctcacccatttttcaccaatttctctccacttaaaaccaaccccaattctcaccaaaaatcgcaaaaaagatttcaactttcgataaacccagatcgaaaaatcagatttttccagatcaatcagagagttagagatggagtataataacaacaatcagcaatctttttggcagttcagcgaccagctgagagttcagacaccgaatctagcgaatctgtctctcaacgactcgatctggagcacaaactctgtcttcaaagagcgtcgaaacttagacatagccgccaccaccgacaagaacaacaaccagatcgactattatcagaagaagacaacttccgacaacatcaattccaactggaactggaagtcttctggttcaaacaacgacatgggtttaggattcggacctgtgggttcaaaatccaccgtcgatttaaacccaatcgacaaattcaactcaccgttcaacgacacgtggaaattcaactcagtcaacgttaacgttaacggttactcaccgtcaagcgccgttaacggagatttcaacaaaggggtttacacgtcgatgaagaagtatgggtacaacgtcaatctaaagaacaacaacaagaacaaaggaatcgatgaagatcatcagattcagaaaggtgggaagaagaacagaaagaatcagcagaacaataataaccagaggaacgaagacgacaagaacaatggtttggacaagaggtttaagactcttcctccagcagaagctttgccaagaaacgaaaccattggtggttacatctttgtctgcaacaacgataccatggaagagaatctcaaacgccagcttttcggtattcatcaccacatctttcttcttactgtttcgattgtttcttcttggttttgatttgtggggatggaaattgtttaggattgccaccaagatacagggactcggttagagcgataactccaggacttcctctgtttctttacaactactccactcaccaacttcatggaatctacgaggcagctagcttcggaggaacaaacattgagttgaatgcttttgaagacaagaaatgtcctggcgaatctcgtttccctgctcaggtactactatgtacttactttcttgcgtttctttgagctcttgcttttgtctaaatgctaacaaattttttggggtaataaaaataaaggtgagggccataacgaggaaagtatgtttgccactggaagaagattctttccgacccattttgcaccactacgacggtcctaagttccgactcgaactcagtgtccctgaggtacgtttttttcatcttctttagttcacaaccacttttttttcttacattcaaagtctaacgctttggttgtgtttttggcaggtgctttctctattggacatttttgctgaccaaaacccttgaattgggtaataccaatgaagaacacaaaacagtggtttgttacttcaaatccagaaagagagagataccccattatacatatatgattataaggaggagtattaataataattgtctgaagaaatggtattttactagtttatacagtttctttcttaagtatattcccaggagatatgggataaatagaagatgtgctatttttgtgtgggtggatgaagaatagatctcatctccgcgcttttttctttttgtaaattatataaaataacatatgtacaaccccaaaaatagggagaaatgagatgatgaactcttatcaatttgtgtttgatatttttattattgctcctattcacttcttgcccaattctatcttgaatttcatttatactagtcggaataaaccggccacttcatgaaagatttgttgtaacaaacaacaaacttctccaacaagtaattaaaatgaatccagaacagaaggcaatggtttgggggaaaaaaaatgtgggaaagattagttgaagcagcaaaagtgattagagaaaagcacgttaagaaaaagtgtacaataaaagtgttaacatcaaaacatcaaaatatttaatttttgttcgtcggcattagttttgttataaaccataggagaaaatgtcagaaatagatccacaacttaaaagaaaatctcacgacgtggcgtaggtaaatggagactggagatattaatgtgggggagatgaagaagactttgaattggtctttgttttgaaatatgcgttcacgcttagtggaaacaaacacatggactcgtctcgacgctaattacgcggaccagattgtgccacgctttaacggtgcacgttggctttgtattcgatgggctgaaacttttgctgactttgtgtttggaccaatcagccacttgttcaccaattaagattaaccttcttttttttttatatagattatcggcatttatgtatattttatacgaactggtaataatagtgcataacaattgcaacaaaactacaagcttttggaaccctgaaagggttgctgattcatggaactagaagtgtattctaaggttgagacttgagagtgttggctgagaaatttatcaggtgtaacattggtagcttttggtttgataactggaccgcctttggtccactcatcaaatttattggtaacgacgggacaagaagcttgatagttgccgttaatgctaccattcctgatgtgtgcaaacctgatggttggaatcttgctaacccacggtctgatcagtataaaacacagtcaacaatccattggaaagcgaattacaagctctaatctattatttgcaatattcagctgctggagcaaaggctatcgaaaggtgtgtttccaaggtaataacagacaagtatctcttttcctgaacaaaaaatagtgccatcaacttcagaatctgtaactgaattcgacacattaggacttggcaagccaagtttgaagaggtgtcctgcaaattttcttgcaagagctcaaattcctcagacacattgtcttattgcttagacacatgtttcatatcggacaaaaacattagcttccatgaaccagaaacactattaaaaaaacaaacagagacaatctttgaggaaattacattaaaactatccaattttggatcgacatacttttagattaataatatctaaatactcgtcgactctattctcttgggaagcatcgcaagtttattgccgatcaactttactgcttcttcgaggaaattttcaacttcttctttcacgattaccttgtaaggatcttgagacagatcaagatccaatttaagtgaagcttcttctcgcgccttaatctctgttatcttgtacaagttcgaactttccaagatcttcttcaccgtcttctttattttcctccgcagatccttgtcgatctctacttcttctctcgctacttcctccattgatgatgtctcgccgacagagagaaaccaaagggtttttgttttgttttttcttacgagtgataaaaccttctttagggtttcttaactattgagccgtaaaattataaatgggccgataatatgtttaggcccaatcatcattacacatttccaaaaaaagttcttcttggacttgaaaaactgggctatatatcacttgtttgaacttttgctagaacttgttggctttgtctggctgcaaaacaaacaaagagagaagaacatgatcatcattactctgcaaggttctcaaacccattttgacattcttgtacatgccaaaagacggtttttgttgcggtccaatttgtttcattgttgattgtaagtgtatataaataatactaggcattaacataccgtagtagtgaatcactggtgtctacagaagtggaggatttagagtcaccacgaccaaatgcaacctcgtccatgctctgccctatgcggcggtatctacctccggcctcaacaaacgcgggacaaggcctgtaagccttaattggccaccaaccgaaaccggggacagttgcaatgccaccttgaatccgtccgtcaccattacacccactctctttctcttctttcccacacgctctgcaaccactgtttcattcctcatgttatgatctattgactatagagagatggatccatcacaattcacaaatgacaatataaccaatcgctcaagccaacatgagaccacaaagaaatttatgaggttagttattgtagagaatcattttaagagattcactagtgtaacaaaattgaagattcatataacactaacaagttaacagcagaaaagagtctctatgatttcatcatttacgcaatccctaatctatcactaactctaaaatccttaatgtcaacgaaattggattagctgagaaaggtttaagctttccaatggaatcgatgaagagaagcaaaagggtacctgaaagtgaggtcgttgtcgtcgtcattatcagtttctacgacggaagacggcgaagaagaaagagagagtagtggatgaggatgatgctttgatgatttgttgagaaagaaactgcttgagcttggccatggccttgatttgtgactaccattgttgaagatgaaacatcgaggcagagatattgatgaaatggaattcgccatttttctttcctctgtgagctaagagaagagagtgtgagaagataatggccacaaattcagaaacgcaaaacaaaataaaaaagagtacattacaaatttttattttaaactattagaatttttttcttattggtaatcatatttaaatattatactctttttttgggtagaatgtttaatattatactattgttacagaaaaattatcatatgcgaaaaatacattttatagtaattaaataaagggaatagagaaaatctaatctatgtggatgttataaaagatacgtaacatatcgggtgatggacaaaaaacattagaggcaggacaaacaatgtggatgttataaaacgatacgtaacatatcgggtgatggacaaaaaacatagaggtaggacaaacaatgtggatgttatataaaacgatactgcatggtatcgggaagatcatcttatacaaattacagaccctaaatctctgctccgagtctgagccacaccgaccagaaccgagcaaaacagtggacatgacatgccggtatcacttggaccaagcaacagcatcgatctcggattgggctgctcgatacaattctagccgctttgagatggcactgcgtctctccatgattgctggatcttcgttcaatagcgacgagagcctcttcatctgttggatatcaccatattagttgactcagtgtttacccgaatgacacttctttaggttaagaaaaaaggcagagagcacttacatccatggtaccgagctccgcaaagaaatggtcgaggagactgcgcttcgcttctcggacttggcagtatacgatggacttggggattgaattccgcaggccagcacagaccatgttcacgtaagacaaaacattggatcctgttgccaaatgtctaaaatttgtgagatatacggtaccagataattatttatttatatgggttaaccttaccgattcgtctgagataggaatcgttgtagcggtcgaaaatggagtgtgtggggttaccacccttctcaacatcctggggaagtttcctgaagaaatcaacagtgaggtaactgcactccatgtcaaccagctgcagtgttgctttcttacttccttcccgcattttatccagcgactctatcgccgcatttgtcacctccactctcagagctgggtattgttttagttcctgcacatgttcaaaccgtctataacattgtacaaaagtactagttgttggagatatatatatatatatatatattactaaaagaaaaaagaacgtaccacagtttcattcacagacttgtgaaccagatcctttaagatagcatgaacctaatatttaaccatagaaaaaaaaaaaaacggagagagaagcttattgttttgtgttaggtttttgatacatctttttagagatgaaagtaaagagttcatacggtgtcaacagatgcttcagcagggcctctgatggagacaatagaagactcaatgagacgacggtaaccttgctcaggagcaatcaagtgaggctggtaaccatcagcctcagtgaccagcttccggatgttgtccatcgctagctgcttgtcaaattggagtctcttcagagccgcaggaagctggttatcaaacacgttgtacactttttcaccaccagcacgcctgtgtaatcaaccatagtcttaaattacaattttccttttgtagtttcagaaggtcaagagtagaaatatcaactcagacgctataacaactcatggtgtaatcttaaacatttgaagtaaaaagagtcaaaacgtacactccatcaagatgctctttgaatatttgatcaaaaagccgacatatctccattattgagtacaacttcccctgcatcagaacattaagtaaatcttgatagcgcaattcaatcaaaaataaaagaatacacaatttacccctgcatcagctgcaataggctttccaaggcgacttagttcagtttccagctctaatactgttttgttaataagtgactgaatgccaggaattctcgacttgatcacacgttctagatgctgcgcaacaaataaaattgttgcaattaggctctgtcctgatggttttatacagagaaacgtgctaagcattgccataacttcgtagtttcttagtattttctgtcggctgctaagaaaattagcagcaatcgtgaaaacactggccctgaaactcttatttaccactcctaacaaatttcacaacgccaacttacttattataaagaacctggtgaagaaaactacccctagcctcgtgaaagcacgtaccttggagagcatctttgccaaatgctcggaacccattttattagcaaggtgcctatactcagtagtattggaaaagtactccctctctcttttccgagccgcaatcatgtcgacattcttgttaatatctgcttgggaacggttgacgacaccaacccacggatatttaagtttaaaagatctcccttccagaatctgagcaaaaaatatcatttggtaagtagcggtgcacgcaataaacattaatgagggaacataagtattatgatgttactacacaaattagcattttatagctccaacatcatatcatagactaattacaacacattttattcacagtaattcgaaattctagtacagatgttctataaactgggaattcaacttacttccactgcatccgtccccttgtccataagatcaatctttgtcaagacaccaaatgttctgtcccctgtgaagatcaccaagattataagagacataggatgacagaataatgtgttgggtctcttaggtggaaaaatgaattgtttgtaaaatgctcacccgatggatcaacctcacgggaaattttaattgcatctgaggtagcaagatcttggtttgcaggtgagattgccaaaatgatgcagttgggctataaggaaatttaattaaataaaaaaaaaaacagaatagtgtcaactcatttggcgctacgaaaacataacaaatatagggagaatacttatatattaccgaatctaatttaaactggcgatagctatctataaaacattaaagggtctgggagtaagcattttcatttaccttttcaatgtaggaccgaaccatgttttcaatgtccttcactatactatcagattgtccatctgcatcaaccaaaagaaatttgtcgtgtcatgccaaattatgtatggtagagaataaagtctattgcctcatgcttcatcgctagaaaaaatagaccaaaacttcttgctctactgtaacttaccaacagcaacttttgtaagccctggaagatctatcagtgtcaagttgacaactgcacacatagtaaagaggataaaaaattagagaatgaacaaaaagcacatacaactggaaagagattttgggttgtccttaccattgggagagtatatgctaaggtgaatgggaacactagaaatagccttgctgcgtccagtctctctgtcagtctcatcttgaatctccttcctcacagcagctatagaggtgattaaattaatcaaatatcaatggaatacaggagaaggtgaaacttgaactgcaaattgagatagccgaaacccaccaaaatcagtaaactttttcctcgggaggtgaagaaactctgcatactcccgggttccatcatcgatcttttgcaactgtaagacaaggggccttcgagtaacaatgcctacaaatagttaccgcaaatgcatattgtcattactcaaggaaataagcaatttcataattaaaactaagtaagaagtgttaacactgtatttaccagatccacggggtaaaaagtcctttcccacgatgctctccaggactgaagacttccctgagctctgtcaacacaataaggatacaacataaacttaatgccacatagaattatcaaagtacagaaacccctctccacaacaatcgtagcttaaattaaatggttcaagaccaactagtgaaaaaatatccaagtcaaagccaagtcaacattcctcaataccaattgcttgcaaagctagttcatagtagaagctattaaactataattcctcacgatccggatgttgataagcaaaaacaacgaagtttagggcaaatttatccgaatacctcagctcaatatcaattccgaatcgcaaaaaaaacgaacgaatcgtgagatagatcgtcaagcatataatggaaggggaaggagatcgagatgcaaacctgaccaccaacgacggcgatcgcaggcaaggaatcccaaagagtaggtaaagcgctggagtctccatggtctcctaaagccgtgcaagctctctgtatcttgttaaccagagagatcagattttccatcgtcctctactcctcgtttccccaatatcaaatgagaagcccaaaatacagtagctgctacaacagatcggcgagatctgatacctccgccggtaaaatttattgcggaaggagtagatctgcgatgcgacggtgagctatggaaccagagaaatagagatagagagagatgagtttttgaatttgagtcgatgaagaatttttgcttgctagtgttgggaaaaagtaaaggggaagaaagcggtttatataaaagccaatacagggtcttttcttttccaaagaaaatttgaaacggcatggtgtttatttcgagaattcaaagacgacgaggagttgaccaaaaacaaaataaaaacgacgaggtgtgtcgtatatattcaaccaatcccttaatattccacatctctctaaccaggtaaagtaatgataatactattgcatgcatgaccaaccatataaataaatataacaaggtcgattttcttgtaaaagaatgtaacgagttaaaattcgaataaaaaaactatcacttattagtagagtaaagtgatttcatgtggaccacgaacatcctcattacgattgcagttcaaacggtccatagattgaggattcaaaaaaaagataagagacgttaaggattatgattgtttattcaaaaggatgacactaaacaacaaaataactgtagttttgaaaatttgaatgtataaaataaagatcttttctagaacaaacccactaaatctgactagtaatgtcacatcgattttagatagcgtttgcattttggcaaatactatgtttggttggtgagatccaaacgctttttagaaatgtataaaacatagcactaacacatttttaaaccttatgtattgtttacgcaaatacacgttatttattttccagctaagtggtgaaaaaataaaccggttcacatttttttttttaaatgttactaatgttgtgtttgtctacacaatttttttaaaaaatgttactaatgttgtttgagacaaacacaacgtgtaactttgtatcctacatactcttgtatcaattgttagattttatgatgttcatacgttaacaaatatgtatcatgtgaccaacttctatccctcaaattagaattttgaagttagtgaaaacgtgatgtaaaataggtttaacatatgctttatgggaatatgttgagactaatatgaaatacaaatgaggttggagtgagacatgctatgtaatatatttaggtatgtagactgtatgtctccgtagcagctgcatgaatttagcttccaaaagcacatatacttgcacgggtcacacggtttatttgcagtgtaactttttcgaattgcgattcttgaacaaaatctctaagagtactcttctactactttctgatgtttttcgtcatatgtgagtggaagatgttggtttagtgtcgggttgtgtagagaggacaagagttagaccatagacactcaaacagtcaaaccaatctattataaatagataatatctctccggtttagtatttaagctttctttgtataccatttatgtttaatgaaggtttcgcgcttgttgatacaatctgaacgagatctaaagaaaccgtaaaaacatttagaaataatacatctccaaaaaaaagtcattcggaaaaacattttatgatttaaattgatggataatttgttctcaacttatacatccaatttccgaccaattcaaaacgaaattcatcaatactttaatttcttccttttttttttttttttttttttgtcaaccgatataaatttgaactcaaaagatccaatcccgagagatattgtttacatacgtgacatgatgcggtacggtacgaatctttcgtgccaacttatccgcttttacatttgcactacgagaaattaaagataaagagaaatttatgaattcttccctatcactctacaactccttcaaatacactggaaacgccggccattcggttggaatcggtgaattggtgaaatttttgtttctagaaatcaactaatccgtcaaagatggtttattcccttaatgatgaaggaaaatgggttctcttgttgctaataaaataatggtatttattttgtttcttagaaagaaaaaaaagactaatttaatttggttggtcacacacaaccgttttcatcggaagaagaacaagttggattgattttgctttggatctcacatctgagatcagattaatctctctgtgaagtcgaagaacgaaaccctagttcccatggatctctcttcacgcttctcatcgatccttatccttctcttgatctccatctccatagcttcggctgagattcgtaaatcagagatccgatccgatgatcgtccaatcatccctttagacgaattcggtttcactcacagcggtcgtcttgagcttgacgcttccaagatctggctttccaacagcaatcccgatctcgatctctccaaagtgggcttctttctctgcactagagacgcttgggttcatgtgatccaacagcttgaagaagaagagatcacgtgcgctctacaatcagatctcgttaagcatgtgttcaccttcaacaatctcaagggaggagataagagcagattctccaccgtattcaccgagaacgatgcggatcagtactctctcgtcttcgctaattgtctccaacaggtcaaaatcagtatggatgttagatccgctatgtataaccttgaaggtaaaaagggaggtcgtgattatctctctgctggaagaactgttcttcctaaggtctatttcttattctctgttatctatttctctctcgccgccacgtggatctacgttctctataagaaacgtctcactgttttcgcaatccatttcttcatgttgggagttgttgtcttgaaagctttgaaccttctttgtgaggctgaggataagtcgtacattaagaaaactggaactgctcatggttgggatgtcttgttctacattttcaatttccttaagggtatcactcttttcactttgatcgtcttgatcggcaccggttggtctttcttgaagccctacttgcaggacaaggaaaagaaggtcttgatgattgtcattcctctccaggttgtcgctaactttgctcaggtggttatcgatgagactggaccgtatggccaagattgggtcacgtggaaacagatctttttgcttgttgatgtcgtctgttgctgtgctgttctgtttcccattgtctggtccatcaaaaacttgcgtgaggcggctaagactgacgggaaggctgctgtgaacctcgttaagttaactctgtttaggcagtactacattgtggttatctgctacatctacttcactcgtgttgttgtgtatgcactggagaccattacctcttacaagtatatgtggactagtgttgttgccagcgagttagccacacttgccttctatctgtttactggctacaagttcaggccagaggtgcataacccgtactttgttgttgacgatgaggaagaagaggctgctgctgaggctctgaagcttgaagacgagtttgaattgtaagtcatcactggaataatcgtgtcacgtgtgagtcagtaaaaagaaacatactttgtttgacaggatgattgagagtaaaccggatcatcagctgcctgctaaaccgccttctcttctttggttttttcctcttgttatctttattagaatgcaatacctgttttgtttttacttgaattgttaggatacttatatagactctatgaatgtcttgtcccccaatgcatagtatgtgtattactggtaacataaaacgcttggtgctgctcgttatacttaatctgagtctctgcttttcatttgatagacaaaatggctgattagaaaagttgcttaaggaagcaaactttgttcactactatttgccttgttggatctgtatttatatctttgtctgaagtgacagacgaaagaattggtatagtgtgtggaggtggaagagattaacattgaatgtttggtggaccatagagattgattggtcacataaatacaaaaagtttggcggaaattaggtgtacgaatgcggaggtgatttattgaagggaatacatattttggaccttgaaaaaccggatctgtaccggtttgggaaggaagggttaccgtccagtgtatcggattgcttcttcagaatccggtgccgtcgatgtgcttgttggggggactagctttctgggagtcttgtggtgggttggtgcgccggtggggttgattcgaggacgaaaaccggtctctttcgtcggagtttctcgagcatcggttgcggcctcgaaactgtagggcttgagcccgccggatctaatgctccggtctctctgctagcttccatcaacaagcggcgatcttccttctttgccgacatgttttccgatttgctaattttgtaactggatttgatgttgtttttgttgcggcccaagcccatttgggatgaggattaataatatttaaaaaaaaaaaaaaaaaaaattagcacttgttgcttgtgccaagattctgtctgccactactctggcctcaaatgtcttcaagttatacaattatcgaaaatcatcatcttctttagaaaaatctaatcaactaagattcattatttaaataatctatgcttaaacaagaaaaaggagaatggaaaaggaaaaaaaaaaagagttggagaggaggtcggcacaacaaagatggtatgtctcctaaatcatcctccgaccaaaacaccaacacaaaactaattaaattaaatttgggggctatatcacgtcatcaaccgagtaaaagtacaaagccgacgagatctagtggagaagcttttacaaccgaagcttgatgatgcaaagcaagaagaagaacaacacacactcaacgaatctgccttttccctgcaaaaacgtcaacaagcattgcctatgtcacactcctttaattcgtttattcaagaggtcaacaagtcaaaaagtgaggcactctaaatcaattatattttcagacaaaagtaacaaaacaagagtcatctccacgtgataaccaatccaaaacacattgtcacagtttttcgagtttataataaagattccaactttttaaccaaaagtcactaactttaccacaatgttaatccttccttattcgagctttgtgatttttttttcttttaccactaaatttattgtttaaatgaaacaaaacagataaatagagtgacaaaatatgtctaaatatgcaacttaacagtaacgaccttctagtcctaaatgtctacgaaaattgtcaaagtaaaacaacaaatgaagtgtaaagtcgaaaacgttaccccggcggaggaaatggacatgtaatccggtgatgggttacccgtgactggctgatagatgccaccaccgctggaagagccaccagtgttaccgccaccgccactgctactaccaccagtggagttgctgctaccactaccactactatgagtggaagaggtcttgatcccaagtgagtaaaccggagttccgtcagggttgaagagaccgtagttcctctcggaggttggtccaggcttcatgttctcgttaaagagagcaaagacgaagatggtgagatcgcactcaggtcgtataggcgtcctcatcttcttgctcatcatcatcttgatcagattcccattgtacttgcgagcattgtcgcaggtggctccgacttcttgcgggtcaccgttggaaggccatccggtctcggagacgacaatgggaactttcttgtagctgatgccgacagcgtcaagagcgtgatagactgcgtcgacctgagcgaagagcatgttgtcgtagtggaaattagagccaggatcggtgaagccttgatttggttggaagagtacgaagtcgagagaaacgtgtttggggttttcttcgtaggcgaagaaagggtaggcgttgatgaggattggtgagccagtcttgacgtggaagtccaagatgggagtgagggagccgaggaggtcgcggcggaaggaagtggccgagggagggtaggatacatccaagatggctagtgagtgagccgtcgtcacaaagatctgcttgtttaggccacaatccaccagagcaccgtggatgctttgcatagccgggaagagggctgccgtgagggctgactggtttgaggtgaggacttcgtttcccactacgatggccacgatcttggtgtttgggaggtaagcttggacgttctccttcacccagccttgggctttaatagggtcgctcatctgagccaggtactcgttaccgagggccacggtgagctcgaagccggagccggcgaaggcacgtagggcttgtggatcggcgtcatagagcttgacttttgtagctcccacagacttgaggagagggatgacgtttttagggggaggaaggttgttagcgacctggccatagttgatgccgatggaggagacgatgagaggaagagagaacagagcaaggcaaaacagagagaagagagactgcagagaagaagaagccatagatgaagtgagagagagagagagagagcgtagtgagtggttgtgagcaagatgatagaggaggcagtgatgggaccagagcgttaggattcactaaatttcaaagtgaaatagtaataaagaaataattgaaaagaagaaagagaaagagtaatgttggtttggatgagctggaagtcagtgtctctggagcaagcagtagaggagagagcatctttcttgttttgcttcctctcggattctcacttctcttatgacagatcattcttgtcctcttctctctcggtgctctcattacaacacttgctaggtatttgagacagctacatggagacagaacaccaactagaacatctaccactcatgtctttcaacagcctgtttgcttcaactagtcttttttccaatacaccagaatttgactaaatccaactaggttgatgaccttgaacggctctttaaagtttaaccagatacaacccaatgattcaaaacaccaattagagccatcgccacacattgctttgtctcatataaagtaaaagcacaccaacatatgaataaagtttagctcacaacaagaaagagttcaatttagcatatcccttgaaagcaaaagaatgttaataaattctcattacagagataatagaagacaacaaaagagaagatgagaatgataagattaaagacctaagtgacgcactcacgctttgaatggaaaaaacaaagcttttgcatcacccaagagaagaagaagaagaatggtatttgtaatcttatcatctgtgtgctgtgaccagcgtctctatgaaccttaacccatcaaacctcggctcgaaattgtccgacccattcgttttcctcgattcccaaacctgatcaattcatatccacatctcagtttcaaaccacagaacaattgaaatcgtcgaaatcgcagatcttaaaaaagaaagaaaaacctttggggagactggaggaagaatggaggaagaagagagagcagcggtggagacggcaatgacagaagcgaccacaccgcttgaaaccttcatcttcttcttcggatccgacgacgccggatctctccaccaccaccgactctctggagctgcgtgttgcgccttgtttcaggcttttcttaatatcaaattttcagttaaacccaatattgcccttcctttttattttctccaccattacaaaaataattaaaaaagagaagtacttattaataaaaaaaacaaattggcgttggaatgtggtattatcgtaacggtgcatttgattcgagttgttcgataatctattttcaatggttgaattattttattgactcatctagtgggtcaatttgtggaactatcaaattatctcaaatataatggaaaaatatttcaaaccatacaaatttagttatttatctctttttttttgtccaataactcagtatattataatcaagactttcttggtccaataacgggcttatcactagtatagtattaaaccatgcaaccaaaaggccatttttgtgtgttattgaactagtaaattagaatagtattttaaaatccattgctattacttattaccatttaccaccattgcatgcacgttgtttcacccgtgtatgtatgtcaatagaatttaacagttttttgcaaccgtgtaatgctgtacaaatcatgagtctgtttgggtaataaatatgaattaatgttttgttagactataacaaaatgtacttgatgtatctatttatttgagttatgaaatactgattactccgggaggtttataatctttagtttccaaaactagacaaataaaaaagattacaaattttccaaatctcaaactaaaatgtaaccaattacagaaagccccaaaaaaaggaatcagctaaagtgcgatttaggagtcatccaaggaagatcctccccaaccaaaccatcgacaatcatctcttccgcttcgttagccggtcggattctcaacaaaggcctcctcgccggaagaactggcaacggcgcctccccgcgtataatcctcacagcatccttcacccttggccgcttctcactgtcaggatgcgcacaaaccatcccaaccatcaacaccctttccatttcctctgcatcgaactcttccctcagcatgatgtcagccccatccagcaccttccctgtctcccagtggctccacatcaggtctacaagcaccgccccgtcatcccccaccggcctacgccccgtacacacttccagaaccaccactccaaagctgtacacgtctgttttttcagagggcacacctgtgtacacgtattctggtgccaagtaacccatagtacctgctgggagtgtagcagctcgtccagctagcaacgcactgtgctcatatatctcagctaacccgaaatcaccaagcttggcgttaaactcggcatcaagcattatgttacaggtcttgacgtcacggtggatgatctgtctctcacattcttcgtgtagatatgtaagtgcggaagccacaccgagaatgatgtttaccctctgcttccaagagagtactatgatctcttctgatggatcagatgagggtttcttgtgtaggaattcacttaaacttccgttaggtaagtactcaaacactaaggccgtctctgttccttcgctgcaccacccctggaactgaaccagattcttgtgccgcaagtaaccagtcattgtggtgaactctgtggtgaaagggttacggttgcattgtggccagtgttctcgatcaaaccgcttcacggccacggatccaatggaaggaatagagcctctatagacagtagcagaagctccttgaccaacgattgcgttctcattgaaacccgacgtcgcggatttgatctcagccaaggataaccttccaggcatccgaacaagccccgaattcgaatcagcttcctcactaatccttttcttgccacaaatcaatgagaaaacaataaacgccacgaggataacaattgcagccaaaccaggtaaaagactccaaactggtatctttaatccaacaactgtaaccctaaagttgaaacctttacgatgaatttccttcggattttcggaaacttcccctgagcaaaccaaacactcttcatctttctcctcctcctcttcttgaatcgcatcagaatgagacccaaaggtcctaaatttccaccgctcaacgatatgcaaagctgacccaataccagcattcgaagcagagaaaccaacatgcatatactctttaactttaccagagagatcaatctgtgttgataaaacaggactagtaggcttaacacgagaatacccaacccaaaccctaatcagtttaagaacatcactatactcaatccaagccatcatctttttcccacttttaagatcaaaccctttcgaaatcgcatcaacggaagaaacagagaagattgaactaacatcgattccaacatggttatcgttgatgtcaccgtgaaccgggtcaaatctagtatcaaactcaacggcgatgaaagaatcatcaggatttggtagacccaagaagccattagagaagacgaatgagtcagcattagacgtgatcaagaaagcgaagccgtcaccaaaagggcaagaaggagaagcgatgatggagaaggagaagcggcaagagaaagaagcggttgtgttagtggaaggttcgagaaactttattgggtacacgtagagagctcgtccaatgccggaggaagatggttttgacggtggtgttgtgacggagggaaagcaaggttgttgttgggttagtgagattgtacggtcgcggaagaaggcgtcgccgtagagagttaagttttgtagcggcggcgagaaacggtgagaaagtgtgggaaaatctagggaaaggaagagaattaggtggaagatgacgagagagtaatgatgatgattcatcttggttcccgttgtgtcatgtggtttgtgttattttcttgaactctgatctttggttaagagaggcagagaaaattataaatcgattattattaactccaagatggttttgtaatgaaatgtaaaggatgataattttataagcgcttggttatagagacaaaaatgagaatgaataaatctagaatgagagtgaagcaaatgattaaagatcgtcttacacaaatggagcaatgtaattgtgacaaaatcaaaactatggagacactaaacccaacagaaaagaagcaaatctacctctcagaatctggctagtaacaacctcttagaatccaagcttggttctggataaaacttgatgcttcttttgagaaacaagcaaaaactctccctctgttcatctgactataccaaaaaccgaactcaagaatcagcagcaacgttagcttcagactcttctttccttttcaaatattcattcaagattgtaagcctagcagtctcaaaggcaaaataaccgatcgcagagaaacaagcgctgtgaacaactcgaggtcccatgccgcgggtaaaaccaacccaaccttcctctgtcaatatctgcttcactgtcccagcaacaccagtatacatagcaccaccgagtttatccacagcctccacatgaatctgtgtcatcagcctagtcttcacaacatctaacggcgtagttatcgaagccgatatcgcaccagccaacgcaccgcaacaaacactctgcaaaggctcaagatggctctgcttcgttttctccaaaaccgcggctttcagatactcaaacgacgaataactgagtacaccagcgggtaaattcctcaacaatgtagccgaataaccggcgtaaagccccaagattccatctttctcaagtatcttaagtaaaacttgataagatctcccactagctccagcttgcattctctgtgtaatgagctctttaggaaccattatagctgaagagattatgtttcccatagcaccagcagtaggcgggattaaaaccgtcggaaaatcagggaacttagagagcagagacttaccaaactcacaagtaccgaaatacacggcggaggaaaacgtagagccaacaatcacggcggagacaccactatagaaacctaatatacctttagcttgaaaggttttcactatagcatcaaatgtgttactataaacctgagaagcgcctttggtttgaagcttggttttgattgcgtcaagtgggagaagagtaacgtatgtgaaagctccggcgagtccaccggctcctgcaccgatgatggcacgttcccagacggagagttgtttgatgagtgtttgaattcttggactgcttcgtgatgcgggtttgatccatttcaggaattcgggtccgggtttttcgtgggttggatccgagattgatgttgatgcaaatggtgggtcggatcttctgaaatttgctgaaaattttgggggtttttgagaggatttggttttgagtttagggtttctgacgatagggctttggacggaggtgagatcggagaaatgagtgaagagagaattgaactcgttgggaaaatggcagtgattaagatttggagatgggaggccaagagtttcggagagtctagcttccatggttgatttgggtggaagcttgaggaaggagaaccaaacataaagatgatgacagactgatacttaaaaaaaaagaacatggcgcagtgtagtaaggaaaatactaaacggcatgaagttgaagacggagaacaaaactcgttattcgcagtgtagtaagtaaaaagctaaacggcatgaagttgatgacagagaaccatgcaattgcaagccctgggtcttcggtttataatctcggtttgattcggttatggttaaccgaagtgaatataaaacttgccgtttagctttttacttttgaccgctcggttatttattgcctgggactttgaaccgcagtgttcggttcaggtcggggtagtcggttcttcgggtaattttgattaaggggaaaggttaccgaatataccaaaccaataatttggttcggttcggttcagagatcgatcgtagaggaaatgatgatactcagagaaacagaagctgaccgcagtgtagtaaagaaaaaaaaactaaacggcatgaagttggctaaccattttcatattaaaatagttatcatcagatttaaatcaattagtttaaacaatcatgaaattcatgacaaactatttgcaaataaggcgagagattcgctatatacagtgcaatgccggagaatgaagctctacattcatcaaaataaggctaactgcttcctatgctttttgctttcgtcgttgttttcggttcatgtctagaattgtgattgagatataggtgatgttgccacacttgatctatcggtaccgcgaatgttgtacttctcgtatactctttcgcgattctctgaccaccatgtttctgcttgttgctccctgaatcgtcgccggctacaaaaacaaccaaacgtttgtattagtttacatgtctagaatgtaaaaggataagaagtagatagattcgataatgttacctaaagcgcacacgtttgagatctctagttccatcgcctagagccaaaagtgttatataaacaccaggttcatattgttcaatccactctgcctccacttgagaagcatttgaagctgatgctgctgagcttcttgagtttcgtccatcttctgagaaaccattactgattcggaccccctcacttagaagttcgcccatgcttgcatctgtgtttcttggcgactgcgaattccgccaaagtccattcattgaacgagcgggcatagccaaaggagaagcaagtgaggtgtcgctcattgaatcagatcttgattgacgttgtccatttgcattcgtaaagtgaaatccattttgctcaaacccgttcaataaattagctgtccgtgtggtctcagcttcgtaagcacccggtggtagcagcgcagctatatccttgacctggaaagaccaaatagaaatatttagggaagaaacaagaaaacttagagggaatcatatttcaagaatggatagatcacacagagacttgtctcaacacttcaacaggcagtataggagaaatatataagagaatcaaagccaaacctgtgctgttagagattttataacttcttttgcggcttctgatttggcagattcctctgctgccaggctcattgcttcttgtacttttttcacagatttctggacttcgaattcttggacctcgcatcggtgcctcagactctcggcctgtacacaatatcacagattcattttagaaaacaaaccacgaaaatgtgtggaaacaaattcagatgaatggaaacgttagagtaaccgccgagtttacctgagcgcgcaatctgactacttcctgattcagaagctcatttgtcttcttcaaactctcagctatacttgttgaaaaaccaagaccaacgtttaaaggaatgggagtgactgaacgaggaggactagatctccttgagaaaggtgacacaggtctggagctagacggagttactgctggttttggtggcccacggcgtaagtcagccacattagtcaaagcatctttaagttgtgttagaggtgtttgggaagtgcggacaagagagaatgtgtctgccttctttccttgtctagctgccctgttatccaactgcttgatcaaatctatatttgacggtattcctgatttagccaatcttatctcagttttatccaatctgtccttgttctcaccggaaagtcgtggcataacattcttcctgctatcaatattagcttctgacactttacttagtttagagtgacatgaatcgcagacacggtaaggcttgcctggattaggggccaaagcagctttcagtgatttctttgaactgcatgaatggcagtggacaagtccacagttgtaacaattgtgtctttttcgtgtgaatccgaaagcctgtctacaagctgaacattgagattgctccgtaccagaaacccatttatgaagacatattgctgctgtgaagtttgaaccgcatgcaatattttttacatgtctctctttcaaagcatcaacaagagttggtgccttacggtcctcaacatctccatgacctaatctcccattggcacccttgccccatgtaaacacttcatttcgagatgttaaaactgctacatgataagctccacatgctatttcttcaacacaatcctttgttagtttatcctctactaagcaaggaagtttcccatcagcattgggattccctagttgaccatatactgtactacccattgtgtaaacttttcccgatgttgtcaaaccaactgttaaactatgtccacatgcaactctgtgaaaagtatggtcaattagagctgatacacatgttggtttaagccgaggctctttatctccatgaccaagacggctcttgtcaccatcaccccatgtgaacagctttcctgatgaaacacttgaacttgagtgagtgacaatgacttctactattgcagcagcatgccatacaccgcatgcaacagcaatggtcctcaaaccagataaagattcaacttctctcgggtaaaatacagtttccttgtcaccatgccctaaaacaccaaacgtcccatctccaaaagtaaaaagctgtccagttgacgttatcaaagcggtgtgccatggtccacaggatacggaagcaatttgaagaccttcaaggggacctgatattctcttaggtatccagtgacttacatcggtaccatggccgagaagtcctgcattgtgtgttccatcaccccatgtgtaaatctctcctgtcattgtgacagcgcatgtatggaactcaccacaggcaacaaaatcaatactagtagcagctagagactcaataagctgtggtccagtaacatcttttcccattccatggccaagacgtcctccggatgcttcaccccatgtaaaaacctcaccttgcctagagactagagcagcatgcttaacaccacatgctatgtgatggacatccaaaactacattggactccaatggctttggaatcagaacatcagaccttgaaccaagataaccaatattcttatcagctccgaatttggtaacattctcacatagcacttcaccccatatataaacatcacctagagcatcacaatcatctggagcagaaccatgacttgagctgctttgaacactagagacactaacccggaacgcgtctgatccagttcctcgtactaacatatttgggctatctgatgccacatgtgacctttcagaactgacagaattctcagttctagaagtcctgggaaaattggttgaattgtagggactatcagcaatgttaaaatctcgagaagcacaaactgagctgttggtaggactgcttaatgtcaagtctctactgtcctggaaatgatgaaattgaaacaaaaacaaagttcagaaatacatttgcaaacatctatagtctttaggaatacttattacttacagcaatagaaaggcctccatcactccagccgtcaattttagagcggccagcctgaccagatatcaaagcttttaggccagctatccacacctctgcctcaactttgtccttgcaaatctgcaaacaaggcaaccttttcacttcacatatacagaggcatcatataaacggtgaagagaaagtaactgagtttcattcactaaccaagtcaagagtccgcttcctgttagagtatataagggaaaaagataaataatccttatccgggcgaaggtaacgttggaaaacagcctgatagtataaacatgattaaagtcatcatatgttactaacaaaagactagcaatattgcagtcgttgtatgctgctacatcaaaacagaaagctgaattttaagagaaattacagttctttgtcctggaacaatcttagatacagttgctaacttcaatcgtttttctccaccatttgaaatccagatcaaagatgtctcatcctgcaaataacatgtcccaagatggtaagattaaaaggctgatatgtgaccaaacacaaggatacaaaaaagtcgaggacattatctgccttatagcaccacttggatcagtgaatcataaaaataaacaaagaacctcttgggtagattccaaaacaaaatgcagttacataaattgcaagttttgaaagcaataagctatgaaatcaggtatctgcagactacatgtacatcaccaatctaaagtacactcacattggaaagtctaaagggacagaactttggctttcctttccgaccatatttcaagagttgagcacctttcttcaaagcaattaaagcctgcaaaacatagagcagggctcttgtgaacatcttggtaaagagaaaaacaagtccgtaactagaaaatcaaaattacaaagacaacaaaagaccaaatttttcttctgaccaaactatgtgaatgacatataatttccattcaccatgacatttaattacaaaattctaatcactttagaagacataaccctaaccaattcaaaaaagcaaaatttcagacaaaatgtattaagcctaagatcaacaaatcaaagattctctgtttcatcaaaacagaacagagacatacatataaaaaacacagaggaaagaagaagagatttggacctgctcgatgtctcggacgacattaccataactcacaagatctgccattccatgagagaggtttaccaaaatacccaaaccctctccgatcgtacggtggagcagcaccggtcatcctaagcaaacaagactacgtgaagtctccgccgttctaaccatcaaattccgtgctaactccaaaaaaaccacaattttattttaacaaaaaggtgaaatttgaaaccctagcttcagagttgtgaagtttccgatgaattgggtatgctcggaaaccaaagaaaaaaagcttatcacttgtttcaggtggtaacggctctggtgtgcttgcaaattgcggtttgttttgctaatcttgagaaattttcgccggaggattaaagaagatgaaatggtcggagagagaccggagatggcgggaggaagagcacgagaatgaaatcactgtctgtctcaaccggcaaacgaaactagtctttgccgtggaattccaagtacggaaagagtcaatgttgaaaagtaatataatacagaaaactatatatattcattcattaatttggtaatatacatattttttttactttccagcttatatttcttaccttaaaacaaaagaaaattacataattagtaattcaaaaaccactaatccaatggcacattggtaattattaattgaatcattgtattctttcaaccatttctacttcgtctaatcgacttatattaattggaaatttcaacttcaaccgtagcggtaaaaagctacttgtcgaaccttgagattagaggaagtcacgaagtggtgactttagaagaaatgattaaagaactataaaaatggaacacacgacgatgagcttggaaatgaagtactaagtctcatgattgttttatctaaaaaaatttaggaggttagtagtctgtttctttttcgttcgtgctaaagtctcctccatatctcattttatataagaacgtgagttaatttacaatatacacacgcccaatgaactggattagttgttgggttaagttttaatacaatcatcacatacaaaaaatcatcaaaaactgtgatctcttacggagaggctaacttttacagttttatgacttttatcagattataaaatttagtgttatggcccaagcccataataactaaacaatgcacatatgtagtttagaagatatcacatattttattcaccgcttcaatttcattttatgaatatggagtttagattctcggttgtcaaaaaattcaacatggtttctacttttatgaaatttgttagaaaccatgtttttacgacggaaacttctatattcgtgaaattgaaatggtgaacaaatatgtgatagattgtggaagctacccgtgtgtgtcgtttggttgttatggtcttgacgcataatactaaattttataatccaataaaaatctctgctctctctctctctctctctcgtgatgcccatttgtttatcttttcaaaagcaggatggaaaggtcgaaacaattcggtggtttactttcaaaaggaattaattcctttcagttgtctttcaaatctcaaatataaaaaggtatacttaagaattattattcaactattcattagataaatttttaaattttactaaccaaatatcatcgcagttagctgaaagtcataaccttctatggaatcattttcttaaataatgataaattcagaaaaggaggagaaatgaaataaaaaggaccatggaataaagaataaaaaaagattggtctaaagagtgttcgagaactactcttttctagagaacatatgcggttatgcacatcattgatcggactttacattacttgtatatattcactactttctcattaatatattatatatatatatataatatgtatatatactaaatgaaaagtttttggaagtgttttgatctttgttgtattacttttaaaaataattgttttaattggtaattcataagaatgtaattaaaagtagaaattctttctaattaatatcataactaaaagttaataattaatgagaagtaaacataaaacatctaatgattttgaaaaattaaaaaattctattaaaaagttgtgatgaaagatattatgttaatacgtgccgtgccaagattttaattaactttatagatgttgtaattcagtaattaactttgaagatatataaacgcatatgtgataagtgcttgtcgatagtggctcgtgggtagcctttaagcatgggccagtgtgcttgtgcctacgagctcgagtgatcgagcacacacattccaaactaaacacaaaacacaaaggaaaaaaagtaaataataaaggcatatatatatgctccattagaaagcaatatatatagaaggcagatagagtttgaaccaaagaaaaaaagagagagagagagagagagagacaacgaggaagatggggtggtttattaaggaaagaagaggaggttcatggaagcgaggatggttagaggaaacactcctaacatcatcagctcctcctcttacactactagctctccttgccatcatatctttactactcttcctctcttcatatccgcgttacaagtacgaggttgagaaaaccgctgctaatctcaagctcttcatgctattcctcccaattctctttgtattcgtcctcgtctctctaagcttcgtccatcgacttctcttcaaatcctcttactccgttagagcaaaccaggctaagtccctttttggagaaggaaactttccgtggggagttttgcttatgctaattcttctacttcttttggtttctaaacaatcttactttcactccttatggtaccccaatttatgagttatgatcttccaatcattcatatatagtcttcaaatgtaatatttagattgatcattgcttcttgtaatccataattccacacatgttaaaagacattttgagaataatgataaaaatttatgtaatatataaatctcgcatatttgttaagaccaaaagtctaaacatacatagctaatttgcgacaaatttacaaatttatatataacacaatttttgttttgtcccaaaattgagagaaagttatgggaacacatatactgtaaacaaatcagtagtggtcagttaatctatataaattcacttaacacacctccattaatctatatatataaatttgtatttcttgaaatttgttttttttaattggtgtgagatatgtatataatatgatattcgcaattgggaggatggattatgcaagatagtaaaggcacaactcaaggctgaagttcgactaaactacgatcttggtatactccgatggaagcagaagatgcagcgttgttgttttcaatgcaaaaaacatggcctaaagggtttatacacgtttgttttaaaggcgattgcaaggtgctaatcaacatcatgaacggatctaccaacaacgacattgctatagaaggcttgtgtaaattaagatatccattattgggcatcgaagttcagagaattaaatttctcctttactagtcattcttctaatcatataagcccatatattagctaagcaaggttgcatagatttcagcttttactcatatagcccatactatactctcactcgaaaaaatatacaacagtaatgacaaaatctgtaaatattttagaaaagaataaaaatggtgtacttatttaaatggggtaagaatctctgtaagtgtgacacattaccatgcaattttgctaataacatatgataataatgttattaagaatatttcaataataataataataagggatatgaatgagaatttgtttggtaaaactgtttgagttattcttccatcaatttttttaactattgaaaatatttaaataactcatgaaaaaattagaagaatattatggaaatcttcatgttaaaattatataaactaacatgttataaactattctataattttaaaaatcgtaaagatttccaaatttcataagtttgaaatcaatttaatgcataaaccataaaagcccctaaatattttattaaaatgtatttttatacaagagataatttcaaagtcaaaataatttttttttttaaagtattttcgcaaacagccttacgaataatctaaaaggctctggaagtaaatcgtggacacagcttaaaccctaagaaccctttcgttgaataaacaaaaaatcaaacgccttcaaaaatcaaaatctcgatccagatctcatcttccgccacaagctatgaggagagtcaccggacttgccgcgcgcacaatctcatcctccgtcgccatcaattcacgtctcactcaatccatggcgattacaaccatttcatcctccgaacctatctcccgaagattcggtggtcttccagagattaaaactccgtctttcgccggcggagtcgctggggttgtgttcttctctgccgctgctgtatcgtctcttggtcaagaagttcacgctaaggaaatggctcagaagtttaatcctaaagaagttgttctgtatcagtacgaagcttgccctttctgtaacaaggttaaaggtaatcttatcacactaatctaaaaattgctggatctgatcagaatttgatcttctactcatcgattcttgctttagacttaggttgaattcagtaggattgacttgaatgtgatggatttgaatggagaatggttctcattgtctatgattcagtaagagattggtgattgaatgaggtatctattgttgctggtatgatatttgggcgattgtttattttgtttgtagcgtttttggattacaacaagattccatacaaggttgttgaagtgaatcctatcagtaagaaagaaatcaaatggtctgattataagaaggtgcctattcttactgtagatggtgaacaaatggttgattcttcaggtttgtctcatgttctgtttctgacttgtatttttctcttcagatcaaaaatgtgtattagcttagttgagtaatcttttgttttatggtgcagtgataatcgatagcttattccaaaagatgcaccctgaaatttccaagtccgaagatgatgaagagactaaatggcgcaagtacgattgattttaatttattgactactgatattgagttcgagatttgtgtcactacaggaccttaggctgataatgtatctatgtgttgtaggtgggtggacaaccaccttgtgcatcttttgtcaccaaacatatacaggaatacttcagaggctcttgagtcctttgaatatatcaccacacatggtatggttatcgtcgatttagcttcttacttttttccctttctttatactcattttgtttttataacctttggaagatatgtatgggttaacattttaactagatgagttcatgggagtcccagttttgggaacctttatacgtcattacacatctagagaaagcttctggaggaggatagtcttcttgtctaagtcatagtgttgtgctctgtgcagggaatttcagtttcactgaaagattagtggcaaagtatgcaggagcaacggcaatgtactttgtatcaaagaaattgaagaagaaatataacattacagatgaacgtgcggctctttacgatgctgcagagacatgggtcgatgccttgaaagagcgtccataccttggtatgtccaacttctaatctaatactgaatctagtccctgctttctggattggtccatgattgtagtttctaatatcaggtgggtcaaaaccaaacttgggcgatctcgctgtattcggtgttctgaggccaataaggtaccttcgatcgggtaaggatatggtggacaacacacgcataggtgaatggtattctcgaatggagaacacggtcggagaaccttctaggatcaaagaataaaggatcattggtcgtatctcttagtggaaatatgaattgcataatgaatcgctgatttcacgggcgtaacaatattttaagctttaggactagagaaggaaacaaagaaactaaaggaaataaacgtctcttctttgtgaatgaaggattttgaatactgtgagtctgtgacatgcttggtttggtcactgttgctattactaaaaagtcgtttctttggtttctttcacattttaaaagattcattgatcagcttgttctctgttttctattgactgatgtttatatgaaaggacaacaactcaggtggtccgattggtaatcgtatggtcgaacaatgataatatattggtggaatgaataaagttttgcaattcttttcttagaaaaatgagtttgaatggtttatatacatatgtatgacccaatgatagttgtaacgtggattttctttgtggaaagatattatctacatatgtatgatagcaacaattttggcgtctctaattttgaaccaacctatgagaaaattttatagattagtacatcatcgttatgaaattgaatgtcaaacacaagcattaggccaaataatcggcacaattagacggacaggcatgcaattagtgaacatgtggtagtgccaaaactttggcattctattttcgaaaaatctcctcactatataaacatgtttcatcattcaatctcctttgatttttgctcacaataaaataaaataaaaagaaaaaaaaacaaaaaaaaaacaaaaaaagaaaaagaaaaaagaatctataaatatactgttcaattttttttattttttttttattaatatcccaacggtcgtggggaagaaaatattctgattttgtaatgtcacgtttggtgtatgtaatatttttgcttgtagtggtagaaggtagcaggaacactttagaacgaaatactgaaaccaacgcaacagaagccaaagtagaaggtatatatgtacaaatgttatgaatatagcttacaccgtttcattcatgttttcagttaaaaattaatagaatttatttcatcaaaaataacctaaatctactcatgtctattcatttgagcatattaatttttttgttttttgacgaaaaaatagataaattctttgtttttaatcatataaaaaagatcggcatgtgttattcatatatttttttaatgtagtttttgatttgttggaaactagtaattattcagtggaaaactcattttcatattattttttttactttataatatttcaatttatataatgccagctctaattaagttattattttaaaatattgttgtcatttaaacaatttaatatattataactgtttatgaaaaggtaaaggtacaataaaactaccgccgaatgttaccattcctggtatcataacatttggagattcaatagttgacagtggaaacaataaccaccttcgtacagcattaaaatgtaactttcctccttacggtaaagattttcctggcaaaattgctactggaagattttctgatggaagggttccatctgatattgtcggtaagtataatctcatctcatcattttttaaatcaactatctttaagagttagataacaaatgttgaagttattatttaaaaactaacaacaattagccagttaaaaattggtcaaaatgtaaattttccttttaatattttgttcatttctattctcgtaaatggatataccaataatgtcaaattccaagataatagattcacgtttatgtaacataaatagatatccatttgataaattaataatctacaaaaaaaatttagcatattatgagaaaatatcacatatcctgcaattaatactttaaggatattagaattcatctgataaatgtgatgtttatgttggaaagtaacaaattatagagaaaaattgctcaaactgtaatagttaaaataaaaatggataaaaccgtcttaattattctcttatgtttgcatggatctctatttcttatggctttgtctcgttatcgactatgtcaagtgatggtcattgcatttgtgttacatgtcgagacaacttatggtttttgtttaataatatatatggcagctgaaagactaggaatagcagaaacaataccagcatatttaaatccaaagctcaaaaatgaagatcttctcaagggtgtgaattttgcttcaggtggttctggttacgatccgttaacagcaaaactagtggtatttttaatatcgtttaaactttcttaataaattggagttttgattcttattttttagtcatctttttattgatatgtttttttttgttctgcgatgctccagaaagtggtatcgttatcagatcaactaaaaaatttccaagaatataaaaataaattaaaggtgattgttggcgaagagaaagctaatttcttggtgaaaaatagtctttatcttgtggtagccagcagtaatgatattgctcatacctatacggcacgctccatcaaatataacaaaacttcatatgctgattatttggctgattctgcttctaaatttgtcagtgtaagtacaaaatttgattatgttatatacctcatttatcttgcattttcaagttttttgatttttgattttatttataaaagtacaaatttgttgttctcagtcaatttaaccataaaaatgatatattgatcattcatagcaataacagcatttcaatcaaatttggattcattgtaatgtttacatcatataggcattgtatggacttggagctcgaagaatcggagtatttagtgcagtaccggttggatgtgtaccagcagctagaacacttcgtggaaaattgaagcgaagatgctcagaaaaacttaacgaagtggctcgcaactttaacgcgaagatatctccaacattggaagctttaggaaaagagttgccagatagcagagttgtgttaattgacgtgtgtgacactcttaatgacatgatagaaaaccctaaaaactacggtaagtatgaatacacatccctttttctcataataatttcatcaagttataaccgtaaagtaaaatagttgatcatttatgttgtgatacgcaagtacaaatgataattagtattttgaggattttgttttggtcccacatcagttaaatttaataagagactttgcaaattattatatgtgagacgtcacaaattattatatgtatataataaagtgtttagatggaaattttcaaaccaatgggaactacaaacaaattaacttacctcgtacaatagcacgggtcatcacttagttatagagaataagaacgaaagtcataataaccataatactaatataacttaatgcatatttataaaatatattatacacttagaattgatctaaatatgcatggatatttagtcattcaagatattgttttatggatccatgaatttaaatgttggatctagactcgcatacctccaatatcttggccatcgataattagtaccaaaaactaactttattacctactagttactatctttaacttctttcttttttattataggatttgaagtatcaaacagaggatgctgtggaaccggattagtcgaagtactatttttatgcaacaaaatcaatccttttacatgcaaaaattcatcttcgtatattttttgggatagttaccatccaacagaaaaagcttaccaaataatagttgataagttgttaggaaattacattacgaaactagtctaattctatatttttataatatactaagtaatattttttcctatgtaaaaacgtaaaaaaaaaaaatattttttcaataataagaaatagtatttaaatgttcatttagattaaatagattcaatatagtttgttaaaaatgatttatcaattaaaaaaacaggttatattggattagactagtttcgtaatggctaaaaaaaagaataaaacatacgtacgagaacaagacgaagaaatagaaggcatccactacacaattgtacatgtcgacaacaaagtcaacgacataccgtttgagacaccgtggctttcgcttttctctcaaaaaaaaaaaatcaatcatgtttttttggtttttatgtttcgacagtatttggtaggttgttttaatattattaaaaacatacttattatttgtgtgaatatgtttaaaagcaaacttggttgtttggaattgtaatatcaaatgtcaagatccatcaactttcataaaaattcgttaatttgtacgtgaacaattaataaatctctcataccacacatattattgctctagtcaatttgtttcctttgttttcagtcattttcaggaatcaaatattagcaatgctttaactctactccactgcaaccaaattggttgtttagagttatcaaatgacaaaactcgttaaaaactcgttaatatctattaaccaataaatctctagtgaacttttttcctttgttttgttctgtcattttcaggaatctaaattattaagtcttcaactctactccaccacaaccaaaattaaacgagtcttgtctacatgacctaatttgcttaacaaccttatcatctcactaacaactccatctcccaaaatttaaactcctttaactatgcctataaaaccttgatccattcttcatcacataagcaacccaacaaattcattctaaatacatttcttttcactcaagaaattaaaatttcgaaaagtttgttaaaatgaatgcacacatgctcaatctccttgtcatagtcatttttgtagtttctttcgatgtccaagcactcagtcctcactactacgaccatacttgtccacaagccgaccacattgtaaccaatgcagtcaagaaagccatgtcaaacgaccaaactgtccctgctgcgcttttgaggatgcatttccacgactgtttcgtcagagtaacaacttcttacacacaacattgttgtcatctttcggtctttttatgtctttatactctaaataatgttgttggtgatacttttgatcattaaagggatgtgatggctcagttctcttagactctaaggggaagaacaaagcagagaaagatggacctcctaacatctcactccatgcattttatgtgattgacaatgcaaagaaggcattagaagaacaatgtcccggtatcgtctcttgcgccgacattctttcacttgcggcaagagatgctgtcgctctcgtaagtctctctccatctcaaattccaagtactacttttatttgatgattctaatgatccacctaaaatattatttgtggatgttactatagtcaggagggcctacatgggcagtgccaaaagggagaaaagatggaagaatatcaaaggcaatagaaacaagacaactaccagctcctactttcaacatttctcaattgcgtcaaaattttggccaaagaggcctctctatgcatgatcttgttgctctctctggtattaaacattctcgcactcacttaaaatatatttacaaagatttctaaaatctttttcttaaactatgctaaaagatgcaacataaatctaaattttaaaaataattggcaaaagacaaatatagttccaatgcttataatggtttaaattccgaatgttgaatgaaatggcaggaggtcatacactaggattcgcccactgttcatcgttccagaataggctccataaattcaacacacaaaaggaggttgacccaacactaaacccctcattcgcagccaggttggagggagtgtgcccggcccataacacggtgaagaatgctggatcgaacatggatggaaccgtgacgtcattcgacaatatctactacaagatgcttatccaaggcaagtcactattctcatccgacgaatcgcttcttgcagtaccctctactaagaaactcgtggccaaatatgcaaattccaacgaagagttcgagagggcttttgtgaaatcgatgatcaagatgagtagtatcagtgggaatggcaatgaggtcagacttaactgcagaagggttcgctagaatctcaatctacgcttccaacatcacgttactactacatttttatgtctttcgttttctttcgtcacattgattacttgtgaatgggcctttctaaagattaaggcagaggttcttgtatcagaattatctatcaatctctcgtgtgtgcttgtataggcatttatttacaagtaataagatcttttctctttctaagaacatgcagacaaatcttatcacttgtgttcacaacctatctaaatgattgacgaaacaatagaagaccaacactctcttttgagcaacaacttcaatatgtttcgtagttaagtctttaatttgacatacataacataacattaacatccgacccactgtcttagctggaccatcacgtagaagagaatggatatatagtcaaagaaagaagataagacagggagacacaaatgggtcgaggacatgacagcaacctaggtcttcatttttcttcattcaaacgcccactgattctcacggcgaacctcttcttcttcctctggcgtgaagtcgttcttgatattgaacgtcttacggatttcttctggggtttttcctttaatcatatcagccactgtctggcaagtcaagtccaacagtcccttgatattcaagtagttagcagcctaaaaggtgtcacagggaaaccaacttagattcaagctcttcaactttcagataaaaatggaactttattgttcaagcaaatcaaacatattgaactacgattccaaagaaaataaactttatcactcgtttcagacagaacaaaacatgtcatgttagcatccaaaaggtttctcagaaaaacaaatctagattcaagcaaatcccaaagaaattaaacattatccaatgtttaagacagaacataaaaaacatgagtttggatgtaaagtggtcttcagctataaacaaatccaacaaactcaaaagaaatctcttgacacttttttctctatcagaccatatatttcaatcagacatgatcatagtttaaactgtgaaattggcaatctaaacaaaacctgaaccctaaaattagatctcaaacagaaatcaagatctcaaaccctagaaatgaaatcgcaaactttgaaaaccaaagcaattaaaaataagtttgacaaaccaggataagatcgaagagagtgccctgatcaactttgataaactcagaatcccaagtcttgagatcttcatcactagaacccgacgcgacggtggtggtagtagtagcagcagcagcatcggccgtggtttcggatttctcagcagcttcgacatgtctcttacagtactcaatcaccttcgaaaggatcttgcttgtgacattagggagagggataccattatcggtacagtcatcttcaatcatatgtttgatggtttgtgactctagcgccaccgcttcgtcaatttcgaagttttcgccatccgaactcttaagagtgatttttctcaccgtcgacattggtttttgctgagtttagagacgacgtggaggctgaggaagagaatcgtggaacagagagatgtgtgtatgggttaaatcaaaatgtttttaaagcccggctcacacattgaaccagtgagatctaacgattcccaattgactttttttacctataaattttcattttaaaacattttctctgtttttttctttcaaaggaaaacacctgaaaattaattcaactcttttcatcaacttttgattaatcagtagttgaacagatactaaactcctctatttgtaggatggtgtgtataatttaattggattcatgtgatttgatttccggtaatatttttctttgaacatctttgcaaataaagagttaagaatcataatcaattgcggcagttgttttgctaattaagttgtattaaaatcatccacattctagaaaccaagtccaccgttacgacaaaacttatttattttttattttatttttcttatttttttttaattttaaatttccattaaaacaaacaacaagttataagacaagtgtccaaacataagcacacaggctcgaaaacatacacatccaaaagctcaaatccaaggcgcgcaggcccgacaacaagagcaaagcccaaaacaaccaaagaagctgaaacttaaaaatagcaggcccaaaaaccaaaagaacgaagagggaacgacccaaggactcaaaaaactcataaggaaacctgaaccgcagaggaggacctaactgaagagacggaaccaagtagcaagcagagaggcacccggaggaggagagggagagcagagaggcactatgacaaaatttatctcatgccttccactgtaaacgttttgttcgtccattggaactctaccaaaatttcgttactacattcctaagttttgatgttactgattttggtaatctaaaacaagacaatacataagtaagcaatgcatctggtactgatttaatcaatacttctttgccatctttagataagaattttgtaaaccaaccatttattctattatgtaaatattttctaaaagagtaaattttttttgtcttagatcctcctaaacttttcgataatctcaagtagttgttcatgtcccctatattagtgatttcgaagattgccataagtttgtccatcatcgagttgtcaactcatgaccaaaaacctcttcatagttctttagtattccaaatccaatgacgcattgttttttttgtcgttttacaaaaaagaagctatcatccacgaacataagtgaaatattgagggattcgcttgtaaaaatttcatccccgctaaaatcttatcttattaaataaagtgagaaaaatctaacttgcgttatctaaattttcaccaaagcataatcggccattatcctagtaaaaaatatgggccaataaaaaatatatttagattcacccctttattcacctttttattccattaaattagaatttatacctaataaataaattaaatttattttattataaaatctaatttgccacaagaacaaaattttatatagttttgggtttataagaaaggattgaagtttagattttactattaaatatcgatttgagttataaacagttttagattttataactaaacgagattgaacgtctgtttggttttataaatggatttagattttataattaaacaatgttaaatatcggtttgggtttagaaagaacggttagagatttagagtttgcaattaaaagagtttaaatatcgaattgggtgtacaaagaagaactagggttagattttataattaaacgagattacattttggtttgaattttttaaaaagtggttagaatttaatttttttttactttttatttagaatttagattttttatttataattaaataagtttttttaactttttattaggtagtatattctgattggctgaaataaaaaaattaggatttagattttataattagactaaattatatatgagtttgagtttataaaaaaatgattatgatttaaattttataattaaatgagtttaaatttcttttattaaataacgaattcagattggttaaaaacttaagataagaggaaataaataaaaagatttacctaataagtgaacccaaatattgttcactagaccgtaaacatggattttctcagctatgctgaaggagtcaagacaagaccaggtctgaataactgaatacatggtcaattttatagcagtcaattttttttctcgaaaaaatcagttgttgcaattttttagtaccgtcgattattttatacataatcagctctagagattttatgcattgatgcttctgtaattatactttttaatttaatttctgttgtatattttgaatgtagaaaagattctagaaacgaaaataaaaacattttagtaataaattaatgtaaataatataaaaaatacataatgtaaattaatattgttctttatattaatgtaaattaatgtaaaccagtctagtaaatatagcgcctatttaattgaaatttatttgttagaaaataaataactactttaacgcattatcttcaagtgctatcttctttaactttttagtggattggacttctccgtcgcctctaattcctagaacatgattgctattattttatacagctctcaaactaaagtactttttgtaagcatagaagaagaaaatacttttagtctcaaagtaaggtaaagagaaattttgaaattccatttcaccggtcacagaaaagcaaataaatcaacgaccctagctttgaaattccattttaccggcccaaaacacaaatggccatacaaccgcaaacattgtataatacgatagctcatgatttcttcattaataattaaaagaaacagaatttataattttgttggaaaaaagttaagcaggttaaattaataattagcattgctttttcagaacttaaatgtcgagaaaagtgttgtgccatgttgttctatattctgttggctaatttattttcttccaaaatgaaagagcttcaatagtagtattatagagcttttatgttgctctattttctgaggttcttaatgatattttttctgctttgtattcttctgtatggactaattaagattctgagtagtagtctaagtaaaaacatattttcatataaaggttgtatgaaactggtgtagaaatgtgtttcgtgtgaatccaacgtacgtaatatgaacaaacacgtgacagataggaaaacattaaaagggtgttttaccaagacattatgacgttcaagtaattaaataacgaaaccacaagaattgattgaacaccataaaaaaatgtgggttttataaaatcctagttttgttttacataacgtcacatgcactaggacaccacctatcatgtacattgtatggctctcatcatactagtcagacatataagtacatctttaagtacaagagtttgccctgattaactcaacacctatatcgctgtctatttaactggtaaattttgcttggactaggcttaataccatttacaattacagattcaaaaaaagaaaaaaataaataaattcatataaaaattagtcgaaacaaaaaccaaatgatgttaacaaaaacgaaatgaacactattgttaacagaatccggcatactcagcttcataaacaaagctttaatcttctttaactttgaaaccaaaaattatattaccattaaaaatgtatatccgactgtactgatcaccaccacttttatcatcaacaaatctctcatcttttacttctcgaaaataatggtgagctttattatattctatttcagattcctaaaagtccgcttaaaacctttaatattgttagactcttgtttcatattaattataggatgttttagttaaaaatacatattttaagattttattttctaactatcattgactccatagaaatttagggagtaaaatttagttttaaaatttttaaccaatgataataaaatattaaatgcattgaaaagttgcatagaaatttgtaaaacatcttttattttgaaaccaaaaaaacaattccccaaaaaatcctatattctaaaacagagggagtattttccaaaaaatgtttgtcaaagatgttattttctaaactgcttattgtaactagctaataacttcccctctacaatctgtctccgatcttaagcatgccatcacagacatatggtggccaataacataagcatacaaaaccttatcctatatgctatctcgtgctcgatcacataattcatgatcttttgattgacaaaacaaaagagtattatccagttctactttctccatgtgaaacctcttgaaaacatttttcacacactcttttaatgatagggttgagattttctttcgttatgttaattctcattccaaaaatttagttcgatcaaattactaattattttatatattggtatataggaatgaaataataattattaaatttttttgttgtaataatataagtttataaataaaaaatctaaatttggatatatatatatatatatatatatatatatgtgtgtgttagtggaagccatatatcaaatcgttttcattgccatttaaaattgacgttttataataattcaatggggcaaaagaacctggtgtatataaaacaagcaaacccataataataaagaaaagctgattgtacgaaaagaaacaaaatcataacaataatagtttaacctaaaccctgatatttggctctaccgtgtcctagcctctcctctttgtataaatagccgttactctttttcacatgattttcactaccaacaacacttagagaacaagcagaggaatataactttttttttctttttcctttttgcttttttacaaccaaaaaaataaagcaagccgtagagagcaagagacggtgtaaagatgcactacacacgcatctcgccggctttagtaccatctctatcaccaaccgccgcggctgaatctagcggtggtgggacgatgatagctactgttttcatggcccttctcctcccctgcgtcggcatgtgcatcgtcttcctaatctatctattcctcttgtggtgctccacacggcgtcgtatcgaacgccttcgatttgctgaaccggttaaaccggtcacaggtaaaggcctttcggtgttggagctcgagaaaatccctaaactcaccggaagagagctagccgtaatagctagatcaacggaatgtgctgtttgccttgaagatatagagagtggtcaatcgactcgtctagttcccggttgcaaccatgggtttcaccaattatgtgctgatacgtggctatctaaccacacggtttgtccagtttgccgcgccgagctggctccgaacctacctcaatgtaatgaaaatcaaagtccatgttagaaacagaattttcaaaaacattctttccttcttttttactcgttttgtgtacttctcttgtttttcccttttcttagttttgtgtaagcgttatagagagagaagtttccaggttgtaactagccttgttgtttttttttgtacatgaaattagttttagagtaaattacgaaatttacagttatgtcattgtatttacaacaatttttcttcaaccattacaataagtatatcaatgatagagttaaactttgggtccaacaaaaaataaataaatcagatcactataaaatgtgatgattactgtttttcccccacaacataatgagtactatgatgatatcaataaacaaaaataagtacataaagacatattttgtgtatttattatttatttaataatggaggtcaaaacattttgacgcatggcaatgtaaagatc

SEQ ID NO: 813 - DNA, 59762 bp, Arabidopsis thaliana
tggcagaatatggggatataattcttaagctgtaaatttttctgaattacaagaattatataaaaaaattcaccacacatgacgaggaaagtaaggtggtaattagtaaaatgtactttgttttattttttactccccgagggtttcaaatcaagtattaaattgctaattcttagagtgtttgaaactttgaacaaagatgtaaattattctctgcgtatatttcttgagttgattaatatggtaagaaaatgaactgtccagctgcatgcttttagtcacgcgtttctaaaaacaatctcgaatttactgaagaaaaagtgattggatgcatttacttcttcttttaagagaaaatgtcaccaccatccttttccaatcaccaatgatacgaaacccattcactgattcaatataatatcttctttggtggaaaattttgtttatatgattacatgtaaattacactatttttgggtcaaaaatataaatcactatttaattgagaaatatgtactagcgtttcaaaacctattttttagacaaatagttagcatagttttagtttttgaggttttttattttattttattttcctcaataatctataattttagtccgaatttgaacatacgtaaaaaataaaaaaaatccgaagtaatatacttttcaacaaacctgattttattttagttaacatgtgtaatatggccatcgggccacgtacaaatgtacttcattgtacaatattgtttcggaagaaaaaccaaaaaaacaaaaaaaaaaatctttcaaatagacagacataaatgaaaatatctgtggtaattaatgtgggttgtctgtaacgtaggtttttgggcaatatgtatctgtgggttcggaatttgttggcgtgaaggaagtggaaaatatctcaaatggtaaagaagtagggaaaaaccactttttgtggcttgacaaatcaggttccaaagttgggtttttatcgcttaaattaagaaattaatcaaatagagactaataaatctatttaaaaaaataaaattagacccatatgaaaacaaatatattacctgaataatgtaaacaaaaagagaatgtgtgattgggggtagggcaatcgccagctagcaagtgggatacatctgtctcttagattaacttcatttcagtgcctttatcagaaaagggaaaaataaaaacttaatttcagtgccaccaaaacatttgaataggttacgcatccttcattcatttctttatcataaagcctttatgtagtgctccgaaaattatcatcaatctccttttcgaccccttatttggtttgttctaatccatagacataaatttacaaaggataacatgtgagaatgacacattgtgagaggtgttagccattcttacgcatattagttttgagactttaaaatgtgtatatgcaagagatgagtctttaagaatcctatatgggtttaaagtttacatgcatcttctagttgtcaagatttgatagtggagagttaaaacacattaacacgacaatgataagattttaaatatgctaggatatgatagtgtttgaggctcttttctccacacaagaagtcatgggcgtagtttggtgatatacaagaaatgagatcttcctcgagaacaaatgactgttgaagtcagcccgcatggagcgtgttatggaagttattgtcactgggagctaaactttcttcatcatggcggggtaaatggtggatgacttgttcaaaaagaaacataagagaatgcttggggatccgcacaatatcgtattatgtttttaagaagaaagataattttgtttgtttgagctaagtgggattaatcgagagaatcactgtttttctattagctaggttggctggttatagaagacaagttatcatcgagcttacacttcagcttaatcactgcatgtacatggagcaacgaaagtatgattaaagagttttataatcttaaagtaccacaagtggtccaacctcgaagaaatatgaataacacatgaagtatgaaagaacatataagcaaagtgaaaaggtaaatttgggattttgcgattaaaatacttgaactggccaagtaagctaaaggctaactaaacaacaaggcaaacgaaccaactaaacaataaaaaaatgataaagataagcacaaaagattaatcaagatatatataacggagcatgggtaaggcaattgataaggattgattactagctagtcaatcccaaatgcttgaaccacacaattatcaaactcattcttaagattttataggatcataacatgaatcataatatttatatctgtactttgagtaattcatttgcatgcatagatattgggccttaatgggctataacatatatcaaacaagttggcccaaatgcaaattggctcacttaaaaagaagaattacgagctctatggtcagagtattaacaaaacccattctttaacatgttttttcttctttgtgtggcttttgttatttggttacgtcttgcatgagctccagttttcaagtatttgtgtatctccagttactaataattgcagggtgtttactggttgattattggtttttcagtattcatgtattttcgggatagatagctaatcatatattatatactccgatcaaattatgaatatcgaatttgtttataatattatcgataggattaaaatattaataaaggtaaaacagttttatgaatgtatatttttgttgcttagttactaattcgtttgtgtctctttttcctcatgcatggaagtttttggattagatatggaatatgaaatttttattgatggtggctcaaaattagcacttcaccaaagaactacgatttttcgcagttcctatttttccggtttatcatgctgttttttttatatatatccgtcgttttataacttttgttttccttattttatttatattatatcttatcggttgatccgatcagcttacaaagtagattacttttgatccaaatagaattgagcaaccacattgtttgatctgagtttggaatgtcttccgactaccaaataaattaattaggtcaaagtacaacttacagatttccaaaagtaattatgtttttgtttacaaagagaatcgaattcggatatgaaagtttcacctttcaccaaattttcctctaccaatagaccataaaagctttggccaaattattttgtaaccgagttcgaaaccttggattaatcaatgcccaaatatttgggttgtataccgttcttttaatattaatgcacctgttaaaatatataaaaaaattactatttttatctattaagagaatatatgacgattgtcaactcttataaaattttggtagagaatattttgaggattgtcacaacttttaatactttagttgatacataatttagatttttaataaggttatcaacgtcatcaaaaaacaaaagaccaagctcccgtaaaatcgttattctatatcaatctcaaacataaagaccaaacaaaagaccaacctctacactattaatcaatttgttagttattctatatctatctcaaaacaaaatatacaatccataaaatcatacactacaaagttaagtctttttgtttgtatttttttttcatttactaatagcaagttatcatttgtagatagagagtattgaattgtattgttaatttgttattgttgtattattgaatgaacgtcttttttcttctaagcaagttatcatttgtgaatagggagtattaaaccgtattgttattgttgtattattgaataaaagggtacagcttatatataagcatttcatattattgaatgaaagggtacaatttatatataagcatttcatattttgtccacataattggggtttagtggtggttgagaattagagaaatattgaaagaaactaaccctggtttaataaactttgaaacaaaaaaatacatgtacgagaagtttggatttgggccaaagatccaaacagtttacacggtaatcagtaacatgcgatctgactactttctaacgttactcagaaagtattccaaatttgggaaagacattatagtggtcttttaggcagaagtctactagacttttttcgcttatttaataaactctagactctccatatatagtcttcactaataaaactcttgcaaatatttaaagttttggacacgaataacgaatttaatatatatattttaatcaagttcaggaacgatatatatatttataaaccctgatatattttatatatttggttctccgattgtaatcagtatgttgaaagaacacaaagttctcaattcaaatgagtcttaagtcgacaatttttttgattgaaaataattttttatgtaagatgtgattctttggctttgcttatactccaacgagaagtaagagcatacaaaaagtaatgatcgaaagcgaatgaaagacaaacgaagcaacacctctttactcattctttatattaatacctctcaggcttcttcacctgttaacactttttcttcacttgcctacagcacctgagctctcttaaaaatggaggaaacgacgaccttccatggactaggacacctcttcattacaatcttcttgtactgcttctcatcattcatcgtggctccggtgataaccgacatcagcatggctgcgctatgtcccggaaaagacgagtgttctctcgccatttacctctccggctttcaacaagttgtacgtactatctacaaattaaaccctcttttacattatttgtgtttcaaaaaacagaaaataagcgactgtttttttgttctatgtgaaattcaacttattttcataactaaccgttcccatgtcagtagtttatctattttctaaattttaccaaattaccatgtaaaaaataatttcatgttttttttttgaaagatatagataaatatttaatcaatggttattagatcacgggagtgggatcattgattatgatgccattggtgggaagcttgtcagacaagcatgggagaaaatgtttgcttactcttccaatgacactcaacattttacctcttggtatggtccctactttgaatcattttataagctttttattccacgtctaatattccttgcttgaaagcaaaagcatcctataatgtttcacatactttaatttgcttttaaaagttaaggaaaattgcaaaaagttatttgaatatgttgaaaatagtttttacttttgaattattaaaaattatggttcgaagtcaggtagatttgtttttttaataaataaagtcaattgtttaattacaatcacagtatttacaaaattgtttcaaaagttatcatcttgcgctgtccacatgagagtaggaatctaatgtcatatcttaacgtttcattttgaaatataagaaactattttattgaaaaacatatgtttcgctgaaagatagattatttaataattacagtgacattagcgtatagtagaggggcaaccatcttctacatgtactatgtactcaagactctcacttcgatagtttgtgaaggaagtgttctttgtcttgcccttgcgtacgtggtatgccattatcctcctttcgttttttattttaattgccgtcagtaatgtttattaagcgaaaaaagatattccaagaaattaaaggatacatacaattaaagtagagcaaacattctttaacgagaagaacaaacccgaacgggataactaagacaatatacaatagttcttcaacaagccataaataaatgataataatagtgttagttgcttaattagtcttattttagttaggatatagttattctactttcccttgactttttgtaagccaattagaccggtcctttttttgttccttttgtttttaatttggccggtctttacttttgggtagcataaagaacattcaaatatatgtcatcttcacatatagtaattaaaagaataataatactataacaatgtaataattatttttaaaatattgttatgtgaagtttagagcatctccttggtgctaattgtttttaggattttaatgtaaatgttgacctcttctgaactaaaactattgaggaaggtaaatataaaataatcaagaagaaatatgttttagtaaacttatttctaattaaatctcttgaaaagtttaaaagtatttattttgaataactggtgaaatctttagtgaagttcaataattttatatatgaaagtattttcggcggactttcaggctgataatgtaccagaagggagacgagcctccgcatttgggatacttaccgggattacatcatgtgcattcgtttgcgccaatctttctgctcgatttttatctattggcgtgacatttcaggtatctttatatactcggagttacatgcatgtgtatgtataattattagtgaatatatttcagttaagatcatccttatcgcgacttgttaggttgcagcagcaatgggaattttatcaacgttgtatatgaggcttttcctaccggattcgatccgagacaatagcctcggtgctcccattgttataaatgagaaattgagttctcctttacttgaagattgtccaggacatagaaataggatatttagagcaattcgtttggtacatgaaatggcttctctaatgagaagtaggtgtgttttctttttccttactcttttttattttatattttattttaaacttataacttgtgacggattgacggtagaggattgatttgatgattagtgaaaaaaatcaactaatttttatcttcttagtttaagacaagatttaattacatagatttcttacttaggtttgctttccagcgttccactttttcaagttgcgatggtatcattcttcagtagtcttgctgaggcaggtctacatgcttcatctatggtaagcttataactatgtgataccgctattaaataactaatatttaatttgttttacaacatatataaataaatctatacaaaacaatgaaacatgctagtaagggacaacaatttgaagatattagtgtatgacgtaaaagcataccaaaaaaaaaaactataattagtaaaaataataatctattagattttgcatttctcaattttcttactaaaaataaatgagtttttttttgttgtcaattggttcactcagtactatttaaaggccaagtttcactttaacaaagaccagtttgcagacttgatgatcatagttggcgcatctggatctatttcacaggtaataattaagatgcagacttttgaaagattggtctttttcacattgtttaacttacaaagaaatgttatttcacagttgctctttatgcccgttctagttcctgctttaaaagaggagagactgctctcaattggtcttttctttggttgtgcccatgtaagaaccgtcttttagtttgtctcgtacttattatgttgttctctaaactttgtatttcgtatggttcttttcttgcaccataaagacaacatcctccaatatagttttaggtgaacgagcttaataatgagcccttaaatttgactacacatgaacattttcttatatgttgcaatcttaattttgcagatgttcctactatgtgtggcatggtcctcatgggtattaattatatccttttaagaaatttttcttcatttccttttttctttttttttttcatgttggatagttcattttctttgcaatatcttttggcgttaataagaattgcctctttagtgaagatttgtgagatcgattattggctaaagataatttaaaactcacaggttccatatatggcagccatatttgcacttttctcaatatttccttcatcgtgtgtaagtttacatattatatatatagatttttttttttttttgtcaacacatattagatattttttattcgagtttatactttaattatatattgaaatgtattgtaattcaacaattcaaatttaatttacagatgcgaagcattgtctccaaacaagtagcatcatatgaacaggtaactaagtcttgacttataacaaattccattcattttattataccataaatacttcttgtataaaatggacagaagaataaattatttcaaagaaagaaaaaaggagtaggattagtggcttacatgagaaataatgttatttttacatgaaatcgaacgttattatttaatttgtgcgagactggttttgacttttatcaatttggttaatcggtcaatgcaaactctaactctcggtaatattttcaggggaaagcccaaggaattatttcaagcatatgttcccttgcaaatgtcatttccccgctagcattttcacctctaacaggtttcatcactatttacataagcattgtttaataatgctatttcaaaaacttctgtagatagaaatgcaaataacttgctactaacactagtatttttatttttcttagattggtttctgtctgaaagagccccatttaatttcccagggttcagtataatgtgtgcgggatttgccatggtaatatactttatgtttttgcattttctactgaaattcactcaagttagcctccatgaaactatacaaataaatgtccggttaaaccaagaaaggaacgttatccttttaattagtttttactttcttagttttcatactcttatctaattcacaacgaatgctgttgttggttgtgcaaaaaggaaactttaaatcttatctaatttcccatgaaaaatcactaactcattcagttcttttttttttggtttaacatttagttatatgacaatgtatgtgaaacatataaaccttttaattgattcctcaaagttatatgagttgttcgattactaagaaaaataatatatataatgtccgttactttgtttttctttgtagactatagctttcatccaaagcctgatgatcagagcagcaacaccaatatcagttatgggatctccataacacagtttcctcaaaaccatatggatttcgtagtgaaagataatatacaggttttaattgcattggtcgaatccttgatgtttttttttaacccatattgtgtacgggtttatgatatctaaagtcagcaagacaccaatagcttgtataggttagtcaataactcctaggggaaacaccatatttaatggccgtttcagttaatttagatatcttctttctttttttgagttcaaagttagtttagttgtctaaagcaacaaaatagctccaatatttgtatcattaaatttatttatatacatcataattatttttgtatatatagacataattgaaacatgttttattataatctatatatacatttttgcagccattttgtgaaataaatcctttagttgtgacttatttacaatggctgccactggattttaatgtttgtttttgataattaaaaagaaaatattcgaattaaatatttgacatttaacaatcttcccaaaatatctccacattaactacacgattatttactaaaataatacttccaaaatatttaatatcatttaattactacaaaattatcatttttgatattgattttctccataactataacaattcgattataatcatcaaagcgcagagatataatctgatagcatttaattactacaaaattacaaaatatttagacaatgattcataaacatatcataaataagatcaacattaataaaataaatagttttttttttacaggacgggtttgacaggacgatacttaataacatttgtaaactataaaataaaattattttatagatagatacaatttgtaaacttttatatatactaactttaaaaaataaattgttcccgcggtataccacaggttaaaatctagttgtttttgtattttaactaataatgtggactaaactttaggtggaatacctttagttaacggatccgctttcatgaaatttctacctatatgcttaactgaaaccacatcatcttgaatcctttctcacacaatatgacactctatgtctatatgctttgattgttctacttttgttgttgtttgcatatacactgccgcaaaattgtcagactaaactttaaatgatctttcgacacataaccaacatgtagtgtttttcacagactgttcaaacctaatgaatatagtgttttccctaacctaatggccggtgtattctacaattttgaaagatttgcctgagtgacaataaaaaaatctcaagcttgtttctatctctaatctcttatactgcaaatgttagaacgaatactttggcacgaaaaattcgtactgaatcgcttcatatatgtaaacaattttttctaaagttgactcatttgaacattaatataatttgatgacaaaaaataataaaataataaccattattaacgacaacaataacatagattcgtttcagttatatgtaaaccataatcttcatgattaatccagttatgtgtaaacttaaatacttaaatattagaaatcaaaattacataataaaacagaaaaagaagcacatgtttaaaatttattttagatatggttaaaaaggccaggcccagctttatattattaatagaagagtccacatttagagcggagactaggcctatattcgcggaagcgtcaattcaggttttcaaaacgtcgtcgttgtatcttcctcctctagattcttctttttcttttcaatttcaccaaaatcccgagttcccgacacaatcgcccttgttcttcccctttaactctgaacacatcaggtttggtttcgtgtttcaactttgagatacttctctagatttcaatcggagagtcttttgttccgccaaagtttcaatttttcaataccccacgacggcaaataggttcgttcttcgttgccttcatggaatttgattgtttttttcttaaatcttgatcctttttttccgtatctataggctctgtttttgccttagcagatttgtttttgggtttggacggtgaaagttttgatttttgaacagtgatattacaatgacttgcatttatttgggtctgggtcttttgtttgtggctttggatggtgaaagtttttgatttttagcatttttattacaatgacttgcatatatataggatttggtcttttgttacaatgactagcatttagttatgtcatttgtttgtgtctcattgttgattctgttttgtatgatcaatatctggaaatgtgtgtggtaaaggttttgatttgagtaccctagagataatattgtttattatgagatcattcttttgtaagatgaatttacaagctttatgttttttaaattttaatactttagggttcatggaagatcaacccattaaccagtgctctagtagcaccaatgcgtcggagaaaactccagaatcaacccttgagcttaacatcaaaacgttagactcgcggacgtatactttccaagtgaacaagaatgtaagaaatcttcttcttcttctgcttcacctgcatatttgcttaagtttagtttgcttatatctgatactgcttagggcttgacttgttgcaggaaactgttttgctattcaaggagaagattgctagtgagacaggggtgccggttggtcagcagcggctcattttccgaggacgggttttgaaagatgatcatcctctctcggagtatcgtatcctagtgctagcgactttgttaacttgttgattttatgttatagtgtagctgtttgttgcattatgccatgtgccctgtgtataaaatgcatgttaaccaaatctgtcggaagtctagtttttgattgatcaagtgcatctctgcttttgtgagtcttacaccgtagaggaagctgtaatccagaaagagaactatatatatatatataccttcgataagcttagttttagtttatgtctgtcgtttccttccatcgcttttctactttcagtatagttgataacttgacatcgtcatagatttggaaaatgggcatactttacacttgattgtgaggcagccagcagaatcagctccttcctctggtacaccttcacaaggggcaactgcaaatgatggtaatcaagttattttttatcccctttctgagttttaaaagagctgttaacacaaccatcatcttatttcaacttgttatttaattcaacaggaaataatacaaatggtggaccatctcgaaatggaagacatgtctcccacagcgtagttcttgggtcttttaatgttggagatcagacagaaggcattgttccagacctcagccgggtaatccccaaggatttgtgatattgtttggcctatgggatggtttgattagttaggctaacctgcttttaattttgtgttgctaactactaaggtcattggagcagttctaaattcttttggagttagtggacagcttcctacaaatcacagtactaatggcacgcaatcctctatgcccgtgagtttttttctcgtcactctctatttcgaatttattccatattagtgcttagtctacattaaggattgttgagaatcaggtgttgttactatttgatgtgtaaggtttcatattgtcatcaactattgcctgtttctaaactcgatgttgcatgcgcttttatttttcctagtcgaatcagtcgtctaatgcacctcctggaaatacatctgatggagagcctggcattggtggtcaaagccaagctacgggtcattcacaacctaggcaagcatttcctggtgtatcatttcaaacatcgatgcctcgtgtagttcagattcctgttacagcagccacaacgattcctatcccttcattcttaacggtagttcttagtcacgtagtagtattttgatcttgagactagagctttaatcttgtcattttacaatgtaactctctaattctgcagcctattccggattccttagacactctaatggagttcattaatcggatggagcaggcattatcacaaaatggtattgtgatctaagttttattgtcatattggatagagaacacataaataagttaattggatgttcctccaggctatcagccagatacctcttctgctggatccggagggcgaccaagggaagagttgcctagaaatagacgaggtgcagcaacacctgaagcactctctgttgtcctaaggaatgcacaacatttactgagtggtctcggtgtctcttctttatcggtaaacaccttcttcacactgcttattaattgattccattctttctctttacaagaactgttatgtatatggttaccatgcattgtcatctaattatgtgctgtttgtaatttgcaaaaacattgttgtagcatattgcgggacgtctggagcaagatggttcatcttcagatcctactctaaggtcacaaatccagacagaggccgtgcaagtaggtcttgccatgcaacatttaggggccctcctactggagcttggacgcacaattttgacattgagaatggcaccgtcgccggtgcgttttgggtcattcctttcgtgcattttcctattcattcttgacatgcggctcattaacactttgatctacaggaattatcctatgtgaatgcagggcctgctgtgtatatatctccatcaggaccgaatcctattatggttcaggtaagcttctagtctcatcttttttctaaattaattttctacttttatgtaattattactgtattttgcagccttttcctcaccaaatcagccctctctttactggtgctactgtctcatcaaatccactaaccggacctgttggtttaggaactgcccaaaggcacattaatattcacatacatgctggtgggtgaagttcacttttttgctattggacttagctgcacaattcttctccattaaaattcatacttaattaccaggcacatcaggttcacctatgttgtcatcagttgggaaccagcgaagcaatggagaaggaggacaaggagaccgtgacagcaatacaagttcagttcctgcggctgttccatcacactctaccggtgagaacgtttctgctggggttcaacctggtttgggtgatgatgtttcagttgctcaaatcaatgcaaggataagagatatggtaaacattatgcaaggaagagaccagattccatcgggtaggtttcctgctgactaaagttttacattgtggacgaaatgttttcaagctcttcttcacgtgtcaatcaggaatagaatctctcgagagggatatgtctacgggccatggtgttgccactgctatgcctgagcagcctaccaacattgcaactacttgcgcacctgagtcgtctagtggctcactgcatgacttaccatctgagaggagcaactcagtggtatgtcttctctgcaatcagatgattctttattttatgttcaccagggttagcctaccactaatttttgttttttcaaccagtgtcaaaatgaaaaagatcttggtggagatttagagcatccagcccgagcaaaagatacctcttgtactacaggacaatcatcagctccgtctggagatgctaccggtgatgccaaagaaaccaataaggctactccagaggtagctacagctacaccacttggattggggcttggcggtttagaccgtaaggtaatgaatcagttgaaaaataagcgtcaagttgctgctgcttgtttttcattgcatagcatatccacaagtgtcatagttccaaatgcttacagtcatagtatgttttttttggttaaagaaacgaagcaagcagccgaaggtatcaggtaagactgaagatagcgggacttcagctacacttgaaggtgtgcaacaaagcagtgggaccagtggtcagcagcttttgcaatctctcttttctggtagttctcgttcagatgagactggtcttagacgcgggcaaggttcagatgatcgtgtagatgtctcaagtgcaatgtctcaggtcctggagagccctgtattggatggattgctagcaggggtatctcgacaagctggtgttgattcaccaaatatgctgagaaatatgctccagcagtttacccagaatccacagatcatgaacacagtccaacagattgcgcaacaggtggatgggcaagagatagaaaatatgatgtcaggtggagctcaaggcgagggcggcggctttgatttctctagaatggtccaacaaatgatgcctctagtctcacgtgcttttagccaaggagggccattgcctcatcccgcaacaatacagcctgatgatcgtcaaccttctcaggtacatctacgagtgttaggtttggatttcttgcgtttttgatttaggaaaaaaatgtggctgaagaaaaactgatactattatcgactgagtaggattttgttgttgtctttttttagttgtagaaaaagtaacaccattcttacctaggtattacaataaacgtcattgtctcttgttctatctcgtgtaatgaatgttatttttctactttttccaaataggtaaatgttcaatccatggctcaaatgattgagcactctgatccaccagaggatgtcttccgtgcaatggtcgaaaatgctgcgataagccaagacgaactagtgaacgagctttgctgtgatgaagctctttctcaagtaagcatcaaaactgactagtttgtttgtttaataaaaataaagactccttgatcagacttgtatttgagtgttgcaggaatatgcggagttgctaagacgtgatatcgaaggccggctaaaagatgatcaaggtctataagatatttggttgaattggttctgtaagtgtcatatctttgaagtatctttgtttatttgctgagatccctcacttatgtattaagaattagggtttgggatggtctatactctgctaaacataagcaaacgtaatttatctggtctctaaagggccgattcaatttgatatttccatctttaaccagagattactcataactctcgacattgaccaaattacttgggaaaaaggtgtccctttataactgacaattttggttttgatcgaaaatttggctaaagggctacactaacgagtgactgtagcaaattatatatttagtttaattccttaacaaataggtaataaagattgcacaataaatatggaatgtaaactaataaatagtagaataattcagaaaaatgaactgtcacgacaaccccaataataagatgttatatattatttaatttttataaaaaattatatattataaaatttactatgaatttttaatatgtttaaaattacaaagttgttgtgtttgttttgttgtacaaatttataattttggattatgacaaattaataatattgttttattttatatttaatttctaaaagattattaaaatttgttttatggttttacgtattcaagggttgtgaacaattgatcaccaccggaaaaattaaggatgacgacaaaattgaactaaaacatcatgggttcagagattttcaagatcagcgagccatgacttagcgacatcggagatcatgaacattcctaagacaagctgtcttttgtgatgagttttgcaaataattgtttcatcgctaatttttcttacttatgacttttctagagtgaaaaagactaaatttttaattattattaggacccaagttcgagattttctaaaataaatctcaaatggttcaccaagatattgcaacgtttgtatttcatccaaattgagcgaaaaatgaataaatgttgcaattccttcatttgaaaagatgcaaaagagaaacatcgattgtgtcaaatcaaaccaacttcaattatggtatgctttgtgcatttcactctcgatcttttgaatattcaaagtcgtatgaaaactagttatgttgcttttagtaaatatcaacattttattagattattttgtcacacaacaacaatgcttttgatgatcaggcttcatagtacattccccatataagtaataggctattcttacacaaaagaacaagcatccttcgtaaccatttttacacggttctgggccgtagcatttatcttcttgctttatttcaaaacctatattatagtaataatcaagagatcaatatatatataaactcataagaaaaaagtggttgattcataataagatagtaccagaagtgttatctaattccgagcaataaacgaaaggcatgacaaagaggaggatgagtacaaatgcggcaaaacatttcttggtgatagccatgtctaatatagtctcttaaattttcttacgactgattctagcacttacgatgattatatatataataacacaaacatacattcaaaggttctttttggtgaaagaggaaaaggaaaagaatccaaaaaaaaattctcttgagttagtcaaaagaaaaaataaagagataagtattcttacctaattatgtttgaaacattaataagataacatacattgttttacaaatatttaaatacgaaaattcttttcaattcaattaaaaaaaaaaaagatctcaggttccatggttggaacttgaagttaaattgaattttttgttaaagataagatgtaataatttgatctaaacagaattagtttatattatatcattctttaatatgattaaagggtctatacttagtttattaaacaaatatacataattttttaagaaatatatatttttatactaaaataatatatatatatattgtgaattttaacgccttctatagttaaaaatattcaagtaacaactttatgtctgatatatattcaataatttcagattacaataagtcttcgcaattcttcgacaaaaatattaaaaactagatattaacctgcgatacaccgtatgacgatattttataactaaaaaggtgaaattgtaagttgatttgtttagtactgtttattttgtttagtgtttaataatgtataattgtattttgattgttaatgttagaatttcacatgtcgtataacatcgtgaaattaaagtttaaatattgatattatttgaaaagtcataagagttttaatattatgattgtttttatttattttgttttgtcaaatctattgatggttttaggtttttgtctcatggaagatgcaaatagacatttatgttatcaaattagacctaactaagcctaattaagtcaatgttaagtaacaaagaaagatcatacggttagtcacgattcatcatccatcatcctccaaacaccaccccacttttcaggtgacattgttcttaaatcttaacctatctttctttcagattcatctctatatttatttttccaccaaaaacagtgtgacttaagtcttgggggttaataaatccgttactactaatactattctctattttcttgacttgagacatttttccaatttttacatcaatatgttctaacaaaagaaatagttttttattttattttatcgaataaatattttattgagtaaaaacaagtagagaactatgactttgttatatgatgatattgaccgatgtgttgagaattgcttttttaaggaacacttacatgtttgcaaagaacggacaatcttgaatactacatctgaatgacttaatcatcccctgaagtttaaacccatagaaatttatgttattagattatctttttggattattattattattatatttattttgtatagctattgagttagctcatttaactcacgatcaagatgatatgagtccaaatttatatataaaaaatcatattataaataagatgagttgagttgagcgaactatcttattttgacatctatagggtttgggtatgtaacccatataataaatgggttgggtcaaacccacccgttaaaatcttgaacagggtttgagttattatccactttacactcctaaatagactcaaggcattgcattatacaaacgattagacctaggtacaaagatgtaatattaccaaactatatactactatgaatatattaattatatatgagtctatatattccccaataaatttcagtgttctttctctacttgagtttggttctaacacccaatgagttttagaattcgattcttaaagttaatgcaatgcattgctaatctctgggaaacattactagtagataagtgatactaaacatggaaataatcaagaggcacacatgaactcttctttcttctttaactttattcttctcacttctttcttcttactccactttactcttctttctcagacgcttcaactcaaaaagagaaaccagcatagttgtaatcttgaggatcagctatttttctgaaggatatttggcctaatttcgaaactcaaggtatcttctttttctttttctaagtctcaattcagcaaaatgtaacatacacaaatatcactagtttacatattttattattattattattattttcactagtttacatatatatatatatatatatcagggtcgaagtaccaaatcaaagttcttgctgttgtttacgtatacgagagtgaattttgtttaatggatatctcaaatatttcgtgctttatttgtaaatcttcattgttctttctctacttgtttttttgggtttatataaccatttagctgatttttaaatgacttagaacttggatcttacagttagttttcagttgtgaaaccaagtttgtttatttcagctgtatctttgtttctctgtcagctttgtaaagtaactaagttaggtccactcgaattctcgtataatatttaatatcgcctttcgttttcaggattttgacttggcaaatagaaaattgttatagttttttgtttttctctaattaaaaaaaaaaagaaagttcttgtttcttttgttttggttaagagattagtgttgtctactgtttggattattctttctctgttactgttacgtgtttcattttaagatagagagtctctttatcattcatagagtgtacttttttccctgattgtttcaggtacttaggaaacgctgtagaagatggctattgtgtcgttgcgcgatgtggccatggtgatggtgacagtgcaggtgtttgcacgagggtatccggaaacagatttggttgtgaggcttcctggtcaaccaaaggttgtattcagacagtacgcagggtatgttgatctcgacttgaatgctggccgtagccttttctactacttcgtggaagctgaaaaacaccctgacacaaaaccgttaaccttgtggctcaatggaggttcgtatttagttgctctgcttcctaactaattagcatttgagtatatcacaaatcacaaatttgtgaaatgaataagttgaggtttgttttataggtccaggttgttcttctgttggtggaggagctttcactgagctaggtccattttaccccacaggatatgggcgtggtcttcgcattaactccatgtcgtggaacaaaggtctatttcttataatattatgcaaagaatgagagaaaacagaactttgatcttacacctgacgttattgtctattgttgtaaatgtgtagcctcaaacctgctatttgtggactcaccggctggagttggttggtcttactccaaccgaagctctgattacaacgctggggacaagtctgcgggtaaattttaaactccaaagtttcagaggatctcactctcactatattagaagatagttgtttcttgacttgttttgtatttgaacagccagcgatatgctcgtgttcttgttgagatggttcgataagttcccggagttgaagtctcacgatctctttctcactggcgaaagctatgcaggtatgtcttcgatatcgatgaaatctattaaatgttgacttggaaaacatcagtattctcatctctgttttctcgcaggacattacatacctcaactggctgatgcgattctcagctataactcacgctcaagtgggttcaaattcaacatcaaaggcattgcagtaagcaaaagcaccttgacgttccatcaactctatttttggttctcttctgaatcgtttctttctgatcagatagggaatccacttctgaagcttgacagggacattccagctgtatacgagttcttctggtcgcatggcatgatctctgaggtagtgggacgtacaatcaagattcaatgtgacttctcacattacacatatgcatacccccataacgtaagtgatgcctgcaacgatgctatccgtgaagccggagacatcaccactgagtatgtcaatacctttgatgttctccctgacctatgctacccatctattgccctgcaagagctaaggcttaaacaaatggttagcccttttttgcaccaacaaaacttttgcttgaattatctgtaaacttatgaaaatggtttcaggctactaagatgagcatgggagtggatgtgtgtatgaactacgaaagacagttctacctaaatatcccagaggtacagatggctcttcacgcaaaccgcacaaacctgccttattcatggtctttgtgcagcaagtaagttattttcctctctttcactttcataaaatgaagaatctttataaccactgttgcactctatactgatagctttccccacgtgtcacagcctgttaaactactctgccatcgatgtaaacaccaacatgcttccgactctgaagagaattatacagaacaaaattcctgttaggatcttcaggtaatagttctattaaaaatctcctactgcttttatttcttactgcacctgtatttgtacctaacacttagcttgtcgacaattgcagtggagatcaagattctgtagttccatttctgggaacacgaactatcgtaggagaactcgccaacgatctcaatttcaagacgacagttccatatggagtgtggttccacaaaagacaggtagttagcttacaccattaaacaagcagcaagttctcaaacagattgtgaacttagttatggatgtatgggattttgactaggttggaggctgggccatcgagtatggaaacctactaacttttgcaacagtgagaggagcggctcatgcggtggcgtacacgcagccctcacgagctctgcatctattcagcacctttcttcgtgggcagagattgcccaacaagacagatattgctatgcatgactgaaagagaaggaatctcattattagagtacatatccttgggaacatataagggattgtgttgagacatattttcatatgattactagtaacaaaacccgtctggtttaatgatgtaaacgacacataatctccactcacaatcgttgacaaaaaacaaaaggtacctactgtcttaatatcctttccgagtttggcctacttctatcatcaccaaaccaaaatccttgtcctagccaccaacctgaacaacatacgtcttccatctaaacttatggaccataggtgcaatgtagcatcttgaacctttgggagattagtatttgcagcttagatcccagactatcacactaacctcttcgaatgctaggagtcccaaaagcatttggcattacgatgacaactaacacctgaatgatggcagaaaatttcaatttctcattataggttctcattaaaagaaatgtaatttagtcatttcgtacatgaaaagacaataagaggtagtatttttttaaaaggtattagaaaaaagtatttttgcaaatgcccatattttgatatgttttttatctattaaagacaaataattggaaattacaaccattagaatctgcaaaatttatttcaaaatcttaactaataattatggaaaaataattaatatgatatcaccaattttaaaaagtaattaggtgacgacaaaaaaaaaaaaagtaattaggtaagatatcaatacgtttactaaatataaggaaattaattgaaagattatttgtttcatgtatgatagaacattaattttcttacttctacatatcttttctatagttaagagtatttggagatattatcgtatccctctctttacatatttgtgtttctcttctttacatatttatcagtgaatcttgtgtctttattagtattgcatttcacaggaattccaaaaatcactaattggctaatcgtatgtgtatatatatcggccactgactctaagtactaaccagaaaaaaaaaaattatctcttacaaagttatcaaaaatggctatcaccaagaaaatgcttgtcgtatttcttcttgcttttctttttgtgacatcgtcggttcattgttctgatagcactcttggtacaatcttagcatacttttaaattttagttttagttatgaatctatttatatcttttaaatatgattataaagatttgtttaatggttatcattgaataggtattggaatcaaccaagattggaaaaaatgcttcagcccagacccgtgtaaaaaagcagggacgcaaggctgcatggagttctgtagaactataagctttttattattcggtgaatgtacttctaaacctgatcaatgttgttgtgtgacaaaataatctgataaaagagcaatattttctataaaatattatcactaagcgactaaacgactataaaagatcatttagctgaaaaatatagaataatgttgttggtggtatcatataaaataatatcatttagctgaaaactagtcgcttagtgagatcatataaaattagtcgtttagtgagattaatcgtatcatataatcaatattatcaataccaacaaccactatagtcgtttagtctcaaagtggttaattgaaagattaatcgtatcatatgatcaataccaacaaccactatagtcgtttagttcctaatataaaactgttctttgtttcataatatcactaagcgactaaacgactataagatcatttatacgactataagatcattttcagctaaatgacagttggggtcatgatttgggccatgacttacatgatctcacacacaacaaagaaaaaaggtagtattcgcaaatcgcaacaaactgcacaaaaatggtaaagatggtgtctacaacagcgaattggccaactttctctacatatataaagtaatttgtcataattcaacatttgttttgttttttctctttctttcatatctcgtaattacaatcataaaacaagtaagttagcagagtgtgctagggttatcttgatgatggtatttatgatatttttgttcataaccttttaacttttttgtagctaaagaaagaattaagtttcaagattgaaaatgttaaattaacactaatttgcataccataactttgtaatttcatgattggatgtcagattcaaaattttaaaattaatatagtttaaatttttgattaccaaaataaataaatataatagtaaatccttaaaaagttaaagcagatgaatcattttaacttacaactatttaaatcttctaattcatttcaaattttctttagttatcttggaaaaaagatttactaggtatagaaaagaaatattttttcacaaatgttcaaaagttatcaatacattttataatcaaaggtaaccaaatcaatacatttaattactgtatttaaatccgtaaaataatgaatcatttcaacttaaaactattaaattcttcttctttttttcatgggcttttaatttgtgctcaaaattacaactattaggttcttcaaaatttaattcaaattttcattattaatcttggaaaatcaatttactatgtagaaaataataaatattttctcacaaatattcaaatttatcaatacatttagtaatcaaaggtaacaaaatcaatacttttttactattaattataagaaaattaattgaaagattcttatgttttcaacctatgacagatttttgaattatttttttacatgtgttgtgtagttaagagtattgggaggttgtaaaacaatatgaatgttaaaataaatattggaagatatttgcatatttgtatttctcttctttacattacatttcttagtagaatcttgtgaaattactagtttctgctttcagggtaagtccaaatccgtaatttggctaatcgtgtgtatatatatatcggccactgatggccaagtaatactactaacaaaaagaaaaatcttatacaaagttatcaaaaagataatcatagaaatggctatcaccaaaaatatgcttgtcgtattacttctcactattatttttgtcacatcgtcggttcattgttctgatagcgctcttggtacaatcttattatactctcattttatatttttattttttgttataaacatagtttaatcctttagatgattataatgatctgtttaaataggaattggaatcaaggaagattgggaagtatgcttcagcatagacccgtgtttgactggagaagggaccctaggatgcacgaagtggtgtagaaaccacataaatctttcattagttggttattgtcgtactgatcctgaacactgttgctgtgtggctgaaaaataatctaaacgaaagattaaaattttctataaaataataatatcactagtttcatctccaaagatttgtgaatttattagtttttcttctccttaatttgatttatctccaaagattaatcgtttctcactggtctagtgtctagtgtctacatatatcgaagtcataatacaccaatcgtaccaaatcaaagttttgaaaaaaagaaactcgagcgaattttgcatgcaaaataagtatagtgtataatcttgtttttttgttaacgtatacagtaaaaatctgtttaatgaaaaactgaattgtacatgtatcaatttgatcactaaaaagtaaaaacatacaacaaaagaaaaattggtaataacattagagagagtaaggaaaaaacacaatcgttgcatccatctaaccagattgaaacccaaaagtttaggaaatttggttttgtaccggtttgggaaagaacggttaccgcccagtttatcaggttgccatgacgatatctgacgctgtcgatgtgcttagttggggcgactaactttctaggagacttgtggtagattgatttgaagacggaaatcggtctttttcgtcgaaatttctaaattatcggttgcggccacgaaacggtaggtcttgagcccgccgaatctaatgtccggtcactcagccagcatctatgaacaagcagcgatcttcttatatttatcggcatgtttttctgattttcttattttgtaattggatctgattttgatgttggttacggccaaactccttaaattgaattttaataaaaattatgaaaaagagacacattagagtaaattgaaccgaaccgatttgaaccgaagcggacttaaccaagaagaagcaggcgcgtcacttgttttcactcccaatatcgaattgaagaagataagagtagactagagtcttcttggttgtgatattcttttccaatttcgtaattttaggtaccttttgctcttgttgctcttgtagattttgtttaatgggtatctcaaagattcatgctttacttgttaaatttctgggtttgggttcttataaccaattagctgatttttgaactgttttagaacttagatcttactcttagaggatagagacataaagaatctccattgtttgatatatcacttacgttgtcttcttgtctcattgattcgagcattgtagtcttttagttgccaaatgcaattgtgaaaatgtacaaaactgttcttgtttcatatctgcagtaaaattgtttttggtatttggtgttctgtagatttctcttgtttatgtctttcatgtttgtttaaattgggtttataaatgttttgtggataattcatttgacataataatgggtatgtttcagaaaagctgtagaagatggcgagtgtgtcgtggcgggctgtggctgtagctatggtggtggtgttgctgtcattgcagtggtttgcaaaagggtacccggaagaagatttggtggtgaggctgccaggtcaaccaactgttgggttcaaacaatacgcaggttatgtcgatgtcgatgtgaaagctggtcggagtctgttctattactatgtggaggctgtgaaacaacctgactcaaagccattgaccctttggctcaatggaggtccgtgttttcctgctcagtttctgcatatgtttaaagaatttgtaaaggatatttcatatttgaggtttgcattgcaggtccaggttgttcttcaattggtggaggagctttcactgagttgggtccattttaccccactggcgatggccgtggccttcgtgttaactccatgtcttggaacaaaggtttgtttttgacaattttaagcaaagagaacagaactctgtgattttatatatgatgctattctctcttggtgtaatatgtgtagcgtcgcacctgctttttgtggagtcacctgctggagtaggatggtcttactctaataaaagctctgattacaacaccggggataagtctactggtaaattttataatccccttttcaaacaatattagcagaccgttgtttcttgatatgttttgtggtttggacagcaaacgatatgcttgtgttcttgttgagatggtttgagaagttcccaaagttgaagtctcgggatctctttcttactggcgaaagctatgcaggtgtgtcttcgatatcgatgaaatgtattgaatgttaaccttaaaacatcatcactattatatatatatatatatatatatattttttttttttacaggacattacatacctcaactggctgatgcgattctcagctacaattcacactcaagtggattcaaattcaacatcaaaggcgttgctgtaagcaaaagaacctttcttcttgcattccattaactcttttgtttcccttctgaattcttttgtcttatttttttctgatcagattgggaatccacttctgaagcttgacagagacagtccagctacctacgagttcttctggtcgcatggcatgatctctgatgaactaaaactcacaatcacgagtcaatgtgactttgatgattacacatttgctagcccccataacgtaagcacggcctgcaatgaagctattagtgaaactgaaaacattatcactgagtatgtcaacaactatgatgttctcctcgatgtatgttatccgtctatcgtccagcaagagctgaggctcaagaaaatggtcagcccttttttatcttttgttccaccaacaaaatttttgttgaaatatacgtcaatttactaaaacaactgcaggctactaaaatgagcatgggagtggatgtgtgtatgacctatgaaagacggttctactttaatcttccagaggtacaaaaggcgcttcatgcgaaccgtactcatctgccttattcatggtcaatgtgcagcgggtaaattatcgtactttctctcggttttattgatcacaaaattagagaagctatttataactggagttcatatatctctacattgattgcttttggctgttcactttgcctgtcacagcgtgttaaactactctgatatcgatgggaacatcgacatgcttccgattctgaagagaattatactgaacaaaactcctatttggatcttcaggttatacatctattaaagatccattttatctccttctgttcatgtcttaattgcattgtcgatattgtagtggagatcaagattctgtagttccattcgggggttcaagaactctcgtaagagaacttgctcaagatctcaacttcaagacaacagttccctatggagcctggttccacaaaagccaggtagtttgcctacaccattaaacaatacaatcagcagaagccaagtttactttttacccctgcaaaagtttctcaaactgattacaaacttgtggatgtgactaggttggaggctgggccatagagtatggaaaactactgacgtttgcaacggtgagaggagcggctcatatggtaccgtatgcacagccctcacgagctctacatttgttcagtagctttgtaagtggccggagattacccaacaacacacattcttctactgatgaatgaaagagcagaggtatatcttttgtaagaaaaatgtagtttttgtatttaattgatctgtctcaggccttagattagtagagatagaaacatgtaaaagtttgtgttgtggtttggttggatcttcaagtgtagtttgttttagttatctcaaacgttgacaacaattctctttagttaattaatcttagttattgaattagtattaacaattattgtatcaccatattattttttttacaaattttgtctatatgttttagcaagtgtactcgcaaatgcacatcctataaccagcatagtcgacacaacccccttttccattcttatattttatagcgcattgtctatcacaacaacttgtaggacatttatcagtgcacatatcagtcgcaccgatgcacagtttggctggtttaaatgaggcacatccgcacgtcccatccggaccgttacatttgcttacggacgatggtccgtgtttggccttgcacctttggtcgcaattttcacaagagcttaggttctcgtcacatgtctgtgctcttatctgattcacagctgaaacaaacattatatacgttagtaaacttaacttaaaaaataagattatttgtgccatattgattgatacaaagtacaagtaaattttgaatatagcaatgagagaatttgttttttacatgagcctatatatgttaaattcatttacggtggactaaaaatttcaagcagggttgtttcataaactgtccatggactcttggcaatatcaaaatttgtttattctgatcgtagaattatatttttgattattatttttactgtaagagaaaatatggaatgaacaaaaacataacaattgaaaggtatgtaaaggatatataaaactaaaagatatatgtataatacatcaatacctgaggcaaatatgataagtaagctaagcaggaatagaagtgaagtacttgtcctctccatactttcacctattctagttttcttctaaacttttctctctatgagaattgtatgttttggagtatttagttaatctatatataagcaagctaaacactttcaatgagacaaaacaagaaaaaaagaaagaaaaagaagatgaggacattactttaatgttcatgattaagttatcatgatttttttcatatacaaacatttttttcttaaaattgttaagtgttatgaccaataaagttccttcaattaccaaatcttttcatttgttaaaagagatagtatttaagagaagaagatacttaacatcactccatgaaatctatagtatttcaaattaatttacaaaatcgcatactgtctttttgcaagatttaattattattcttcttcattagttcatttacttattatttgaaacaaaaagaatacctttaaagatatattttttaaatattaaaagggaaacattaaagtttttttgttgttgctgtgtcatatacataatgtgtttcatcatttttcttttttctttctttttaatttctgcttgaaatacattttactagtaactctaaccacaaaatcaaaacataaaatgaagaaatttttggtattctatttagaaaattaacaacatcaaatatttttgaatcaaaaaaggatttgccagcttttggatggtattgtggattttgcccatttttgaatagtttgtagattttgctttttttcatgctaaataaatgtgatttaacatgcgttttattttttatgtttgagtttagtcagttgcaattgttcttaaggtttagtatttgatataaagtacataagtttgccaaaataaatcctacatacatatatttataagtgtaaaaatggaaaaactgtaaaattatagtaaaaatgacaatctgtaagggtttataggcttctacattggatttggatcggagttcgatttctaaaaagtgcactttattacgatgaatggtgcactgatattcggatattaaagagtgttgcatgcaatatcgtaagtaccgtggttatgggtaagaaaaaagacatttgcctcatatctcccaattataaaggtatttttagagcccctaaatattagaaatggtgtatcaaaatagttctgaagtaccctgtttttcgtgaataactatggttcaattccttttccttgttttattcataattttttttcttttaagactaacatgatttttaatatttgtttattcactttatttcttttaaaacagttggaacctgtttcagcgtttctaaatatttatgaatttaacatatactaatacatcttcatagtaactttatttataaataatgattgtgctgatttgataattaaaaaataagaaaacaactaaatttttagaaacatatctttgagattctatcagttagagtccaaaaaacataagattataagaatttagtaaaagcgttaataaaagtgaaagaaggaaaattatgtcttagttatattattgtttttattttcaataaatttttttttcttttgtcaaagtcaatgttttttttagtttaaaattgttttatttttaaaattttttttggataatctcctcatctcaactttaccttaaattccgataaatttgggcacggtatcgtttattatggatttgaatgttcgagccaaatatcgatcgttggtatggaccgtatggtgcaggtaaataaaaaattgagtattgtaggaaaagctgcacgtcatgaaatttttatagaattgttcataatgcttataagttataagtaaatctgaaaaattgatcattatatagaaaattatatatcaatatatatatatggtgataatagtctagttagaaaaaaaaaactatatcatattcaaaatagttatatcatgaataacaataagaaaattctgaaaatctcaattaagtaatccgtttatataggaagtttcaaatccaccaaacgcagataaacacaaaacacagaaataaattttataatagtaaaaaccgacaaaaatgctagtaatccaaattagtctatatacagagagataacacacttatacagagaagctcttacaaattgtgactctcaccagaaaaacacacaccaaacaaaacaaaacaaaaaacagagagatggaaaacggaaactcctccagcgacaacaaatcttcacataaaccgatccgatgcaaaggttagtgaagagagaagcttcccaaaactcattaagtatcttatcgtagttgactatatatgactactggcgttgactttatgtttctatgggcagcggcggttagtaggaaggctggagagccgttggtgatggaagaaatcatggtggcgccgccgcagcctttcgaggttcggattcgaatcatctgcaccgcgttatgtcacagtgacgtcactttctggaaactccaagtaagtgtactctttcgtcttcttcttctcttcttcgttttaggtttttacacaaaattagttttaatattttacgtaaaatccgcctgaaaccgatatgcctttttgtcgtatatatatcaaagacacaaatattgactcaaaacttgccttgggatgacccaaaaacgtaacttatgattaattctttattttctacgtaagtttcgaattcaaaatgttaacagactccgatggtcttgggaaaataaacgaaacagacatgttgcaatgtcaactattgccaggcatgttttttttgtttgccaattactgacatagacataaaactaagataaatattttattattgtagataatcggatttagttattttttatttgtggttgttgatacttaacagtcatatttataaattttagtatttagatttacaaaactggttttttattcgacgattttagataaggtccaacattatttgttaacgtgacacaacgtttgacccaataagttcgcggattgaccaaaaaatacttaacaaatctgaacttatgactaaatttttgatttgcaacgttggttcatttggtactcacaataattcttttaaaaaaaaaatgtccttggtaaaagaaacgaaacagactctaatgtccaatattgccaggcataattttgtttttttgccaataactaacatgacttataaaccaagatattatatttttatattggatatgaacttattgatttaacattttttaatttttttttgtggtcgttgatactgaagagtcagatttacaatttttttgtcatgtttcgacaggttcctccagcctgctttccgaggatactaggccacgaggcaatagggttaatctcatcctctaaattttatttttttatttttattaattatattgaatattaagacaagaagatatttttaacgttaggctgcaaaatatcttttacaaaatactccatcggttcctaaaataattgttttttttttaattttcacatcatatgttaaaaacaataactgttgagttatattaacaataacgttttttatattaaatttgtttaataactttaaaaactaattactttcaattcttaaacccaaaaaaaacaaatcaaattgcatgtaggttttatatggcttcattttctatataaaactgaaacgaaaatcaaaataataataaagcaaacaaaacaatgataaacagaaaaccgcaaaagtcaagttgaaagtagaatgttcactcctgtgcgggcctaaaattagaaaacgaaagatagtagtagaaaaagaaatttaatgtgaattcgcctaatcacaaacctcacgttggaggttacaacaaatgggtctaaaaaacatcgaactaataacttaaaagatttgtttgccagatttcattaactaaaatacataataaacctggataaatattaatgtacgtaagtgacatttgactatgtacagcgtagtggaaagtgttggtgaaaatgtgaaggaagtggtagaaggagacaccgtactaccaacgttcatgcctgactgtggtgactgtgttgattgcaaatctcacaaaagcaacttatgtagcaaatttcctttcaaggtatccccttggatgccaagatacgataattccagcagattcaccgacctcaatggcgaaactctctttcatttcttgaacgtctccagcttcagcgaatacacggttcttgatgtcgctaacgttgttaagattgattcttcgattcctcctagtcgtgcttgcctcctaagctgcggagtctccaccggtaaatcactaatattggaaaaacattattcaacgtttgttactctttgattttgatggagttagattcaaattttccttaggtgttggtgctgcttgggagaccgccaaagttgaaaaaggatcaaccgttgtgattttcggacttggttctatcggattagcggtaaaattacaattttcaattatgtcgtcttaataataagtcgtcttaatctaactagactcatgcacgtaactagactctttgtgtggtttttctgccccatgttttaattgttagaaacaacatttgaatcagggatgcatataatggaaacatggtttgtttggttgaataaggttttacattcattcaaaagtaaaataaaagtagtcgtctggttatgagttgatgagatggattagggtttgaatgtttctaggttgcagagggtgcgagactttgtggtgcctctagaatcattggtgtggatataaaccctaccaaattccaagttggttagtgattttctttattggatagtttttttgcttaaatctccataccttatatatatttttctatatattaaaaatgacttatataattgttttgaacatcaactttttgcaggccagaaatttggagttaccgagtttgtaaactctatgacatgtgagaaaaaccgtgttagcgaggtaatggcacataatataaatacgtcaacggaaatagagatataaataacttttgatatttttgtgtttaggtgatcaatgagatgactgatgggggagcggactattgcttcgaatgtgttggaagtagttctttggttcaagaagcttatgcttgctgtagacaggtaatgttgcattgatctctgcctaattaagaccaaataagaactaataagaaatagaaacacatcaaataagttcgaggattttaacttcttggttcaatcattgtttagggatggggaaagacaataactttaggggtggacaagccgggttcacaaatatgtttagattcgtttgatgttcttcaccatgggaagattctgatgggttcgttgtttggaggtttaaaggctaaaacacacattccaattcttcttaaacgctacttgagcaatgaacttgaattggataagtttgtgacacatgagatgaaattcgaggagatcaacgacgcattccagctacttcttgaagggaaatgcatcaggtgtgtcttatggatgggctaagtgaattgacttattttatctttccatcttttgcatcaatttcatatgtttcatgtttaactatttttattggtttgtaatcaaaacaagcaaatgccaaagtgacagcaaaataaaaagtcaatgaattgtaatgaaaataagcaaaggacaagaaattgttttttcatcttatggtacgtattgtaatttgtattttgttttgttaccaaatttgccacgtttaaaggaaaaaaggagtgtcaaagaagaagaatattttgaaagctatcaaaagataataattgtgtgtctaactaggaattttgtagaaaatcaataactaactgagataacacaacgttagaattaaattctatcaatgtttaatgaaaattttcagaagcaaatctccttgttcttatgataatatcaatttatctctatgttcctatgttttactgtagcttgagagtgtactggaacgtgtacacaatagccatgtttttttcatgatcgctgcgtcagcgatgcgcgacacaaaaatataagtaactggagactccaagtatgtggagagtaacaccgccaacactgtgaaagcagtcgcagcaacacctttttaccattccaacagtcattcttcttttcagcgacactcttttatcctcaacaatttctattgctttcgttgatgttgaaattttatggataaatattaatgtacgtaacaggaccaatcaaagatttatggatataacatatgagaaaagtcggttttttcatatatgatagtgttgaattcatacatttaggtttcacctgttctaaaacataacattttcccgttaaaaagcatagcgatacgtgaattgggcctaaaacttggacttataatttgggcttctttaaatggaccttttcaaatatatatttgattaaggtaaccatccttattttaaattctaaagataatcgattctggttgttaagaaaatcaatagaacaaaaaaaagagataacgaaccttcacgaatgttttgctatattttcttcattagaaaaaaaaactagataatatcatttgaatgttctgtttactaattatgaacaagtaaaacttaaaagatttgttgttatactatatctatcttataatttctctatttatagattaacacaacaaattgcgataacatttctcttgcctatataaatctgagctttattcatctttttacaacaaaacaagtttcaacagtcaattaaaagaaaattaagaatgagaactatatatctttctttgctagtgtttattattgtcttggctttgaatgaagttatggccaagaaacactcctcaacacctaaattaagaagaagtgattttccagaagattttatttttggagctgcaacgtcagcttaccaagtcgaaggagctgcccatgaagatggtagaggtccaagtatttgggatacattctctgagaaatatccggagaagataaaagatggtagcaatggatctattgcaagtgattcttaccatctttacaaggaagatgtgggtttactacatcaaattggtttcgatgcctatagattctccatctcgtggtcgaggatcttgccacgtgagaatctaaaaggaggaatcaaccaagctggtattgactattacaacaacttgatcaatgagcttttgtctaaaggaattaagccattcgccaccattttccattgggacacaccgcaaagccttgaagatgcttatggagggttccttggcgcggagattgtgaatgatttccgtgattatgcggatatttgtttcaagaattttggagatcgagtgaagcattggatgacattgaacgagccattaacagttgtgcaacaaggatatgttgctggtgtaatggctccaggaaggtgttcaaaattcacaaaccctaactgcaccgcgggaaatggagctaccgagccttatattgttggtcacaacctcattcttgcacatggagaagcagtcaaagtatacagagaaaaatataaggcatctcaaaaaggtcaagttggtatcgccttaaacgcgggttggaacttaccttattcagaatcagctgaagataggttagctgcggcaagagctatggccttcacattcgactatttcatggagccgcttgtaaccggtaaatacccgattgacatggtcaactacgtaaaaggcggtcgcttacctacatttactgcaaaacaatctaaaatgttgaagggatcatatgatttcattggcagaaattattactcatcttcttacgctaaggatgttccttgctcaagcgaaaacgttacattattctctgatccttgtgctagcgtcacaggtgaaagagaaggagtgcctatcggtccaaaggcagcatcagattggcttttgatatatccaaaaggaattcgtgatctccttctctatgcaaaatacaagttcaaggatcctgtcatgtacataaccgaaaatggtagagatgaagctagtaccggtaaaatcgaccttaaagatagtgagaggatcgattactacgctcaacatttgaagatggttcaagacgctatatcaattggagccaatgttaagggattctttgcatggtctttgctagataactttgaatgggcaacgggctacgcagtccgatttggactagtttacgtagatttcaacggtggacgtaagagatatcccaaaaaatcggcaaaatggtttaaaaagttattaaatgaaaagaaaaagaattgatgagacacgcatcattacattgcaacaaacatatgatgtccactaatggttttgtatgaacgttaagcgtgactaacttttttataacacatccaatagagtaaaaatatatccgttaaattagaataatgacatttcttatgctactttcaaagagatgcatgaaatgttttatcgattgttaatttttttttccaaagtaatgtaggtgttagtttcttaaaccaaacctgaaaaattgaatttaaaatacttcaaattatctaaaatttcccacaaaattccatactatcaaagaatacaaattagcttaactcatttacgaattacgatcgtaacattacttagtgaaattctagtagtaaattactttactagcttagtgaaaattctatatccaataccaactcgctattcaaattcaatataaatattgtatcatgttaattgctaataaaatgtcatatattataagatttctatattattgagaaatatacacatttctaaaaactaaatcaaattcaaggaacagtttgtgcatcgaagtactaaaccaagatgcgatttcttatcaacatctatgtactagaatctagtctactaaagaaaaaattcatacaattaaattgtctaaaccaaatgggtaagaactcattattaactgggactgtaatgaagcaaaactttttaataacgaaattaaagatggccaagctcgatccattaactgtgtaacttccaaagtaaagattgttattgacacaaacactaactgacttatggataccccaccataatcaacctccttccattgatgttgccccatttttaacatctcatagaaaaatcgtcatgttcttcttcttggcaaacaattcatattttatagcttaaagagtaatcaaatcctaagaaaaaaatagaaagattatttgatttaatttctttgcaggggctatgtttcactaacctttaataaaaatgaccaaaaataatgaaccaagataaacgaatgtaggtgagaatttaatcaaacgattatagtaaattagattagttctccatatttaaactgttgacttccaaagaatatacaagctttactctgcactcacaattggttacaatgttttacagattatgaaagtaatattatttaactattacatatttatgtggtagttggtagaatataaaattaagccatatggtagtaaaaaaattagataaaaaaattaaattatagataatatgaattttacttttgtgcaaaaaataaacaaaaagtattcttcaataaaacaaacataaaataaaataaagtagtgatgctcattattcctctattttcttggaatgggcaagcaaagatcttctacttggcaaggagagagatgtattcccccaaataccaatgaactccaaatccacacatctctagatgcatgtattaagagaatggaatcaaaatccttgggttatgccaataatatgttgaacaatctacacttgagttgatgcaatggatatgaatagtcctgatctccgtagacaagcacaatgttgcatcgtggttgttgattgttattcattccgaagcaaaacatatgattaatattgatacaatggtttacaaaattatgaccaaaatatttttatgtaccgactccttcttacctagaaaaaaagaatgataccaatataaattgaacaaaaagtatatgaataaatccaataaaaaaaatacagaataaaccaattgggacatgaagagtataaactctactcgcataagcattaatattgtatcatgatcgagtttaaatattaaatattatgtatatgatcaaaaattaaatattatgtattatagcaataaaagattaattacacagtttatgaatcgagtttgacttagtgaaaagtttagctttattactatcccagttaataattcgtaccaattcgatttaggcaatttaattgtatgaattctatagagaccatattttattgttacttttacacaaattaagatttaaactttttttttttttatatatctttcatcgaatggaagtctctcttccgtaggtaatgtggacattggggtttatttttctggcaatacaaaacacacaacactaaagcccacagtgtttgaagcaggcccaataagaagctctcttcaaatttttagactcttgcgtgtccgctagtatcacgactggatatgtgataacacacgtagacgaacctgaagcaatcactcaaactcaagacttctctttaatcctcctcccaaaaatctcagagaatcctccttcaattccaattcaaagctccttccttttttcacatctctcttcttcaaattcaatcatcataaaaatcgaatctttattcttcagagagcttcaatggcgaccacatcatcaaacccattactactttcttcaaatttcctcggttctcaaattataatctcagctccaacaccaaaaaccaccacaaagtctcttcctttctcagtaatctctcgaaaaagataccaaatttctcaatcggagaagctaatgaaatcgttaccatcacaagctgcgttagcagctctgttgttctcatcttcatctccacaagctttagcagttaacgaaccagttcaaccaccagcaccaaccattactgctgaagctcaatcaccaaatctgtcgacttttggtcaaaacgttttgatgacagcaccgaatccacaagctcaatcatcagatcttcctgatggaacacaatggcgatacagtgagtttctaaatgctgtgaagaaaggtaaagttgagagagtgaagtttagtaaagatggttctgttcttcagttaacagctgttgataatcgtcgtgctactgttattgttcctaatgatcctgatttgattgatatcttggcgatgaatggtgttgatatatctgtttctgaaggagaaggtggaaatgggttgtttgatttcattggtaatttgctttttcctttgttggcttttggagggttgttttatctctttagaggaggtcaaggaggtgctggtggtcctggaggtttaggaggtcctatggatttcggaagatcgaaatcgaagtttcaggaagtgcctgaaaccggtgtgacatttggtgatgttgctggagctgatcaagctaagcttgagttacaagaagttgttgatttcttgaagaatcctgataagtatactgcgttaggtgctaagattcctaaaggttgtttgttggttggtccaccgggtacggggaagacgcttttggctagagctgtggctggagaagctggagtgccgttcttttcgtgtgctgcttcggagtttgttgagctttttgttggtgtgggtgcttctagagttagggatttatttgagaaggcgaaatcgaaagctccttgtattgtgtttattgatgagattgatgctgttggtagacaaagaggagctgggatgggtggtggaaatgatgagagggaacagactattaatcagcttttgactgagatggatgggttttctggtaactctggtgtcattgtgttggctgccactaatagaccggatgttcttgactccgcgttgctgagacctggtagatttgaccggcaagtcacagtggataggcctgatgtagccggaagagttcagatccttaaggtttcttcttgctttcattttctgttagagtgaaacaatggagacagtgtggtgaataatgttgtgtggtttattgcaggtgcattctagaggaaaagctattgggaaggatgttgattacgaaaaagttgcgaggagaactccgggtttcactggtgctgatttgcagaacctgatgaatgaagctgcgattcttgctgctagacgtgagcttaaggagataagcaaggatgaaatatctgatgctcttgagaggatcattgctggacctgaaaagaagaacgctgttgtctctgaggagaagaaaagacttgttgcttaccatggttagatactactgatcctagctacttcttgtgttattattgtgttgaccactcactgttcaataaaattgtaatttgcagaggctgggcatgctttagttggtgcacttatgccggagtatgatccagtggccaagatatcgattattccacgtggccaagctggtgggctcacctttttcgctcctagcgaagagaggctagagtccggattgtatagcagaagctaccttgagaaccaaatggctgttgcacttggtggaaggtagtttacaactgaaactgtactggttttgatttacaagagtagtcttcgagtgttaaacaatgtttattgtgtttcacctatggtagggttgcagaagaggtgatctttggagacgagaatgtgacaaccggagcatcaaatgatttcatgcaagtgtcgcgggtggctcgccaaatggttgagagattcgggttcagcaaaaagattggacaagttgcagttggtggagcaggaggaaaccctttcttgggtcaaagtgtaagtatataaaactcgatactcaggttttcataatttattgtgttgtttccagctctcaaaacatgttttgtttgcagatgtcatcgcagaaggattactcgatggcaacagcggatgtggttgatgcggaagtgagagagctcgttgagaaggcgtacgtgagagcgaaagagatcataacaacacaaattgatatcctacacaagcttgcacagctccttattgagaaagaaactgtggatggagaagagttcatgagtcttttcattgacggacaagccgagttatatgtttcttaaaatcaactaattggcttgtaataataccaattagcttcgatctatacatactgtatgttaatatacattgacatgttcagagacttttctttttctttttctttgctgccgctttcgattcccaaaatagtgaaaatactctcatcgttccgacacaagtctatatatgcaaacaaatgcattcttattattctggaaaatttagtttaaacacacaaataaacctgaacggctgaacataacagtgaaaacaaacaaagcggaaaccaaaagacttaaaaacaaattcttgaaattgaaataccttagctctatcagactcagacgttacgcatttcttgtcatctcgtctagcattagatttctttgtcaaggtgccctctcacctttctcttttggccaatgctaatttccaaatgtaatttgccagacaatcaagagtacaacaactttcgtatctgcctatctgcttgaataccaaagtctgtgcacaaagaagattacattgagagcaaagtggccgagtgttaccatcatttcgagcaatttcaacttcatatctaccagaaaccaatttgaagatgtagtggggcttcatgtacatatctttcccttgtaaacagttgacatggagagtgatgctgcaaaattcacatgtataaaaccatttgcttgcatctaattttgattcacatatctcacaccaatattggccacttgttgtatcttcatcaccgtagcatagggtgagtggatgcctatcgtatttgtagtgtgccttagtaggcaaagtagcacatctaatacccaaaaaagaagtgcatttaatgcattctaggtaataggatgaacaataatcacttgaacaccccatgcatttaccttccgtcaaattgaaaaagagatcatgtggatgacaaccatgaatgaaaggatctggaagagaagcgcagttgacgtctacgagaaatgtacaatcttgttcaccgcatttgtacacaaaaccacaaccaattcggctgcaaccatcacatatgaatatgttgcttgccgagtggtacagatgaccgaacccggagatccgaccaagtgggaaagcgtggagcgtaagtgggtgtttatgtaatgggtggtattttttgcgaggaagaaatgcacatgcttcatcgagaacaaaatcacacttcatacaaccataatatctctgagagatcattactggaagggtgcatgcctcacataccttgtctttctcacaaatattgttcttttcataaagctttagataatgctcatggctgaaatgttgaattgtctcctcatcaatcctaacaaatgactccatatattcctcgggttcttcaggcactccttcaagatcttttccatcccaaacctcttttctcgttgcacattttgaatggacagcataatgacatcccttattacaagagtattgcccgttgttgacgtcgatggtttggcgacagactccacataagaaatcaccaggttgaagggataaactgaaagagagacggtgtgggtgtcgggtgatcttaatgacacgaggtagatagatacatgatctgtggaccatgtggctgcaagggagacaagcgtaaacaagatcatcggtctcgcttagagacaagccacatgcatcacaaggaaaaggaagtcgtatagggaagagggtgagggtgtgctcatgacttttgatgtgtgagatagtgggaggtggtggtctcatcgagcaagtcgcattaagatagaacttgcagatagaacaatgataatataccttttgtagtggaacctgacaacatttgcatttcaggtgatttccatcagataaacaggcactatcaccataatcatcatcaccatcaccatcattgtcattactaacaccactagcgacggcattactgttgacgctttcttcgtagtcatcatcaactttgtataccaattcatttttagaggcatcatcatcgttgttgatgctgagttccaaagcccatgtcgaataatcattattgtggtcatcatcatcatcatcatcatcatcatcctcatcctcatcatcctcatcctcatcctcatcatcatcatcttcatcatcttcatcatcaacaacaacatcatcatcatcatcatcatcatcatcatcatcatcaacaacatcatcatcgttatcatcatcatcatcatcatcatcatcatcatcatcattattattattatcgtcattactattagcctcaacattattgttgacatcgtcttcgtagacaacattattgttgacgtcgtcttcgtagtccttatcaaattcgtgtaccgcttcttcacgagtagaagcaccattggataaagagtcaccatcaccatcatcagcagcaacatcactattgttgtcgtcgtcttcacaatcatcatcaacttcatatatcgattcttctgtagaggacttgtctttccagtttcggggtgaaaaatcaaaagtcggatctacggaaatgagagttagagggtgagaggggtgaaaaatgtgttttatctccggtggaaagacgtgacaacctctgtggaattccaatttgcatgtaacacagtagtaatagtacctactgtcttccatatccttgcctttgcacgaaaagcacatagaaagtcgaggatgagaacggtatccacgccggcaaagcttgtgcggctgagccggatcggacagacgacatttgggtttagatgtagaaaaaaagggaggaggtgtgtcttccatatcattgcctttgctcgaggagcatccaagccggaaaaggttgagcggctgagccggatcggacagacgacatttgggtttagatctagaaaaaaaaggagaaggtgcttccatatgggtttcttttggaattaaagaagcagcaaatgaaaggttttcaactcataaatctttttgctcccaaatatgtctttatataataaagaaattttcaccgtggacacctttctgactttttctttcatagaaagacaaagtgggctggcccaaccaggttttagccactcagccaaaaatatacaaatttgccctggaacgagaaatgaaaggaggcggttcagtttcgtttctttatttttctggttaccaaaatttaaatttaaaattaaatcaaaaatacgttattaactttctgacaaccaaaggaaatcaaaaactgtttgtcgaagacgaagaacaattccgacgaaaaacaaactccgatcgaaagtgaaatttcgattgaggctctgtgcgagttctagtcgttgcttaagttgaagaaatttcgatcgagctcgtggtaaaggataacaaaaagaggattttctggtttcttgaattattgttcatactcaaatggcggagatgaagaagagtagtcggcagcgaggagtttcggatgttaatgagttaacgagcggctgcaaaattagggttgcagaggttgaagacgagtgcaaaattacaattatacccttcattataaaaaaatgtacgtatatgtaatttacggtatacgtacacacattactaccgtgtacgtacacattactaccgtgtacgtacacattactaccgtgtacgtacacattactaccgtgtacgtacacattactaccgtgtacgtacacattactaccgtgtacgtacacattactaccgtgtacgtatatattattaccgttacgcacatatatttatatgatattgctaatcgtgaattgtcttcaaatgataataaataaaatattatttaaaatagaaataaacatgttagattttgttttattgtaaagtcggcaaacaaaatatttattgagtttgtacattagaaacctttggttattttgattagataaaatatcttttggggttttctccataaatctattcatatataataattaaataaaaatatatggtcaaagtatagttgtttctcttacttttgaaaaatgttatgtacgtacatgataataatgtacgtacatctttgttagtgagttaaaattgttgagaataaacaagattttaaactaaacccttaaacataaacgataatattgagatacacgtacacgtatacaactttaaaatgagtttaaaaattctctaaccattgtttacgaaaaaattttaattttatttttttgacatcaagattaagttattatgtaagttatatgtatgctgtatattttaatatagattatgcatatataatatttcaacgaatcgtactctcattcatgtaaaaccgatcttccaatactaaattgcacaccattacaattcatttcgcatctaccatgcctatatgtattcgtgtacgtaaaacattcatctttacataattcaccagatacataattagtagtgtacgtacatattctttgataaatgtacgagtgtacgttaacttcgattttataattgtaatttgggtaattgaaatataaaagtctaaatataatttatgttaagtatataactatattttgaatacccattcggttctcaatttgctttggataattttgggtttacaaatacaaaaagaatctccaacaaaacaatttatgaacccagaaatttgtaaaaacgtatcattactttcatatcacgttctcaagtgtaattaataggattaacacgaatttcttacccagaacacagattgtctctccttcaatccttcaaactttgtaaaacaacaactgaaaactttagattcttcaccgtaacacaatttcgatattcgtttttttcccagaattctaatctcaattatgtaaatatcttacaatataatctctattataataggtaatcatgagttttagtcttgtcaaaactttttagcattaaaaacttctgagcccaaccaatttttaaaatttttaattccaatttcaagtgtcaaattcgccgaaacccagaaaacatttaatgcatttctcgtcgatgaacagtgtacgtacaaatccggttctcttggattccaacgatgcggtccgtacgtacaaaccgggttcagtttcgtcaggggccttttggttagtttttggctgaatgactaagaattgaaaggtccagcccacagtatcaaaatctgaaattaaaagtggatcaatggctactgtgtgtaatttaccctacttaatatctagcaagatttaagaccagttccaatataaagtcaactactttttcctactgttaagtacaggttttttaattcatgttggctgactaaattggacagctatcatctacacattaaaaatttaaaataatccccactacagtctacagcagctccgattatagttcaatgcaaaatcttgttattacgatcatatatattagtttttaaatattttaaaggtatagttaaattcgtcaatgttttttttaatatattattaataaacttttgaaaattttatggtgataacggcatgttattttgcgtaatatttttaacttaataatatttcttttgtatttttttgtttttttgagattcgttttgcaaattgatgaaaagttttccaaaactgaaaacagttccattaggtgaaattcgaataattttgtggggcagtaggaaaatattttatgacatctaactcagaaagataattgtatattttgttccactaaatgcaaagaatttatttagttcataatgaaatcgggtaatttattaattaggaacgaccatattgatataagatgtgcaactaaacattaaaaaagaccatataaaaagttgtttgttttgtttaaaaaatgacttgagctgtttgtcccattgtattagagaaatagacttaagaactagagatctggtcattttaaatcaataaggaaactccaacaaactagtttgtccatatatatacattttacagtgtttttgttgttaatatatgaaatatgatttttaataatttaattcaaatagatcaaggtttacgctgtttaattttatttgaatcttgaataattttaataggttagattatttatctggttttgtgttcggatcctgaataattaattcttaaaaaaagttactatttctaaaaaaattaaaaataaaattaattatttaattactaaatttaatatatataataccttttagtaaaccatatttgtcattttcgggctttttggcgcagttaaagatccactactaaattaaaaacttatggatttgaatttaacatttttaatttcctttgaggaaaaaaaaagaaaagaaaaatgtgaatttgaagttttgaactacatatggcgaagcccacttggtcgtcgatcaatggaaacacgagtttttgcccacatctcaatattcactctataaaatattctaaacatttgcctacttgattgtcaaaaaaaaaaaaaaaacatttgcctacttaacgtgttcgtcttcagatcatggcacgtgggaggcaagtaaacgtgtctgaagaccacttttgatacaaatagaccaacaacagtgtcgacatcaagacaaagtgacaatggagaaagaacccaagcaagagccagaggaagggagagataagtacgagccacatcagcaccagccaccgtatatctcgcagatgcagccagtgacgcacgaagcctacggtggtggcctctacggtcaggacgacgaaaaagagaccacaaatttagagaaagaggccaagaatatagagaaagaacctcagcagcaaagaccaccggccagtgatacacagagcgcagatgggcctgacgaggtaaagacgttgacaccaaaacacaagcaaccagcttcttcgggtgatagagacgttgacataactggccagtcttacattcaatgaaggtgttgtaatgtctttttagtttcctatcattgtgtttttcttagaagcaagtttttttgttctgtttttgtcaagaaagcgtacttcggctaatcaacgaacaaatttggtgtatgtaaagctgacggcaaaaaagattgtgattccatgaaatataacctgattactagtgagagtatcttaattcttaaacaagaaactgatttctagagcgtcttaagctagaaaatctgttcttgcattcatattgcactgcttaaaggcctacaagtttggtgtctaatcagtggtaagcagtaagcaataagcactagtggtatttggaagatgggtaacatttggagaaagagcacatcaatacaaccaaaaagactaatatactacaaacttagagataaccagaaatcaatctgacaatttggaagggtttaaaaccattgacagtgaatgtattattattaccacaaatttgaagttatcacgtcttacaacatacttgtgtcttttttagatgtaacatggttgatatgagtttatgtaggtgtccaaatcaacaacactccttcagcttagctccttcgattggcctggaccagatagaaaaagcaaataaacaatgaagctcgtgtataccaatcgaagaatagaatcataatcagattaggacaatgcgcaaacgatcatgaaaatagacatgtcagaggttcattggaaaactgcatattgtctacctcaagttaccatgtgagttatttattatataaaacaattgaatggaatgtttggcgactttactgttcagtattaatagcaacttattcagagttatcaatcatgttccaatagagacaagggggtgtctcaatgggaggaagcaaaggttccatgtctttctaagaccttctcattacacaaacgattaggaaagatcaaaacacatttcagtggaagaagaatgataatagagaatctttttaaccaaccaatctatttcattacgagcaatcatatcttctttgtactaaaggagcctcaacatatctatctatgcttaggatactgtggaacaaaatcaaaatccttaaaagcttcaattttgtataacaatggattttgatgggtccaactaaagctttagagttctacttttcacaggtctgcaactaactacaacctctgaatttgctaaagtttctgaaaaaccaaaaactttaaggaaacacattggtcagctattcacttatggcgtctcttaaggtttagcaactaggctattccaaaacattataattaaaggtttggattctccttaagggtttacttactacaaaatcaaacaataacaagcttcagtttttaataacaatggcttttcaaggttccaaaattccaattaaatctccaaattctgcaatcacagggtccacaactaacaacaacatctcaattccgcaaaatcttcagaaaaatcaaaatcttaagccaaaaataaagctccatactcaaacaaatcacataccacaaaaaccgaaagataatcaatcgtaatcgcaaacaataagaaagatgtaaaacctagttgtagtaaagctcaagacccatgccgtcatggatctcatagtccttgagagtgatgtgatccttgtagatgttgtaccacttctgaattctgatcttctcggctcgtgttccggtttgtgccgcgacaagcttcttcagatcaccgatcgtgtcatcatcgttacacttcaccctaacttttttccctaaacgatcgttgagaaccacctcgatcatcttcttcgctcgaaaactacaattgcgaaccctagcccccaattttctattcctccggaaaagtaaagtacgggaagattctacgcgttaaggctcgttgtgacttttatttataaacttttttttggtcgtacttatgtcggtttgagaattggtaatagatttatttaatttctagaaccttatctatattttaatagattttacctttttttttgtcggctaatagattttactttaattttgtgaattatcaattttggcttcctattttctccatatatagactttgtattaaaattatttttttgtttatatttgaaagtttgtgcaaaaaaaaaaaagtttatatttgaaaccttattattaaaaccttgtgattgtgatttttttaatttttttatcatcttgaattctctcagcaaacttaaaaataacaacaattttatcctatcaaagaaagagccgacctctcaaaataagatacatcttaattgtgattattgatgctagcaaactcaaaaataacaacaattttatcctatcaagaaaagagccgacctctcaaaagtaacaaaagcaaaaaccaaaaatttacatagtgtctgattggtaaccaaaagctgtacaagttttttagctgttagctttatttgaatagtgcaaagctgttagaaagagttgtacaaaaaagctgagagtaaactttttataacacttttaataaagtttttgttattggtaactgtgaaagttgtacaaaattatataaagctgtattgtgttaccattcaaactcataatctgatatgtaaaattacaataaatatgccaccaatttacgtctaaataaaattctacaaaacgctatcaaatcactaccaaatatgcaaatcaaagacaaggagcgaagcttaactactcgaaaaaaatctgtctcacgaacaagaacaccatcaaatcgaaccaactatcattcaccgccatatcaactccggataggaaaacatgtaaactttaacatcgacttgagacaaatcaaaacaactagaacaatctagaggaaaattgaagttgaaccaagaaaaaaagtgctaacataaagatgaaagcttgacggatactaacgagagatcacctcgaaaaatatggtctattttttcaagaaagatggtgttgttgtatgaaaatacgggagctatttgacttcttgtgtatatccacttactttgaaccgtatcacaggtttaaaagtaataattcgtaagtttgaaaaaaaaaatctcatttagctaacattaaagaaaatttaaacgttgatttaaaacgctttaacatgtttccataaattggattaacaaaaattgcaacgttttcaaaacagatcgacgacgttttaaaaaaaaacaagattttatttaaacctttcaatttttgtataaattaagtataacatcaatataaattataggattaacttttcatcgttaattttttttttaaaaacataaatatcataatgtcattaaaaagtaaaaatatctaaaaattcattggtttaaaattataaaaaaatatttcatatataaaatgaaaattattaaataattaaacaagaattatttttaaatatatgtaataactctataaaatcaagaaaaaagaaaagaaaacaaaaaaactataaaatcaattttctcggaacaaaagatgtagttacataggatcagaacaagggaaagatattgatcaacccgtgtagaatatacaatatggttaactcttacaatcacttaatcggttttaccattacaaattttaaacacataaattattatcctctgagaagttggcgtgtgtgctcaaaaaggaaataaacaaaaattgcagaaattactgaactagagatagaatgaaacaataacaacaaccacaaacgaaacagctaaagaaaacgataattaaaaaaaaaaaaaaaaagcttacgaacgccattggagaagagcacgaaaaagaagaagaagactatgcttctcttgcaacaaccaccactggtttcaactagatttcactctctctacttcctcactcaccaccaccaccaccaccaccgcttcttccaaccaccaatctcagctttctctgcaacaacctctgcttctttaccttcaccatctccatcttcttcttcttcttacttctcctcatggaatggtttagatacaaatgaagaagaagacaatgaattctcctccgaggttcaccgtcgctacgacttctctccactcctaaaattcctctcaagattcggaccagtcgagttagctctagattcggaatcggaatcagaagcttcaccggaatcgcttaatccggtagagttcgatctcgtcgagtcatacagagcagtaccagcaccatactggcactctctgataaaatcgttaacctcatcaacatcatctcttggtttagcttacgctgtagtgtcatggctacaaaaacataacctctgtttctcctacgagcttctttactcgattctcatccacgcgcttggccgttccgagaagctttacgaggcgtttcttctctctcagaaacaaacgttaacaccattgacatacaatgccttgattggtgcttgtgctcggaacaacgatatcgaaaaagctcttaatttgatcgctaagatgcgtcaagacggttatcaatccgattttgttaactatagtttggttattcagtcgttgactcgtagcaataagattgattctgttatgttgttgagattgtataaagagattgaaagagataagcttgagcttgatgtgcagttagttaatgatattattatgggttttgctaagtctggtgatccttctaaggctttgcagcttcttggtatggctcaagcgacgggtttgagtgcgaaaaccgctactcttgtatcgattatctctgcgttggcggattcagggaggactttggaggctgaagctttgtttgaggagttgagacagagtgggattaagcctagaacgagagcttacaatgcgttgcttaaagggtatgtgaagacgggtcctttgaaagacgcagagtcaatggtttctgagatggagaagcgaggtgtttcgcctgatgaacatacgtatagtctgcttatcgatgcgtatgttaatgcaggtagatgggaaagtgcgagaattgtgttgaaagagatggaagctggtgatgtacagcctaattcttttgttttcagtagactcttagctggttttcgcgatagaggtgaatggcagaagacatttcaagttcttaaagagatgaagagtatcggtgttaagcccgatagacagttttataacgtggtgatcgatacctttgggaagtttaattgtcttgatcatgccatgacgactttcgatagaatgttaagcgaaggtattgaaccagatagggtgacttggaatacgcttattgattgtcattgtaagcatggtcggcatatcgtagcggaagagatgttcgaggcgatggagaggcgagggtgtttgccttgtgctacaacttataacattatgatcaatagttatggtgatcaagaaagatgggatgatatgaaaagattgttgggaaagatgaagagccaaggtatcctgcctaatgttgtgacacacactacacttgtcgacgtttatggcaaatcgggtaggtttaatgatgcgatagagtgcttggaagagatgaagtcggttgggttgaaaccatcatcgaccatgtacaatgccctcatcaatgcatatgcacaaagggtaccatgactgttaatagtatcagttacagatccctaagagaattatcatttgatactgatagttgaatgattctttcttgccagggtttatcggaacaagctgtgaatgcatttagagtgatgacatcggatggactaaagccgagtttattggctctcaattcgctcatcaatgcctttggtgaggatagaagagacgctgaagcctttgccgtgttacagtacatgaaagaaaatgtaataacttctcttggctaaaaccttgaacacatcttaaagaactacttactgaccaaccatcatctctcacaaaacatttgcagggcgtaaaaccagacgtggtcacttacacaacactcatgaaagctctcattcgtgttgataagtttcagaaggtatgcatcattgattatggttgataggggaatacctgtaagtaggattgaccttttgagatgtgatggttttacaggtaccggttgtttacgaggagatgatcatgtcaggatgcaaaccagatagaaaagctagatccatgttacggtcagctctaagatacatgaagcagacgttaagagcctcatagaaacatagggaaacaatgcaaaggttttatcttgagctaaagtgatcaaatatttctcgagcttctgatatcgtctcgcaagctcaggaccgatatgtaaacgacacaaaccacacatcacaagaggaagtctttcatacaaatccgcacattctctgtctatgtaaagattcaacctgtacaaatatataagtgtgttgaccaaattggatacggttactgtctgtactacagagatcatgtaggaagttataaaccaaagctcctttacttaagaatatatcacaaatccaaagaattatgttgtcttttcatgagacacaacatttctaaaatgaggaatacaagtttcgcaaccaaaagaattactaacttacaagggttaattaaatgagagcttcctccattagtttcatggcaagacaggcatggagtttctactatacttgctcttcgctatcctggaacagaacatgaacatcagaagtactgaagacaacaagaagagcctgaagtaagtttttatctcttgcattccgacatcgatcacttccatgtttttcccatatctgttcttcctttccaccaagtagccatccaaatactcgtctatagacacccatttgtctgcagctttggaagtgtttccgtctaagtggagcggtcccagttggaaaatcgtgaagaatgcagcagaccagtcattaagaactctctgagtaacagcagcgagccaagttgtgagttttattttcctttttatgggtatatattcgaaagaaattgatacaattcaaaaacatagtaccttgaaattgggtagatcaacagggttgaacattttaaagcaatctcttgaagcagtttggttgtccccatagatctggcaatgatagcaacggttataagaatatgtgacacaggttttcatgaaagtgtcgagagtaggtaacttcagtcacacaaacctcaaaggtgaatgccatgggtgcctttacaacatcatagatataatctgtagctgtaccatgtgccaaatacctaaagttgagaaagccgattagaaaaaggacaaagaaaaacattctgaagggaatatgccaactttcgagtctcaaacaatgctcagatacaagtgaaacaagttaaacgatgtagcacttaagttcactgaaaatattcataagaaatctttaggaaagagacaaacccaacagagccgccgccagatccaatcatgcagcggtcgtgacaatgaaatttgttaagtttttcaagtaaggtcctcattttctgtgaaggtaatccctctggggttatgtttttgtggtcatacggcataaataaagcctgaaaacataagaaatgagaatcaagcttctgaacaaatacataacaaagccaagatcaagataagtttgttacacaatttacaaaatgtaaacatccgtaaatccactattcacatgtttactcatactccaacagaagtttaaagctgtattcccaacattgtatgtatacatgataatactaaagcagaagagaaacattacctccattccagaatgcacatttatccatatgtgaggatcaaatgatatggctagcttccgcattatttgagtttcgggctcactaaacggagcagttcctggattctcttcagatggatcataatcctggaaacgccgagaacaaaacaaggacaaaggttcgtgacacattaacaagggatattgaagggaaaggaaagtgcagtgaggtgaagaagtaccttttctttcttgccccagtcaacaccccaatttcggttcaggtcaactcctcttcctgtgatttacagatatgttaaaagataaaatacaaaacaaaacacagtcataatcatgtaatggagactcaaatatggttaccatttcttcgttcacaaagatctccagattcaacacgtttgcgaccattcgggttttctataggaaccatctgacaaataatagcagtattttatgagtaagtgaatttatcaaacaccacaaaggtgaaaataagactgcagggatcagactcacttacttttatgactagtttgtctaatgtgtttttcaggattcctccgtttttatttggtaagaactgttcttcgctcaaaattgacaaaatccgaaaagcaagttcagaggtgataagctctctcccatgctgaccaaaagtctggaagaaaaggaatcatctgtcaaaaaaacaggtattaccaaaactatgaagaaacttcacctataaaaaagtattacaagttaaaccagaagacgggatttgtcaatttatttgatattcctgtgaatagcttagacagagctgtgaagggaacttacaagaagaatcctaaagtttgatctgtcatcactctctttaccaccgcgacaataagttaccacattgacctctgcattgtagcctttgtttcccgatttaatcaactcaatctgtgaaacaaatattcactcagtctgagctaaaaatacaagaacctaaacacgaaactaaaatagcactaaccgagagcttatctggatgtcgatgtaccaaagaatgtatctgctccattaaatcatcactgcaacggacatagaagacgatgatgataagaacagagaaatgaatttttcttccttatctattgaatcaagaactttaactatcttgaagatctcttaactctcctctagccaaaagactctcactttaccaaaatggtcaaagacccttttattctaatcctacctctcctatgtatgttaaagaccccagtggcccgtaacaatgtgaagttgcatttggaaaaacagatttcttcggtacttgtcatattatgaaaggtgaaacaaacctaaaaaccgaactaagtagaaatttccaaaatcttcacaaagctagagacaaatactctgatatctgaaaattgacctggagtggtaga

SEQ ID NO: 814 - DNA, 85791 bp, Arabidopsis thaliana
gatcccagttaatgggagtaacaaaagacgagtcagaaggattagtttcgccgagaacgagtaacaacaacaatggtgagaggaggaagaccgcgtaagagattagcgggaagtgatgccgccgacgcatggccgcgtcgagagagaggaagggacgagagaaatgggaagaaacgaatctcttcttcttcttcttcttcaagattggttgatgcttcgtagggtttgtatgatgtcatatctcatgtcttcttcttcaatggaatcgaacacaaagaaatagagaaatggatcttaatggagtttgagtcggaagagattggccagatcgggcttgtgtctgtgtgtcatccggttttgtctttttatctacttttcttcgctaatcaaatgatcaaagcaacttgtactctctacgctaattattactcttattataatgggcaaaaattcttctttttggcaacaatttataattgcatttttaaataataggttcacctttttattcatactccacctaattacaaatcaaacttatttaactataaaattaatttaccgttaaagaaaattatttattggttatagatttacaaaatagtcagaatttagattttataattaaataaaattaaatatcagttaaagtttataaacggatttagcttttacaactaaacaagattaaatatttgtttcgatttataaaaaaattagatttacaattaaacgaggttaaaatgtcggtttagatttagaaagaacggatagtatttagatttcacaattaaacgaaattaaatatcggtttggatttacaaaagagaattagggtttaaattttgcaattataagcagctgttctaagttgttgtcttacaaaattaacaatattattaattttgacggttctaaatgtttttttctgtttttggtcaaaaaaatatatgaaaaaatattatgtggtgccaattttgagatcggagcaaaaatgacaaaagataaagagaaaaaaatgaattgttgagtcgttgtatgcaacaagttgatatatcaaccttaccaaaaaaaacaagttgatatatcaaaaggggatactattggggatagagtagaatctcttgtgatatattttgtgacagagttatgtcctataatttagggattcgagtttattttatacgatgactctcttgtataaatatcacactttgtgaatcaataaactcaagttagtgcaatacctaattctacagatacttttgacaaattttcacatcataactctaccatagttttttcgttttggcaaacattctaccacagttttagacatgatatttccaacaagttaatttaaagctatcgagttatttctatcaatttttctaggggttattgttgttatgctgtaggacaatgaataatgagagactctttatgcagaaagacagataaaagtatttaagattttgcctttgtaagaaaatgagagtgataaacaaaccgtttcataaaagttggtaacaatagaagacagacattcaaaagtaggaaaatgaaaaaccaaagacccttaactgcacaaacactttgactagattcttcaccttctgctcaaactttactatataaaaaacttctgactaaactcattttacatatgcgtagaagaaccaagaaaagaagaaaataggaagttgtgttttcaccaaacttgaaaagaagagaaataagcaagatacaactggagagtttttgtttttgcagatttggggaagttggtttgctagcagctggctttgaccatcaaacttgttcgagaaggaaaaactatgaagtgtgtcctccacgtttgccttcaacaaccttgtgactcgtgtaatggtacactaggtataaagagttgttgtcttttgcagattctttatgttccagattgattcaagttttctcttgatatggtctggaatcaacttgttgactagttcaagtgaggctccagctacttcttgtttgaagttgaagagaggtgggaaaggccttccatttagttaacgagcgtttggttctctcagttcatgaaagaacggatgtgcacaagctccgagctgtaatccgaggaaacaaaacaaaatattaagcattcagttggattcttagagactgaagaaacctcacagagcaatgcttacctctgtggatctaagacttggagagtattgaagcagcctcgattttatatattgatgtgtgaagtggaagctgaaaaacgagaatggtatgtaaaaggaaaaagatacaacccttgtaccacggatgtgcctttatctgcggaaacctaaaatctgtgtaatgtggatttcttctcgagttggtataccaagaacctgtttacaacaacttcatacagtgaggattttgtagccaaagaatgtaatttgcaaggaatcattgtttaaagattcttacttttataatttcagcaagaacacaaccagatatcaatagaagttgtgtactgatcattttttcgtctaactttaatgaagatggcaaggacaatagctggcttgtgaatagtgagaaaatctttatgcagaaagacaacatttcattctttgtaacaaaataagtcattagcaaaatatttcataagacttggtaataatagaagccaaacattcaaaagaaaaacccaagaccccttaaactgcagaaactgcagagcttccttttatgaaacgaaacactttgactagattcttttagaaacaacattcaagaacttgaaacaatcatcgtattgaaattacaatcaactaatatctcgagtttgtgatacaataatgaaactcgtgactaaatctctgcagctaactaagtcatgatcatatctgctgatgcaagaagcatcttcatgcgactctcttccttaaatcttgctctctctttaatcctttgaacctccttctgaatcttctcactccccatctcgtctttctccatcttcactaatctctccccactgatctcaccaattaacactttcctcctcaaatctggattgttactatctcccatgttgaacagaatcgacctgtactttgctttttgaggtcccatgaaacaaccttatttctcaaacattgcagattccacagatacagccacaacccaaggatcacaaacagtcatgactcgtctcttcatctccgtgtcaacaacctcagtagcgactttagccaaagatgattgaagaatctcatgcactttatctcgttttgaatctccagtcttcttcatcgttgaatgcgtcggaatcttcaccggagtttctctatcacgactcttttctctacctgaagcataatgaatcttcatccaaagatcccgaagaatccttccttccgatcgaattttagggtttttgtgatcaatgaagaatcccaaacccttccccatggaggttttgcagaccacgtcacaaacaagtgacttaggtgcttccttcaaacgattcatagcatcgacaaacctcaatacctctggagaactctcagcacctttcacagacttagccgctctaagtgctgcctcgaacaactccaagaactctcgcctctgcatcgttctctgtttgatctctcggtaataactagggtttcaaaagcaacgaaagaggagagaaattagtaattgttggaatggtctctcgatctccctgatgtggttatataaagactataagagagatagactctaatccaagaccaggtaggttttgttagttgcacatacttttacttgctatcaaagcctgcccgaagtttccttttttcgtctctgtttgtatatattttccttttttcttcagaatataataaagtcattaattttgttttcgttttaaaaatccagtaagtaattcaatatctgaattatatatatatttgtaattttcattatttaagaattttttcaaatcttaaatcatataaatacataaatcatatttccatgacagataaaaaaatttcacatatttttataagtagcagataaaaatcattattttgtaatgatgcgtgcaattaaattcagtgaaaaattaatacaaatatttatgcttaaagcaaaaccatgtatccaattcataagcgtgagaaagaagctcctcgttgaaagggtatcactttggttacattcttcaccttctgctcaaactttactatatagaaaacttatgactaaactcatttacatatgttcatagagtgatttttaaagacattatataggataagacatgtaatttgacttgctatgggtttgtcatcatgacaacaatcgaatgcgattgaaaataaattttagttttttgacgagatacaaccacagagtacgtgctagtacattgcttgatcaaattgggtaaataacaggataataatgatagaaaaaatatatatatagcatggtgctttgttatcttgccaagaacaagatggcctatcatgatgatatttatctccactttataatttccctaaaagccattaatttactaattaaattacaaattagtgttgagtgttgaccaattgaccaatttaagactttgaacatttgactaaactaagtttagtatgtgatttctcctagcaaaaaaaaaaggtttagtatgtgatttgttggactttatgaaataaccagattaaaatgtaatgggtaaatcccacaccaacaaacagtgataattctcaagtaaacataatttgaaatttgactccatttaaaattgttagaaaataattatttttgtgttagaattctagctagttagacactttggaaaaaactagtaattacaaattaatgttaaatttgaccatttaaccaaatttaaaagttgaccatttgactaattcaagtttaatatgtgaagttttttttttataactttatgcaagatccgacatcaacaaacaaacaacgttagttatttaacataattttaacttgactccattaaaaaatttgttaggaaatagtataaattttagtgatagtatgagctgtttatgcactttgcaaaaaattagtatttgtttcctattgactattaatagtcataactcataaacaataatatctttttatataaacctttctctttacaattaacctgtaaagtccacgagtaaagtagctaacctcgtagacttgtccgaaacaaggtaatgtttttttctcaataatcaaaaacggttttaatttggaaataaatcatttccatctgaaatctcaagcaatcttgaccgtcggatcaaattaatacaaccgttagaccttagaggcgctccttctctcataaagctgtcaaacaaatcttctttctctttctctattttcagaaattcgaaatctcttgaagaagctttttggctatgtcgaagatgagatcttacctgaaaccaccgcttcccaaatctccgatccgtctccgttcacgtcaagtccttcactcttctctccaaaccccatcgccaggtaatttcaaatttctcgatcaattcgattcagtttcgatttcttctctcgttttctttgcttgattcccgtcaaatttaggttttctaaagccgggacgaagattgagtgacgtagatctaaaccctaaaccccaaatcaaatactcatcaatctctagcgagatacatgctttagcaaagatggtgaaagacgagtttgctgaagaagaggatcgcaaaaagtcttcgaatttggagagtttggcaaagaattcagttccgttattcgagagagggaggttttacgaggagtattcggctaaacggaacgagagattgaggaggaagaaaggagaagaagctgtagaaggaggagttgtgaaaggaactccttataatctcggagttaatcatgaaccgatgacgaataagagacgaggaacggcgaagaaggagagcatcaagaagacggtggtgtctatggttgagagtagtagtataccgaggtattctctgaggagtatggctaaggagaataggaagccaccgcttccgcttaatgtcgctgtaagtgcgatgaagagtgttactacacgaaagggtaggagaatctgaaactgaggtgtgtttttgtatgaaaccgaaaactagagatttggtttcttgaaatttattttggtattgtttttgcttgtggatttcgattaaatccatggatgttttgttttcttgattgcttttacattgagataagctttatctacagaatgttttgttcatcaaatgcagttttggtgtttctttagtagcttgagttagttagatgagtagattgaaaagcctcttgctttgaaaacgaattcggtttttagaaatggaacagaaaatcctagagatttacgtcaatgaagttggtttcaacagaggagagattaagcctcttgctttgtacagcctgcaacacaagtagtggcttgcttgctttctttcgactaacaggaagcgagcctttaggcgtacacaagaagcgcacactcccatttagcgctctcgtttaaacgttatgaattcgactgtgatgcctttcaggcttagaaaggtttatctggtggatccgtgtggtgtttccacctttttatacaacaatcaactttgaggaattatcaacgtgagagttagaaattacagagaggaaaatcaaatagtatatgactaaatggaagaggatatacaaatatacaacagacactggtttgatacagaatgaaaaaaaataaaaaaattatgaaacctataattacagtagaagatgaaaatgtttagaacaagtctaaatttgttcagatttgcttatgagttgtataagagcatttgcttttctctgagctctgtttgttccagaggtggttatttctaccagatattcataaactccgaattgaagcgctgcgaggataaaagacgagttgttagagcctagttcaagcagcaccgaggtcgcacactctttgtttttcggggtgccttgtctgatgaattccacaagtgtttcaatgaaggagagttgtccaatggcttgacgtccttcagggtgtgatgcaagcagcaacagaatcgaaagcgcttcatcgatcatccctaagtttttatctttaagaaggttaagcaaaggttgaacaataccagcatcgatagctcttcctttattagctgagttaagagacaagttaaagagtgcagtgagagcatctttcttccctcttaatgtcccatgttgtagtaaatcgactaaaggcggtatcccattcgataatccgatagttactttgttctcatcgagcatcgataaactaaacaaagctgcagcagagttctctcttgcctctctgtttccattttcaaggatttcaataatgtttggaatagctccttcatttgaaatgagtttcttgttgacctcgtcgatagatagattcaacaatgtcgttaccgcgttttcttggattcctgaatcagggtaagaaaggagttgaactaacaaaggaatcgctcctgcattcgctattaaaacgcggttctcgggattttctctggctagcaaacgcatctgcttcactgatcttcgttgttcttccagttggcttgacgataacgcttccaccagcaaagagacctcatctttctgctcattttgtgagtcaggacttacttctttctctggaatcttgaaattgttcttctcacaccactgcataatcaagttctttaaagcgaagttaggtgcaagagagagatgatctaactcctgtcttgttttaggacaagtcttatgtcctgcgtcaaaccatttctgtatactctccttctcatatgtctataaaacaaacatattattatgttagtttcaagtacgtaccaaggaagtttgaaccaaaccataagttcaattacctgtccagtggcgatgataaccgggtcaagcattatttcgagtgttataggacacaaaaactcatgaggtaatattagagacgttgacttggtgattgctttattgatgacgggttggtagagaatgtcggtagcttcaagaccttgaagcttcttgaacttgttaagaagctcaatgatatgttgtttagtctctatgttcaaacctcctttgtcttggattaagctttgtatggctatagtttctgtctttaaatcatcaattgtttgtagctcaagctttttcgctagcctctctattatcgcgctatctgcgtttcgaggatcggtttttgagaataccaccatcatgtctactgctagctctatgtcttgtgtatctgttcttctttttgcttttttcagttgtttacacaatgaatcaatctaccacaaaaataaaatggctcattacagaaactacacagtgtagataaagaaagaaaaaaaaacttttaggttaaatatccgaaaagttttgggccgagacccgtacatcgcacccggaaagggaacacataatttacctcgtctttcgcatcaccagaaatcattaattcatcaaaaggagctttaacaagaacacgattcaacttttcgtaaatcgaatgaaatctcgtcatcattgtttcgccatccaatgcctataatcaaaataaccgtaacacaattaaaggttacgtaggagacaatcaatcaaaaaattgtcaccaaaatgagttttaccatatagattttactgccattgctgcaagtttctaataatttcttggcagcaagaaacactttcctcaaacgatttaaaaaatgcttgcaacttggtgattcaaaacctcgaatctcatccaaaaatggaataagaatcttcaatcgtctaacgagattaaaacattctttttgttgtgttcttcgataaccgttaatctgatccaaaaactcgacaatcgatacgatatcgctcaccaatccttcacaatcatcatcatcttctttcacttcttcctcatgaatctccaccgcatccacaacctcatcgtgaatcggttcttctgcggtaacttcttcatcacggttctctgcatctcctgtggcttcttcatctgtatccatcacatcgaccattagagactctctatcgcgtttgaattgattccaaagatgttgaaggaaaaagcaaacgttaaggaaattgtaagattaattttctcttgtttcatttttagagacaaaagaaaaaaaagatttgtttttcttctcacccaactttttttgaaatgtgattctcacaaatcagatttttgcgggacaggacatatatcctaaaagagtgcttctcctatggatatcaaaaaaaaaaaatcaataaataaaaattcattttcatcatcttcctcaaattcgaccaccctcttatgattttactattttttttgtttttgtataaactaaccaaattttggtcagaatgttttttgttctgttatataacatggatttactaatagttagtgtagaattttgagaaataatagatattgaaatagtgcggaagcttaataaataataaagcaataaggagacagacaaaagattgaggtattggttggttcaatttcaatccaaccactcgttcaatggctttttaattagttgtaatcatactaaatggttttcttaaagttaatacatgctatatttaattgaccaataagacattttaattattattttttgtcaatttttgttaagaatagtaaaattaatctttttagatatagacatataaattattgttttaatttagtgaataaaaactagtacaaatatcaaaactgcttctgcccaattcttctccgaaattcttagtagcctaaatgagaacatccatttgaaagatgaaatttctcagtccaagattttcaaaatagtaggattgttctgtccaagattactagtaggatttctctgtcaaaaatttcacaattagtaggatttatctcagtccaagattttcataactaaatatattgtaaaattttcatatttcaactatatgtcaatagctgatttacaatatttattttattgtgtttattaatatatcaatttattaagtattaatttctaaatatttgctgtattactaaatttcaagcccaaattattttttatcttatactatttttgtgatatgctaattacaaattacttagcaaaattacatcttagcacctctttatttttcttcttcttttatttgcgagaaagacaacaattcagtctctcctgtctcctacatgacttaaaaattaaaataaaacgaaaagggaaagcgaaattgttccttcctttttagccttttaggtcttcgaattctcaattttcttcggtgatttctaaaatctgctttggatttggagaaacaactctgtctatgtatgaatctcgtttcgaatctccggagtttgctcaatgtaagtgagttcttcgatttggttactttcagaagcgaaatttcaaaaactacttgtagtttggtgctacgattcagatttgtagtttctggagctggtaatgaacaggttactttgtcggaatattggagttagagtttgcttttacatgtttaatctctcattaactggtttatagaataagtggatctcgctataatgtggatgatctcacacaaatgctttttgatcatcagcttcagttatttacattttggacaaatttattgtttttgttgtgtccacttgctcttttcttggtgctatcaaatttgatttctgtgaatcgtaattgtgatctgcatttgcaggttgcttctcttggcgtgaagtttgttagatgacggatgatgatttctgagaaaccattgggagtggaggagtctatacggcaggatctggaggttttaaccgtgtcaaggaggcttgtgaaaagtgttagccagaagttgaagaaaaagattcataaaactgaggtggtggaagatgaagagattgcaaggggagcggtgaattgtttaagtatcagtgttggttgcagagttgctgatacgggtgaggattttgaggattcaagtaataagagatggtctagtgctagtgaggagggtaagggattgatgacaatttgtggaactgaagaaactaggttagattgtttttcttatggggttagagagaggttctggaagaagaataatagaaaatatctagcagactcgggccaggattaccgcaagcacgtttatcttcccgatgatattctggaaatgtgtttgatgaggcttcctttgaccagcttattgaatgcacaccttgtttgcaagaaatggcaatccatggccaacactcagcggtttctccagatgagacgagaaggctcctttcaaacaccgtggttgtttctgtttgctgctcttaaagatggatgctcctctggtgatattcacgggtatgatgtttctcaggacaaatggcataggattgaaactgatctacttaaaggccggtttatgtactctgtgacgagcatccatgaggagatttatatagttggaggtcgttctatggacagaaactctttcaagtcccacagagggatcttggtattcagcccttcgatcaaagcatggcgtaaaattgcgtctatgagacatgctagatcacttcccattgttggtgccactgaagttacttcagagttttcgaccatgcagaccaaacagaatcgccaagatagacgctttcacctgtcaagagttggcggagagtcagacgtttatgaagaccctcacaggctatcggtaagacgacagaacagaaactcggctgatcaaaatggaaccaaatcccacagattaataagacaaaagcttgatcggcttaaccgaaacagctccaagagatttgtgctcattgccataggaggcactggcttattcgatgagccactggattcaggtgaaatatacgactcagcaacaaacacatggtcagaaatgcagagactcccgatgggttttggggttgtaagttgtgggattatatgcaatggaatcttctatgcttattctgagaatgataagctatcagggtatgacattgagagaggcttctggattacaatccaaacatctccaatccctcctcgggttcatgagttctaccctaaacttgtctcctgcaaccatcggttgttcatgctctctgtttcatggtgcgatgaaggagatgggcaaattgggaggagaaacaaggcagtgagaaagctgtgggagttggatcttgtgtacctcacatggaccgaggtttcagtacacccggacgcaccaatggattggaacgccacatatgtctcagaccagaacatactaatgggaattgagatgttcaagatctttgggcaggtattaagtttcttcactgtctgcgatgtattaactgaagaagcctcttggagacatgtttcgaggaaccaaaggagtcaaaaacttaatctatcttgtacgaacaagaccattgcattgcttcatctctgatcttcttcattctttttgttaactttcaggactcgtcgaaattgattgattcatgtattgaaaagaaatgcaatgtgctagttcctagattgatttgaaatgtaatatttatattttaatattttcgggatgtttagcaatgtgttcagatcactatcgaaacaaggaaaaaaagtaattcgtaattacatttggatttgaaaactttatagggaagacgatatttgtttggttcatttttgtgtccgttcatatctcttgacagggtacaaatgtttattaaaagttatcatttgaaaatgaaaatattaataaaaacataaatataaatctacagcttagaattcatattttttttttgtcaaacatactaatatctaccaatcaatctttcatttttaaaagtcacacccaaagttctacaatcacaacaaaaacatctgaagcctaatatctacagcttaaaattaccgctgtaaccaatcatgccctaaggcgctgatgtagtctttttactcaattacttgtcgaacctcaaggaacaataaaccaacactaggaatgcacacattcacttaatctaaggcaaatagatgattttggttttctaaacttgactaacaatgcaattcaaactaaacaatgcaaaacaaagcaaaaaaatcaatatgcaaaagacttaacaagattcaaaatcaaacaagcgagaaataagcaaagcggttcacgtctatggatagaaagcgagtcttccattttagattattgattcgggtgattactaatcaattcaagatgttctatcattctaacaaagctaatcctttagtctaagaacactaatgtaaagtagtccacttccgtggtaccaatcctacactaatcatgcggttaacaaagatttccatccgtaatcactagactaatatacattaattccaagcctaactaaccatctagtaccctaatcatcaatttccgttggctaggaatgctaagtcctcactaagttctttcatggattgcatcgaacaccttccaaacatgaaacttcctatgatctagattctagactagcttcatcaaaactaatttagcactaaaacagttagagagtaaggatcaattaagattaagccctaaacatcttgatcatgaatcaatcatgcatgaaagactactcactaatcattgtgaaaatacaaacgaagttgagattgcataaaatacttaagattcatacaaaaaatctcaaagaaaaaaaaaattaatattcaaaacaagcatccgctcctttaaaaataggtcaacattgtacttatagataaatggtgcggatcaggccaatccgagacataccgggtcaatcccgctttttgcttgagaaaatgcttgcaatcgaccttctaatcaaccacatggtggatcacggttatgtccgagagtgtgttctcgtcaaatcgaccagtcactcgaccatcaggtcgatgaggctgtaactttttatctgctactatgtttgacctgaaatcaataccgttggaaagctaatttaaatttctatgactttgatgaaggactccaaagctaaatcacaagggaatgtcttcatatgacgtgattttcaagtacttcatattgatcatggattatcatatctcttgttctttcctccatatttctttggtcattgtttgttcttttaagcaccaaatctccgatgctagctctcttcttcatagttcttactccaacacctaaatggatgaactcattgcaaatgcaaccttaaacaagtctaaatgctatgttaatgcatcaaaataaatgaaaaagggggataatatcaatgcaaatacaaccttaaacaagtctaaatgttactactccatctgttccttaacaattgattttttagaaaaaaatacacgtattaagataagctttggaatgaaatttttaatgttatacataaatcgtgacaattacttttgaagaaaaaaagaaaagaaaaaaagatataacagtaaattaagagctaattctgcgtaggaaataaaaaacaaatcaatttttttagaacaacttttttttagaaaatcaattattaaagaaaagatggaatatgttaatgcatcaaaataaatgaaaacaaaggccggagagaaagagttgtggtatgttacttcaaagttcaaactgggagaaacaacaaacgaattagaggagaaaaaaatcactactgtctgtcacatagtattaaaaagataaagtaactaaagtaaaataaaaagtaccaattactattatctcaaaatattcactattgttctatccctcgtcgttaatattcctaactcctacggaatcgcagaacaaaatctgtaagaatataaacattacatttcagatcaatcacaagggactgacacattgcttttcttctcaatacatgaattaatcaattttgacgagtcctgaaagttataaaaaatgaatgacgaaaatcagagatgaagcaatgcaatggtcttgttcatacaagatagattaagtttttgattcctttggttcctcgaaacatgtctccaagaagcttcttccgttaatatatcgcagacagtgaagaaacttaatacctgcccaaatatcttgaacatctcaactcccattagtatgttctggtctgagacatatgtggcgttccaatccattggtgcgtccgggtgtactgaaacctcggtccatgtgaggtacacaagatccaactcccacagctttctcactgccttgtttctcctcccaatttgcccatctccttcatcgcaccatgaaacagagagcatgaacaaccgatggttgcaggagacaagtttagggtagaactcatgaacccgaggagggattggagatgtttggattgtaatccagaagcctctctcaatgtcataccctgatagcttatcattctcagaataagcatagaagattccattgcatataatcccacaacttacaaccccaaaacccatcgggagtctctgcatttctgaccatgtgtttgttgctgagtcgtatatttcacctgaatccagtggctcatcgaatatgccagtgcctcctatggcaatgagcacaaatctcttggagctgtttcggttaagccgatcaagcttttgtcttattaatctgtgggatttggttccattttgatcagccgagtttctgttctgtcgtcttaccgatagcctgtgagggtcttcataaacgtctgactctccgccaactcttgacaggtgaaagcgtctatcttggcgattctgtttggtctgcatggtcgaaaactctgaagtaacttcagtggcaccaacaatgggaagtgatctagcatgtctcatagacgcgattttacgccatgctttgatcgaagggctgaataccaagatccctctgtgggacttgaaagagtttctgtccatagaacgacctccaactatataaatctcctcatggatgcttgtcacggagtacataaaccggcctttaagtagatcagtttcaatcctatgccatttgtcctgagaaacatcatacccgtgaatatcaccagaggagcatccatctttaagagcagcaaacagaaacaaccacggtgtttgaaaggagccttctcgtctcatctggagaaaccgctgagtgttggccatggattgccatttcttgcaaacaaggtgtgcattcaataagctggtcaaaggaagcctcatcaaacacatttccagaatatcatcgggaagataaacgtgcttgcggtaatcctggcccgagtccgcaaggtatcttctattattcttcttccagaacctctctctaaccccataagaaaaacaatctaacctaatttcttcagttccacaaatggtcatcaatcccttaccatcctcactagcactagaccatctcttattacttaaatcctcctcaaaatcctcacccgtatcagcaactctgcaaccaacactgatgcttaaacaattcaccgctccccttgcaacctcttcatcttccaccacctcagttttatgaatttttttcttcaacttctggctaacacttttcacaagcctcctcgaaacggttaaaacctccagatcctgccgtatagattcttctcccaacggtttctcagaaatcatcatccgtcatctaacaaacttcacaagtcagacaccttgatcatgctaagaagaccatcattttccacagataatcaacctgcaaatgcaaatcaatcaaagcttcttcaagttgtatacaatctcatgaggcttgcgatgatcaaaaagcattatagtgagatccgcttattctaccaaccactcgattaaagattaaacatgtaaaaagcctaactccaaaattccaacgaagtaactcaaagaagcctacaaaattaagtttcacaatcaaactacaagacgcgtctgcaatttcacacaatggacgaaattcaacaaattcgaagaacaatttcactcacattgagcatatcacccagaagtttcgaaaagagattcatccatcgacagagttgctttcccaaatccagagcatcttccccagaaatcaccgaagaagatgaaataattgagacctcggagacctaagattgacgcatcgatttcccacttttcccttttttattttattttaaatagatcatactgcagaaagcggaagctaaaaaaataaataaaaaacaaaaaaaaaataaatggaaattaagctgactcaattatgggtcaattgcaagaatatcgctttttcaataaaatagtaaaaaattaacctcatattactaattaacatcagatttgggaagtatagtggatcctatcggtaacatacagctgttcaaatcttaactgttaacggtgataaaaactttttcggaatactgcaaagttgtaaaaaaatagttgtacgagaaagctatatagtaataaagctgagagtaaaactttttgtaacgctttaaaaaagcttttgtaattaacagaaataaaagcggtacaaattgtaatactttgtttttgttcaccaatcaaagccaatatactttgtttttgttcaccaatcaaagctagtatccgttttgagatcattactgaaattataaaaactttaatttgtttaatttattacaaatagacagtgaaaaccttcatatgtaataaacgataaaccttggtttacaataataaaagaaaaaagaaactggaaactataatgctattgcatgtagtctagaatttaacttgtgttcacaaacattctctttcaaagaagtttaattaataacagctcaagcttagaattcccatcacaagatcaaaatccatgtgttcaacaatttttaacattataagctacatccgaattgtaatccctgaataatccaactaatacagattataagtcataaagacacttttgttggaccaaaaaaagttgattaatgtcatcaacaatcaatcgaccttgcatttataaacgcatgctgttatggccaatacagctccaatgataagtcctaatatcgccattgccaagactgtcgaacccaatcaaacaacgtatatatcagtactccgcaacattctttcatcatgaccaaccacagtgaggaagaatgacataccagcaatggtgaagtagatgagaactgccaatcggtatctggtcgttcctggtaattcaatttcgagtgtgcaatatcgttgagactttcccttagttgttgtatcttttaaagaattcgagcctcctggttggagttcagataatgaaacattcgtgcctagtacagtgtctccgttaacatctctgatctcgagctttatggtaaccggatttgcattccaatctatcgatattgctccaaaattttgttgtcctgcacgtaagtttaagatattgtaaccaatgtaatcatacaaaagagtacatcgctgctctgttaaatcaactcacaacagttacagtctactatattccgtcctaggttagtgacagtagagctatagagctaaagttggaacttaaagtagactcactgtgtcttggcttgtcaataaatctttccacagtttatcagaagaaaacgtaaaaggaatcaaattgagaataataccgtatgtgcaagatttgaatttgcagttatcattgataactctcatcgtgcttggagtataccaaaaaagaagcctaactatggaacgcaagggacgagggacaactttctcaacagattgtactagaccactggaggtgacatcatataatgggtacccaacagaacaatcatatctcgtgatttctccaaaatgtacatctccactgatgaatataactccatctctctgtaatgtcaaagcaacgaagaattatggggacgaggaaagaagaaaactgacagttggaaacattactgtcaacaatcccataccttagtatctgctatcagtttaaaaagacgtttcctttcctttggaaaacgaccccatgattccatataaaagagaggtccagtggtagcagaaagatttgatatcacctggacaagttaagagacaacagttctagatggaataagacactcaggcttcatcaagtttaagtccatggccaaactggaacaggacacaaaagtctaatttgcagatacctgaacagaggatcctatgatagtgatttcgcttcggggaccgctcaattcattttcgagccagtcccactgcgtatcacccaatatgctcccgtcacttcttaaagggtctctatgatatctagtatctaaaactataacctgaaggagatacacaactgtgttaaatcacatataagctcttcattctaaacttaacaaaactaccaaagaagacaagagtttctgttaataccttaactttccgattaggcggaccataagtataagaagcataaacaccagcttgctttctcctaggactatcaagaggctcattcaagaaatcaagcataagtttttggttaatgactttacgatcaaactcttttccagcgtcattcaatccgtaatcatgatcatcccatgtaccaataaccttagcttttctctgaatacgagaatatccaggattagctttggctttagcgtatcttagtttcatttcttcctctgaagaaggtacaaacctcggtgaattcctccatggcccaaaagttctctctttcccaatgactgtaagtggtcttcttatatctccgtagatgttatcacccaaccaaataaacagttgcggatcaaacttgtttatcgcatcccatatcggctaaaatgtaacaaaaatacaatgtttaacatagtatgcaacacaagcttatatcatctaagagaacatcggctaattaaacaaaaaccataatcagctcacttaaacaccagccaaacagagcagtcttaaaacactgaatccagagccaagtaggggttgtacgattgatttacctgtggagcactttgattagcgcatgatccgaaggctatacgagtgataggagtctcttctgcagcaatcaccaccgtaaggagtaaagaaaggcaccagaaagagatttggttcatgacgatgtggtgaatcgaagagaaaaccctagaagcaaccgtggaaagaggaatcttcaagttttcattaaaagatccacaagttttggctcgccgcagattcggttccggcgattttcagttaccgttgggattttgatagacagagactgtaactttttctactttcttctcgtggctttgatttttaatagctttactttttcttttcttcagatgaaatttctattgcctggttttatgaatcttttttctgggttccaaacaaaaagtgaatttgtgaaatatccgtattatttataattatggaatgaccattgaatttttttgtagatttgtttaacatatgcaatgattttttaaatatgaatattaattacttgagaaacaaatatctactacatattaaaaatgaatttgtattttcccctttgaatagaaatcaaattcactatatgtggcaaatagattaattcattttgatttgtattacataatttaaattgtttatctactactatgtgatgataaatccatttaatatgtgttcttctatgaaaactttatccgaccaaaaaaataattttatgaaaattttattccaattttctagattgtataaaatttccccggaaccatgcaaattcagaattttttacactagagacttctacggatggcaaaattgtgaagtgtaatattgttttagacattaagaaacaagtttcgaagcggatcgttttagttaaaaggtttacaaacaatattatctcttattgaatagaaaaagtgaattggtgcaataattatgtatctgtttgtaactgtaattatagaaacatccaataatgtgaatcaatatcattgttctagcataataaaactgtagatttacaaacgtcaaacgatatgaaatgttttaccgacctctaccaaaaaatgagtgatgtgagaatatacgcgcgttatcggttgtttctcactcacctagtgacattggtcgagcggcaaatggtggtgatgactggcctcttttacgactcgcagttttagattttagtccccttaattgggtattctcagttatggggagacatataaacacattttgtatgttttgacaaattcagaatatcaaaacaagacacgtttattatgaagtgtgttaaataatacaaatagattagatgagacacaaatatacaaaggaataagaatctctcacaaaaataataattgaatgaataaaattttgaggagggaaggaagatgtcccaatcccatatatatcatctcaacgcatcatcaaaacaaactcgtcaaagctgagaactccatcgtcattctgatcaaacccacgaatcataaccttacaagcatcaaccgtacacgactcgccgagtcgactcaacgtcctccgtaaactcgccgccgtaataaactcttccccctccataacatacatcccaaacgcttctttcaactccttcctcctttcttcatcactaccatcttccccttccataagcttcaaaaactcctcaaaatctataaacccgtctccgtcaacgtctgatgtcttcaccacttcctccacctcacgtgacgataacgcgccgcctaagagactaacgcagctttgtagctcttcaccggagattttcccgtctgagtttgcatccatatagtcaaaaacggttcttagctcgttaacgtttaacgagctgcttccgctactattactgctcgttcttgattcgtcttcaaggtttcttgacgattctgatctcttcgaggaaactttcttgtatagtcgtgacaatgatgatttttggttcttagcgagagtcatttcttgatttgaatatgaatctagaagatttgggaaatggatttctgatgcaaattcttttcaagaagtggtagattatatatagatgagtatgtgaatgcgtgtaatggtggagagattcttgattgttcgacggttaaaacacgggtttgaatattttggtgttattatttaaagctagaggcggttgcgcggcggtggccgggaagtttcctccgcaatgagtgtttgtggggaaaggtcaagttgaccacgactaggggtgttttcgtaataatgtgatggtaagtttttctcacgtattgtgtgaaatgtgatgtcatatcgacgactagattaagaaaagtagcaaaccttctctttgactttgattgagtatacgatgtgcggacacgtggttttggtcttttaaattgttaaactgtcatgaagtttcatataaccgtccagatatgctccacgaaagtggtatgacttcctctgttcctagaaacttgaattaaaaataaaatatttcatgtgatgaagtttcatctaactgttacattcccggtcctgaattccctttccataagaaaatatatttctatatggaccaaaagagagttttatttttatctttttgcatctcaaatgccaacttcatgtaaaagcttttactgatgtatagttcggctttctaagctcgacggtttaactcggcccagcatatattgttcaaacaattcagttattctttgaaacttctccccgtaattatcgagctcaaagattatttaacaaaaacatctctgtttccccccataaaatctccttataaatacttaatttgatcctaatatcaacaaaatgttagactttaatctatatcttcaattcttgatgaaatgaatttccatgatgcggtgctggcatatcgtgaccttacttaattcacattaattaaactttctgagcaaatagtttaaattgttggtatcaaatctcacaaataaacttactatgaaaaactcatgatcgccaaagtgaaaatagtatagaaagcctagtttagagtgacaaacacttgaaatcctaaacaatcgatcttgtaaccactattgcacatcaccacaaaacacacattatctgacgaaagctaatcacattcaaatgattaaaccaaaataacagaatctaaacattaattaacttaatattcgagatacaacgagacctatacgagtttgaatgaaagacaattttcttgtctactatatgtacaagaaaaaatagagatcatacaaatagcttttcttctaactatcgaaatcaatattcttataattaggcatgaatcctttaaaaatttaggggtcatgtaacacttaacataagcaaatatatgaatgcataaaattattaacttttcgatcatttttttaaaaaattataattttcgcaacgtatttaaaccaaatttcacaaaattacatcaattttttttttagattgctatctaagcccttaaccgaaatacctaaacctaattgaaccgatcagttcaaagttgccagcagataaacaatgttttcatgtccgactcatactccatagtcgaacgattaacccaagaaacatatttccagtgaaggtttagtcttaaatctaccaatataaccagaaaaatccagaaaaaacttgccattaactaccgcatgatcaaccggttaaaacttctgggtgaaaatctttccaaaatattgagattttgacttcaaaccctttgctacaaatagaaggtttgattttggaattaaaatatatagtttgtattaaaaaagaaagaaacattaatatactcatataaaaagagtttaacaaaataaaaatcaggaaggagaagacaataaacgtagctaacctcatctccctcttcttttttttttgttctttaatagtttccgtctctctttttctcctccacctctcctttgtcctcaatagccgacgatggcttcatcgtcctcttccattttcaccggtgttaagttctctccgatcttagctccctttaactccggagatagccgccgctctcgatatctaaaagatagccggaataaagttaggtttaatccatcgtcgccgcgtctcactcctcatcgtgttcgcgtcgaagctccgtctttaattccctataatggtctttggtacgtatcagttttcagcttcgtgttcatggaaactgaaattagttcttggttcaaaattttgttgagttcagttaaatcgatttgttaaattttgtgttgaattttgtggtgttaaagggcggcgcagccaaattcgcataagggacgtttaaagaggaacattgtttcgggaaaagaagctaccgggatatcactttctcaaggacgtaatttctgtcttacttgtaaaaggaatcaagctggaatcagaagagcattacctagtgcctttgtggatagaactgcatttagtttgtcgaggtcgagtttgacatcttctctggtaagtaagctacatcatttactttctatgttcttgtcttgtgcttgtttggatttatctctgtttaactgactcaacatgtgcagaggaaacattctcagattgtgaatgcaactcttggaccagatgagccacatgctgctggtacagcttggcctgatggtattgttgcggagagacaagatctcgacttattgcctcctgagattgatagtgcagagctagaagcgtttcttggttgtgaacttccttctcatccaaagttgcaccggggtcaattgaaaaatgggcttcgatatcttattttgccaaacaaagttccaccgaacaggtaaattgagtagaatgctcgaagttggtctacttgtgatactcttaatgacaatatatcattccttgaaaaccagtaagcaaaatggttatagcttaaccatatggtggaatcctttaaggtcttcctgctatatcttatttgagtttggaaatgttttcaatgctagatttgaggcacacatggaagttcatgtaggatcgattgatgaggaagaagatgagcaagggattgctcatatgatagaacatgttgctttccttgggagcaagaaacgtgagaaacttcttggtacaggtgcccgctctaatgcctacaccgatttccaccatacagtatttcatattcattctccaacccacacgaaggtttgttctcttctacacctattggcgtatttagtgatgtatctttttcttggttagttcaattcacaggtttttattgcctcgtatttactttaacaaatatggtgcttatagtctatatctatatgttgcacatggagtattatgtgtcttatgagcaaaaatactaggtttagtgttgatctttatttgtttatagaccttaaagtctgttgattggttggcttattgtgataatttcgataacatgtccttactggcttgctaaatgatagagttggctagcttcatattaattatagttctcaaccttttcaggactctgaggatgacctcttcccatctgtgctcgatgccttaaatgaggtataattttgcaattaagacgatgtcttccaattagatatgccccgaggttttttctgtaccatgagtcaaaatccctcttatgtttcatggattatgattcatttggcagacaaattcttatttctcaaatgattacagatagcctttcacccaaaatttctctcttctcgagttgagaaagaaaggcgggccatactttcagaacttcagatgatgaatacaattgagtatcgtgttgactgccaggtaatcaatcatgaggaatagttttctgtatgtcagcacaacagccttttgtgttgcccaatttttggtggatagccaatgacacattgtactttatttggtgagactagttgttgcaacatctacattctgagaacaagctgggtaggaggttccctattggattggaagagcagattaagaagtgggatgttgacaaaattagaaaatttcatgagcgatggtacttcccagccaatgccactctatatattgtgggagatattgacaacatacctcggatagtccacaatattgaagtaagatagtctcttacctttctctgacatttcttttgaatttctactgcgtagtctatcttgaccagacaatcattcttccacaggctgtgtttggaaaaaatggtttggataatgaatcaacacccagttctcctagtcctggtgccttcggtgccatggctaattttctcgttccaaagctgccagctggtcttggtggtaccttttcaaatgagaaaacaaatactgctgatcagtctaagatgattaaaagagaaagacatgcaattcgtcccccggttgagcataattggtcgcttcctggaacaagtgttgatctaaagcctccacagatatttaagcacgagcttcttcagaattttgcaatcaacatgttttgcaaggttcttgttacaatcttttaattcttccctttttcagaaagcttcatatgatacatgcaacatagggtggtagtttatattatgaaatgtttacaatttcctttgtcttcctgcagatacctgttagcaaggttcagacatttggagacctgcgaaatgttctgatgaaaagaatatttctctctgctctacattttcgaattaatacgagatacaaggtatgagggtgttaggatgtcgtctttccgaatacatttgttctcaattttactcaagaagagaaaatttgttctcattttcttgcacagtacattttgcttttatagattaatgaatctcaaatctcagtgaaattacaaaaacggctctttgatgggtttgttcaaataatataactgtgttttcaataatctcgaggtgcactatctgagtaaaaactctttttcagttcatggacgtagctatattatattgaaggttttaggaattatgtctattataactagactcaatactgtcagtgaattttgatgatgttatttttgtacctttcagagttcaaacccaccatttacgtctgttgaactggaccatagtgattcgggaagggaaggatgcactgttacgactcttactgtcaccgcagagccccaaaattggcaaaatgcagtcaaagttgctgtccaagaggtttgcttattgtttcttctcatttatcttcattgtaaatactatttttctctctttcgttggattgatcatttggacgtgatgaataatggattggttaagctaaaagactgttagagccattgacactttttctttactgctgagaatttattcagctttaacgtataattctacgtgcaggttcgaagacttaaagaatttggtgtcaccaggggtgaacttacacgttacatggatgctcttctaaaagatagtgaacatcttgcagctatgatagataatgtgtcttctgttgataacctggattttatcatggaaagtgatgcactaagccacacggttatggatcagacgcaaggacatgagaccttggttgctgtagctggaactgttactcttgaagaggtaggtttcacagttccgcagttccgcttttcttgttgaatgtgacgcgaaagataactgttgatttcaaaattctcggtgattaacaaaacgcacatcaagtcatcaataacaaccggattcttaacacttcctgcatatcatactatttcaatatttatatttgagttggttgcttttcttctgttttgataattccttgtccaggtaaacactgttggcgccaaggtgctagaatttatttctgatttcggaagacccactgcccctcttcccgcagcaatagttgcttgtgttcccactaaggtgcatgttgatggggttggtgagagtgatttcaatatatctcctgatgaaataatagagtctgtcaaatcaggattattagcacccattgaagctgagcctgaggtgttctttcttttgtaactctatcttcgctttattcaagtataaaccaaaggctagttctgaatcagctttttgccttcatccttgcagctcgaggtgccaaaagaattgatctctcaatcacaattgaaagagttaaccttgcagagaaatccatgttttgtccctattcctgggtcaggtttaaccaaattgcatgacaaagagactgggatcactcagcttcggttatccaatgggatagctgtaaattacaaggtacgtctttcatctttttgctcttccttactatgtaaggatctccgtagtgattttctttctacattattagacatattcctcaatatttatattgttgtttgctgtctacttatcaaattgcagttcttaacaacttaagaaaatatgcttcgttctagcagaaaacattttatttggtgttgattgatacttcagtttttactgtaccatcttgtatggagaaataaagacccttcccttgacatttcccttttcaatatagaaatctacgaccgaatcccgggcaggtgtcatgcggctcattgttggtggtggacgagctgctgaaacatctgattccaaaggagctgtggttgttggtgttcgtacactcagcgagggtggtcgagttggagacttttcaagggagcaggcaagtgaagctgttgaaaactgtattgtgatttttaatctaaaactaaaaaaggatatgaactaatctgaaagccatttaaattccgtttaggtggagctgttctgtgtaaatcatttgataaactgttcgttggagtcaactgaggagttcattgccatggaattccggtttactctgagagacaatggaatgcaagcggcttttcagctgcttcacatggtgcttgaggtattagattataacaaataagatatagaatgctgtgcaacatttcagactcttgatctattgatttgctggtcaataatgttttcttttacctgcttgttcgttttcctttatttatttttttatttttttctctaatcttttgctgagaaagagtggtggttctctggtatgcagcgtagtgtctggttggaagatgcatttgatcgagcaaggcagctatatctttcgtattttcgatcaattcctaaaagcttggagcgtgcgactgctcataaacttatgatcgctatgctgaacggtgatgagcgttttgttgagccgacacctaagtcactacagagcttgaatctagaatctgtgaaagatgcggtcatgagtcattttgttggggacaatatggaggtgagatctccaacttaaaagctgatgtttgcttgacttatattaattttatttgattttcataaaagtttctctggtttccttcaggtaagcattgtgggggacttttcagaggaggaaatcgagcgttgcatccttgattaccttggtacagttaaagctagccatgattctgcaaaaccaccaggatctgagcctatcttgtttcgccaacctacagctggcttgcaatttcaacaggttcggaacaaagcagtaaatgcatggaatttcttgttcctctctttggtttccccatccccttagatatgtgattcaagcaggatatattgacatctttatctctggataggtattcttgaaggatactgatgagagagcatgtgcatacattgcgggaccagcgccaaatcgatggggctttacagttgacggggatgacctttttcagtctgttagcaaacttcctgttgctcatggtaagttacaccttaacggaacagacttaaaattaggagtcatatgatgtcgtggttttcaacctcgtggaaactgtgtataggtctggttctgagcttgtctcataaaccagatatttatcttcagtagtagtaatgaagtttagtgttagctctgacataaagtagcttataacatttcatgcatgcacactgaaattgcagatggacttttgaaatcggaggaacaattgctagagggaggagacagggagttgcaaaagaagcttcgtgcccaccctcttttctttggagttacaatgggtcttctggccgaaatcataaactcaaggtacacttactgtgtactggtgtcatattattcgaaagcagagttcttttttctgctgctatagtactctctggtttggttcatgtccagaatttgttgaggaactaactgccagaatgaagcactgcttagaaaatgaacgtcatcgtgtgtcaacaaacgtttgaattttaagagaatgcctttttagacctctgattgtatttttgcttcagaccggagcctgtctacttgctatctacctattattttacatgtatatatatatattctgccacccatggctgaatttatttttttgcgtcattgcaggcttttcacgacagtaagagattctcttggactgacatatgacgtatcatttgagctaaacctatttgataggctgaatctcgggtggtatgtgatatctgtgacttcaactcccggcaaggtatgcagtctttgtattttgcttacagtaaatgtgctgctctttcattaacagttttcttcaccaagtttctcaatactctttccaggtatacaaagcggttgatgcctgtaagagtgttcttagaggtttgcatagcaaccaaattgcccctagggagttggatagggttagttgtctcttttgcctctcagcttagctctttttagctccttctctttgttaatggaaagtagtgttgtttgtaaaatcgacaggcaaagcgaactcttctaatgagacatgaagctgaactcaagtccaatgcctattggcttaatctattagctcacttgcaggcctcctctgttccgaggaaggtaatactcacttgtgtattcctaaatgtttcatttctgacttgacttcttctgatggggtggttttggttgttttaggaactgtcatgcattaaagaacttgtttcattgtatgaagctgcttcgatcgaggacatatacctagcttataatcaattaagagtggacgaggactctctgtactcctgtattggtattgctggggcacaggcgggtgaagagattactggtaagtgtgacgtcttttgagcaaaaacagtttgagatcagttgggtattaaattacaaaaactgtgtgatgcagttctctcagaagaggaagaaccagaagatgttttctcaggagttgttcctgtgggacgaggctcatcgatgaccacaagaccaacaacctgatcgacatatatggtttgtaagataatgtaggtgaagaatgtgtcatagatacaacagagaataaaccagataaactacatcagattctttgtcacggaaagaagcttcatcagaggtgttcccgagagctttggcataagagctttgtatacttccttgtgatcatcatcaaggctaataaatgaccccattatctatactcatctctcgtctccttcatatttatagaagaaaacaagaaaaagaaaaatagtgacgaatgcgtaccttttttttttttttggacggtgcaatatttatgcagctgtatatgtaatttgactgtgatttaaacgagtcattttgctctcattttcatttttctgtaaaatcattgggaggtgttcatggcctagtgggggggataacaattccgtggctcttgaaaaaaagcctttatatgcgtctttcacgaactagacaaactctcaagaagacaaaaactcatgttccaagaattacggcaagatgaaaacaaaacacaagactattgttctacgtaaaatcaaggtgatcaatacaatgccaaagactacttaaacattcaggacacgcatcactcaattactcaagactactctaaacacgtcgaaagtactttgtgtataagaatgaataatcatctattttatataaatacatatccaaaactcttgtaaaaagcaatggcaatttgctagaactcaaattcaaaagtttcttacagtattttcgtattctctcttttgaatattctactactacttttttttttggccaacataaatttggcttttaaccggagatagcaaacgtacacaaccttgacataatcaaatataatagggagaaaaaaacttcttttatgtcctccgaaacaaagaaaccaaaagtattcgttaagagaaagattttgtattcggatacatgtagagtgttttcatagctaaaatagcttgtacatataagagacgttttaaactattacaatctcatggcaaaacaacttggggcttttcacaaagatgctcctaatttttctactgtatcagtcccaatttagattctgatgaagtaactaaaatcaccaaatcatctgatataaacttgatatctctctgtgccagtgtccaataagttggaatagtaagaaaaaaaaacaagagaaaatacaaaataacattagacgtaccatataaagtgaggaaatggatatttgagagtcctaatatttacgattcctgcaaacgaaagcaaacattaaaatttgatataaataccaaacatgacataataacacaacctacatagaagaagaaaattatatgctaaaaaaaaattaaaacctctttgctttcattgaactttaacactgaccatatctcttatcctttatttctgtccaaatcacaaagacctgatttgtttaagttgcatttctttgtaaatggatagccaaaaatggtgattaacaataaataacctcttgttccgttggacacacacaagattcagctcatttgtttgaaggactattattataaacaagatttgtttaaaaattggccttgattataatatatcttgtcttgttaacgccaacaacaacaaaaggaaaagaaaaatatgtgttaaaaggaaaataactatttctaagtgttagtatgtgggacaaaaattagttacagttctcaattgaaagagaggagactcatctgctgcaggagatgcatttgcaaaagagagattcatcatccttctctcccggtaaactctgaaaaccgcggataagacacacccgattcagtttcgtcttgaaaaccacgtccttctttttagtttagcgatccacggcacctgctcacaaaagcaatacacactaaaagtaagtaaagcaaaaaatacttcaaatagagacaccaaggctattatactaacatatccaacaatttttcattttaaacaaatcatctcactcaagatacatgtgaagaacagtgtgagatataagaagtaacaaaaccaagaaatcgtaaaacgaaatatgaaactaatgcaacttactttggcgctccacagttacaggggattttgtcgtcctccaatgggaacttgtagttgtaacttatttcttcaccggcgtctatatgccgcttagcataaatgaatatctttttcttaccttctacgcttataatcttggtgtaacagttcggctgcagaagcacatatcttctataagacccaaaatccacgaacaaactaaccaatgatacaaaactatgcatataattacctcacatgaatggttgataaacctcgctatgccacctcgctttgtggcatcaagctagagtcatgaaaagcaacaagtgattcagaacattcactcattgacataaacaagataagagttaaatgtattgcacaaatgactaaccacatagccatcgtcaagcctgaaaagataactgcttcctattcccatcttttcatattggcgttcacgtatctcagatatctgtgagatggacatattaaaattacaatcacaaccaaagtaagcgagaaagcgcataacattctgtccttgaataaaacaacaaggttcactaaagaggctaggctactgtatagaactactactacccacaaaatacttaatggaacacataatcaaacaagtcatacttacagaagaacgtatcaactctccaacatattcgatcacaaagtcttcagcttcaatcggttcaagtgcgacaagaccccaatcatgaatcttgctttgttgaaaccgtaaatgctttttcctagcctgtcgccaatgtaacaaaaatagaaacaaaagatcagtacacatacgtgtataatgtttaaaagagaaaactagtttttgttttaatcacaccttcaactgagacattttcaagacatcagccccatctgcagcagctaaaagattacgcagttttgccctattagttcttgcagaaagaacgttctgagtcaaactacttttggaaccaaaatgttgcatgtgtacgcaagaacttcccctaacacgggctctctcttcagcactggcctttaatgaccatgcatgccaatgccaaccattaatagatgtgcgtgcacatccatcagactttgggattgacaaaaacagctttttcttgcttggtttcgaactcagtttttccaatggttttaatgcaatcggcttaggcctgccatcatccactgacaaatccttaattggagaacgttctgttgtatgttttgctaatggcttccttctacgtatcaatttatttggacctactacagaaaccaaccaaatacatgtcatttgaggtaaatgatttatagcaaaacaatataaacccatggacggtacaaactgaaaaattgcaggaaattgcctttttgcagcttatctgatgtatgacagggaagcttctcttcatttcgaacatcatagtcttccttaataacagcatcctcagaatccgtggaagagagagataacctccgacgtgaaggtacattggagattttttcatccaactggtgctttctttttagaattgaggattgggacgcttcatgaaaaaagcacgactgttaaaatctgggcccatgcattcaagtagcctgatattttcgtaatggaaacaccaaagaaatatgacactacacttacacttacggcccttctgtgatatactgcacgcagacttttccacaaacttttttccttcagcgagtcttggaggattaccagtagggtttgacatatcctgaccattcttcgctgcatcttctggagatagtaatttagtaaagcacttgcgggaggtattctcaaaacctgggaataaaaacaaagcgatcttacttttccgtctcttgctgagattttgatgggaaaccttgtcactgattgctaatccaaggctttctgtatcaccctcctttccagaaatctcagtaaaacttttgactgctccattgcaagattttgtaccttcgtctctagcatctgacagattctttctctttagctttgatgtatgagctgcttttcagaaggatgatatcagtaggctcgggttgtatggtaaagaagctcaagagctcaaagtcaaacgacacgaatttatgaataggaaacaaataaaggagtttttttttttaccttttttcactttctgagaaggcttatttgaaagactctcctcatgatctttgcagtcaacggtttcctcagattcctcagcagtcactgaaatctcctcacatgattttgcagcgtttctacattctcttaactcttttgttttattcctagatattcctaacagaatatacaccaaaaagaacatgaaaaaagagagataaaccctgatacctacatagaatcacacctatatagtacaaagaaagcttacttcttagtcttgttataaggagtgcgtcatcaaattcatcttccatttcaagatcttggcttttatcacagatcaccttactaaacgcatctttaccaaccttttctttatggagcttcgtcgcatcctttatgatacctgcataataataaaaaaaaacaatatgaggtaagagtcaagtttctctaattcagattaaagaggctgagattacatacaatgatcccgccggtcagtattcctcatcttctgttgacttggtttccgaactgacaaatctatactgggtgtatcgactttaaggacttctttcatggagtgagaatctgacagtttcttagatcgtttaaccagaactttttcagacgctccgacacatggtttccttagcttttctgctgtctgatttgatatattagactgtaccagctttttgttccgagtaacagttttgcgcttcttcagtgccaatgtttctttacgagaaacttgatggcttcctttcagtgaagcaaggaattcgttgagataacactttaagaacagtgatttccaatctctcataacatcattgtgcaacttctgtctacataatgccattgaaacatatgctttaatctctggaatggattccttggacctaacaggctgatacttatagcgcagacatggcatattaatattgctttcacatccaggtggtggtggctcatgaatggccagagcatcaagttcatcattaacaggaatatctgatgtctccaatgctgtactaaaaatattagcaataatatcttcagatgtgatttgctcggaggattctccctcttgcaacagtctctgagaatcactgaaatcattggaaaaccgcaacttagcaggaaccacatttaagccattcttctttttactagacccttccaaattatactgctcacggaaggaaccctgaagagatggcgggttttcctgcagcaatttgaaacaatttgaattcagcccccacttgctagcatatggcaaagatggcagaacgagaaaggatagcttttcccttagaaaacttctaaaaattgccaaacaaggagattttgtctccttacctcatgcattttgccatctcgtgcactactagtagtattattcgctccatctttaatgagaatactagtataatcagttaggtgagttttaagagacagaaagagttcattttcaacatgttctgagatgcttgctatgacactttccgttccataagtatctgatgacaatccacgaactctggctccattggtagctaagtcgaattcatcagagtaagcagttttagaggaagaggaatccaccctacaagtaaactgcaaaacattaaaaatgacaattcatttcattgatgagcaaagctaattagaaaaaaatgacacttaatctattaaagtcatagaaactttttataagctcacactctcaaatgattcaggtttgtctgaatactttgtatgggaacctttgcagtaattaacagtcgagatatcagaagaccgaaaccaaattttgttctttctccaacatgatgaatgagttgccacagtatcataaaagactgcattccacatgatttgcatgcaatggtggtgaagcgttctacacacagctgagcaagatgtctgaaagttctcaatgcttccaacagatttagtatatttggacgactctgcagctatactactatgacccccctcattcattgtattcttacagcctgcagattcagtgtttgagacaacacttttctccgcattaataacccgagactgcgcaaaccaaaagttaccatattagtgtatgattcaatgatagcccctgaagtttgatagttcaatgtataataaaaagagctaccgatatggattcaacagcagaagtgggtggataagacttgagatgctcatcacttttcttggccttcagaaagtctgaaatcacactgctgatgatttcatcgagtagagctcttctagctattttcattattccactctgaagatgaacagagagttcttccgaaacttcggatatgaagttcacgccagtcactggctcgtcacaattagcatcaccacatttcaccctccatacaccaattaacgatgctaatgtgattggtctaagcttattttcaccatcacgtatctacaaaacaaaaactcttaagcaaaatgataaacaccagatggcctgatctatcacaaacattagaagaaggggagaaaacatatattctaaccaagtattctaaaatagtaactaaaaacctcaaaactgaaaagaagatgcatgaagaaacaaagctaggcacaaggctacaaagaggcaacaggatcaaaatcattataaattgcatgaaatttaactaatcacaatctttcagaaaatctttaaaaagtctatattcataaaagcttaccagggctgcatctgaaacatatccatgctgctgccaactaaaaagctccaatatagaatgtggaccatgatttctaccttcaccatcaacgagaaaccagcaagcatgttcgtttccctaacagaaaacccaaacattaaagaaaattcttatgtgaactcgagccatcatgtctgatgaacttgtgaactgagttttcaccgttgaaaggaagttaccaatgagaggaatgaagctaacatatttgattcctcgtggtttagtgttagctgatctaaaacagaaccattagaacttgtctgtggaggcatcgtctgatgggagatcaaatgagtagcagaagttgcatgctctgtttgaatctcatcttgatggactgtagcattactactagaagggggaaatgaagtaacagatggggctacacttattattccattttgtagatatgcaaagccagtagcgacatgatctggaaactgcttgaagtacttaagtggtacagaatttgcagtataaccattgataattggatatacaagaagatcctccggtaagaagttagttgatagcccatcatatagctgctgttgcgtgtaagggccacacatctgaccttgctgattaccatacatccaaccacttgcatacatggtataccctggaacactcttgtctagacctgaagctatgccactaccagaagcctcttgacccgcacgacagtcttcatttgaacgacatcccatctccaaggctgaatccaaaccacacagttcatcaaaattgcaacaagcggaagatacagtagccaaatcaccacagctgaaaagcaaaaatacagtttttcttttagattgacaatccaactagttaattcacaactacgaaaaacttaactacaagttgcacctgtcacaagagtaatcttgagctacttctcttgcagagattgaaacatcatcactgtaaactcccatacacattgaaccgaaataattcggttccaaagcagaaactttcttccttctactagaataagagctaccatggctaggaaaagtggaatcaaccgcaaccatgacacagataaactcgagatatcttctctacacgaaaaaacatgatcattaaacttcaataaaaatacaagctttctcaaatattcaatttttagactgggtttaaagcaatgtcattaaatttgagacagtacccaaatcattacagagagaaacactaagaaagactacacatttatgaaatctgggagcaaagacgatcgccaagtttgtctacagagcaaaaaaatcgagtctttcttaaacctaatttcttaaagaagacaatatgcatgatacccagaagctgtaacattgaatcgaacagagaaccagatacgtgaacacacacaaaggaaaaacatcagacctcgggagaaacagtacggtaggaaaaaagaacacacctaccaaaattttcagggaagtgaagcaagctcaaggaagcgatgacactgtgatcaaattgaactgaaattgataagaagacatagaagaagaagacatagaagacgaagaagtttctcttatcaacaaattgaaaaaggaaataagaaaagaataacaattagggttcgttgaaaaaagctgtgggatgatctacaatgtttttagcaattacttacttatttttttattattcaaaaagttactaattaatagtatagtggtacgtatcatgatttaattttgtcatatatcatgattgaatttaaaattttatatgatatacttctataatttttggtcagttaagaatatgtgaagatttcaattaagtttgcatgttgtttatttgatttttttacaattagaattatatggcatcaatatatacttcttccttttgtaaatatttaacttaatatattattgtatattttaaatttcttacttttttcatttttccattttttatttttgcattatcgtagattcatatataatcgtgtttataattttctattttattttaattaattctaataatttttatttttattttcatatttttttagattctatataagattcatatatcatagtgtttctaattttacattgcaacatgcatgtgtcatgatttaatctaaaatttcctattattcattttaattttatttttctaataaaatatatgaaaactaaaataaatttaatattgtgtatttgaatttctttttaacaaggaacatgtgagatcatttttaatattttaaattagaagtaatattttttgaaattattgaaatgcctcttttgatgtcccattattcaaaaatgctccattgagttgtctattttcaaaaatgtccctaattgaatatgaaaagtttataaagtttatagatacttttggatagtaatcactacggggagactcgatccaatcatttataaaattttatttttataaggtatttaaataatctaatattcatattatcgtttttatatcttttaactatgtcaaattagattttagttttcattcttcaacctttgttagttggtaaaagatttatagcaattgagtatatttgattttcatattttaatctttcttatcaatacattataaaagtaattgatatgtgtcatatttttcactcgagttatttttcagcttaataatttagtggtcgaataaaatattaaccatctacttttgtattgagctaaaaaaaactctctcacgcaggttcaataatcgaggacagccgcatgaaccagtttttcaatactggtggagtctttgctcgccggcgtaaagatgtatctatccatcttttagtctcttgtctctattccacttttcgcaaactttttgttcttttttgtcaccttcccgaccaccacgacgttcttcctttgctttggtttatagtggttggatatccttttatcaaactttccagaatcttatattcgcgcgggtcctctagactgatagttgttttcgatgaaacttgatccaccatgccaagattcctcaaagtcaaatttgtaaaaatgcgtgaacttgagcttaatctcacacatgcgtccagatctatgaatctagttgtttcgtgatcctagtcgaccaacaacctcaccagatttcagcatggctcgaaccggtgacgaagatggcagcgaaagggttaaccctgatccatctagccttctccatcctggatcccgtcactctctttaaatggtattgcagccagttgcccttgtttgctcttgtgccacagcctccgataatgtctctatcaactctaattatctgatcgccgatgccgagctaccacacagaaagcctcatcgacctagctagagttgataagtgtattatgaagtaacccaccaaaaataaaaaaaaattttgcttggctaacccactaaaagagaaacaagactttaaaatctacaccgatttgtggagaaataaaagttaggcatagagatgttttgacattttgactttatccaatacaactgtctacatgatattacaactgcaacacaagatgaagagtcatcaaaatataccgatatcaactttcaccgccgacaaacatcaaatctggtgaggaaaacatcaccgaaacatcccaattattttcctagtaattaaaatattcttcagcttcacaaaagaattgtcctcgtaggacgcaattccacgttgatttccgtatcactatcaaacatcttcaaacacttaagctcccattatttttcgttaagaaatggggacgaatcttcgactttgaatccaacttcgtgtcttttttttttttaactcttaaattttgatacagattttatattaatgctatcaaaaatatttacaaatgtttagagtcccaaatctatccaaatgataatttcagcattatatcgttgggtttttagatttcaaaaaacaattttttaaaaaaaactgaccaatatttatctttttaacaaagaaatattaggttttcggtaaatgtaaaaaatcgagtttaaaatttgaaagagaattgaaaaatagggaataggataattaagaacacataaatcatatcttgttatgaatttatgatcattaactaattgttgacatgtgctttatttatacagttataccacacatcttacatttatccgtagctaagtcttgtgacgaacggtctaatacatttaaaatgtggctgttaaccttctaaataataacatcaagaaaacaaaaaacaccttatatcatccactataagactgtataaggattcatatttaatcttttcttttaacaaaaagaaataaaaataactaatttccctaaagttaagaagaaatgaaccaatcaaattattttgcaatctaaatatctgcatggtataacatggtcattgtgcaatcattaatatataagatatagcaaacatataataatccagctatgataaaataacatattgtaaaatttgtccgaacaagttgggatgatattgtaatagaataactataaaacccattctagacaatacatcaaatatgaaaacaaacgattaaagaaagaagcacgtcgagtcacttccattcctacctgccaaatcggtggcttcttcttattattatccacgacttgattcggctcggctcaagatcaatagtccggttccaccggttaaccaaaattcacaataaactaaattggcaattaaagcttgttttcttggtgataacgtaactttatatcataagattgagtggagaagtcatacttcttattaggcatttttagtattttactatcatttattgctagaatcaaagtttttgaaaaccggtataaaatgtcaattgtttggttaagcctattaagctgcaagccaagtaaattaaacgcggtgcgacaaacgatatgattctccgcaacttcttcatagaacccttcgacctttctcctttttttcttgtccactacgtaaacccaatgacacttgtttatacatataaatatgtatatctcacaatgttatcttacaaacacaaaacacacattatcaaattttaagagaagaaacaaaagtcttgagatcagcattttattaattcaaacaaattacaaggagaatgagaaccttggtgaagaagctactatggtgcggagcgaagaacatttcatcttcgagaacatcggcattaccagaagaaggaagagttcgggtttacgtaggtaaagataaagagagtcaatgcaagctagaagttgaagctaatttgctaaaccacccaatgttggaagatctattgaggttgtctgaggaagaattcggacactcgtacgaaggagccttgaggattgcttgcgagattgatgtcttcatcaaactggttaatctacacaaaacaactaatcatcataacaattccgtttgctttcacaataattccacaaaattattgtagattttattattatctcacttatttttcatcattctttaatttaaaaaggaagaaaaaaatggacgaagttcgtttcctttacttatttatttatttacatagtcgaatgccaatggacatttgtattccgaatacagtattcgtaatgactttatcaaatcatatatccatcgttttttttgacaaagcttatattaatttaaatgtgaaattacatagtcatgatgcaataatatatcaatttataaccaaatctgaaattacaatataacttgaatcaaattgagaatgggtgaatggttctcggctgaattggaatctcgtttcacatgcttgaacttataacaatgtagtattgttgtttagtagagaatatcctggcagattttggtgatgcttctgtcttttcatttttctttaaaacgctgtttagaacaagttaatctcatttaagcttgaagaaaaggctggacaaagcacataaaaaaatgtttatgaaaataacaagttaattaatctccttcaaagatgaatatgcccggttaattagtaataataagtctaccccaaattagtgtgttcaattgtaaatcgaactaaaccggttatgctatcttctacattcaaggacttctttgctttgttgatatcacgagttgctatcttaagcatgacaatcggctagatgatcatttcgatatcatgacttacaatatatgcatatgtatctaatatcttacatattaggaatcaaatggttgatgtaagcagaaatacaccagtatatatgtaaatccaaaccaaactataactaagatcattcggttctatttttttctttaactatatcataaaattaaacacatgtttggcctcgaacgacatttgttttcttcttgaacaatgatgatgcttgaaggctctagatgatgcttgaaacgttcattaaaattatttcatggtgatgataatcgattggcagtttgtagggcacggattgagaacgtgtcataaacctatttcacatgtacatttcaaagttttgactatcttcttaacataaggtatgctttatgagttttgagcctttgagatattattaaaaacaaagactaaaggcaaattactttgtgagtgttaaaatggagtcgtttttaagaaaatgaagaagaacaatgtatattcattaatagcactaatgatcaaccaaacatttccaaggttaaataaaagtttgcgtggatcaagacatcatgttcacattttggtcaattaataaacctggcatataacactaagtggttcaaagctggaaaatggtacaagatcatatacaattattttttgtttaaactctcaaaagccattatgttgaggtttgttgagtctagttaaatctgtcaaacccttaagagttatcaagtgtctcgagtcattctaattcatgttggaacttgttttaacaaagaggctccaacaacttttagctgggtggttttttggtgagaagttcgtcgtcgtattcgagcggctaaaatgattattcttaaataattattgattaaatgtataaatatagatggcttcaatatttgtttataacagaagacctaatgctaatagaagattcagatgccacacttgtaacatgaatgctaagaacgtccatcaccatgtatgtctgcgtaccaaaacgatgtctattctctttcaaatattgaaaacattcaaattggaatgatttttcatctctattatatttaggttttccaaatacatatctcacgttgacctgccttctttaacttctttaacagcatctaaatcaaacatatcatatgaaacttagcaggttacaatctaaaaataataataagagacaaataattaatcaaaagattacatgcccaagttcttacttcctctttctaaaacacaaggcctcttagagtactcacaacaaaagtcgaagataatgttttcttatgttcaccaaaaaacttacaaaactaactctcgagaaaatctaaattttcttttgaagtgtggtttatatatgtatatatatttttatatttttttggaaaagattaataatatttaatcagtatagaagttctgcttagactcattaatatttaatatgttaactcattataagtttacaactcaactcattgaattgatgaaaccatttgatctaataactcatttggttgtaagcttctatagttattcttatataagtctgaaaaaatattatagttgtatttttggatatctaaggaattaagaaaattgataatgtctcacctctacgataattccttttcatctttccgttttgtttttgtattatcgatttatgttctttaattattattattttaaaaaaacttctccagtcatctttttatttatcagttacattatcgtaaatattcatgcttcttacatgaaaaaacgaaatattttaatgtgatctccactagttcatgaagaaaatgcaaagttatgacttacttttatggattggctgcttaaacaaaaagttaccaacagactttgactttgactttgcgtaatgcaaaaataacggcagcatgaaaagaggttcccttcgcctcataatctgcctaagttactggtcaacaagcactactatatatttgtgtcattttcttttatttgtgttgttttttatatatagtaaattataaacatattaattattcctactttccttagaaatgatgcatggtgaaaaatttaaaaatattcatatacaaaaaagagagggaaaataatattatcagttcgataaatatgtattggtttttatgaaaataatagttttattcaaaatattagctaaaaagtactctcacacagttggtttgtttcatagttatagaatttattatgtgacacaaaaagttcaaagaatattaaaaatatttggaaattatgcaaataaacaaatatttgtaattatattatttacataacacaatcttatgatatttattttagaatatgtttacattattttatccatatatatgtgtcaaatacgatatcatttttggacatttacatttgttgtaaattaaattgtatagagttaataaaaaaaatcaacagataattttgattaaggtttgtgaataatttagtcaattcaatgcaaaattcaagatttatttgtctaatccactaattgagagtttctttagtcataaataaataaattgaaaatcttcaaatcacgaaatattttttaaagatttaatttacagaaaatctcaaatctcattacaaaaaatcgttaaaatcaaaatttgcaacaactaaaaaaattcgattatcaattttgtcataatactcatctacaacttttgtcactacataatcaattattttcttgtccaaaaaaaaaacataatcaatgattttcttaatgtaattgtaatgatgaattttgatgcgggtaaagtaaaaactaaatctacttacacaacttcctttttaaaagtatttatttcagatttgagatttgtcagatatttttctcaacgtgaaagagagaaaagagaatctctcagaaggtgagcctccaacaaagcgtgaatctctctttctctctctatctctctatctccgagatcgcatcaccggaaatctccttctacggtggtggtggtgacagttgaccagagatggcggcggagaatgagagaaaatctccttcagcagtctccgatatgggagcttgggcaatgaatgtgataagctccgttggaatcatcatggcgaataaacaacttatgtcctcttctggattcgcatttagtttcggttcgtcttcttcctccgatctctcactctttttaatcaatttcgcttttgagatctgatgatttttccgatctctgttttctcagctacaactctcaccggtttccacttcgctttaaccgcattggtcggtatggtatcaaacgctaccggattctctgcttcgaagcatgtacctatgtgggagcttatttggttctccattgtcgctaatgtctctattgctgctatgaacttcagtctcatgctcaattccgttggcttctaccaagtaattcatctcgatctcgatcttgagcatatagaatcaaattgctttgatttgagcatatatagactttgattttggtttagtggattcacatttttttgtgttgattagatctcgaagctgagcatgattcctgtggtatgtgtaatggaatggattctacatagcaagagatactcaagagaagtgaaaatatctgttgtggttgttgttgttggtgttggtatttgtactgtgactgatgttaaagttaatgccaaaggttttatctgtgcttgtgttgcgattttctcgtcatccttgcagcaaattgtaagtctttttgtttggtgatttggttttgaagcttgtggaattcaaatctgatcaattggtgttttttccttctgtgttgcttagttaataggttctctacagaagaaatattcaattgggtcctttgagttgttgagtaaaacagcgccgattcaagctttttcgcttcttgttgtcggtcctttagttgattatcttcttagtgggaagttcattatgaagtataatatgtcttccggttgctttgtaagtatctctcttcatggctctgctagtattgttatgttatcattggctaatgttctacaatttgcagctattcattcttctctcatgtggtctagctgtgttctgcaacataagccagtacctttgcatcgggcggttttcagcagtatcgttccaagttattggtcacatgaaaaccgtctgtatcctcacgcttggatggctcctatttgattctgcaatgactttcaaaaacgtagcggggatgattgttgcgattgttgggatggtaatctatagttgggcaatggaattggagaaacagtcgattattgcagcaaaggctttaaacagtgtgaaacatagcttaacagaggaagagtttgaacttttgaaggaaggtgtagaaactacacaatcaaaagatgttgaacttggccgcacaaaagattagagacagatggatagagaaagaaacatagtcttcaggtacaatttgttctgttataatttttgtatgttttgtgttatctaaaccaagagatcggatcctcggagattagtgtctaggcttcgatctaaagtttccttggttatacaaatgttttgtgttatttatatctttttacccaattccatggaaataacttcaatgaccacatgttcttgttttacgtagcactcaaagagtatattcctttatttatcttatagaatatgacatcaaatgtagagtatattccatttgataaaacattcatatggatagtgaaaacaagaatactggagaagacttaaaagaacttctgataaaaacattcatatgctcccaagtaatgtgaaaattgtaaatgagaaggggaaaaatgttatttaatacctgaactttcaaaaagtggccaaattaaccgtgaatttttgaaatggccgttttatacctcaacaaaaagttgacttctaatttaacctataagttatcgttgacccggccaaatcgactcaccattaacacttcttaacagctctcctaacagcgtaactaacaactgtttttgtccttaaaccaacaataacggctgttaggccatgttttgtaacggctgttaggagcgctgttaaggagtgttaacggtgagtctatttggccgggtcaacgacaaattataggttaaattagaagtcaacgataaattataggttaaattagaagtcaactttttgttgaggtataaaacgaccatttcaagagttcacggttaatttggccattttttgaaagttcaggtattaaataacatttttcccaaatgagaagtgatactcacaggccaaatagctagaatgtaataaatgttatgaagaaaacttcagtcatggttgtgatttgaataaaacaaaaatgtactgcaatattatgaagaaaacttgcaagggaagcatcagtaaattaaccatcatcaaaaagacccaatgcattgaatttgctagcacttgttccaggtgagcaccgagcttcacttgatgatcatctctaggtgggttaaagcttctgttctgatgggcttattgatgttgcatcatattcatatgttttcttcatatgttctacaaaggcgtaaacattaagatcctctacatggtctacaaaggcgtgaacactacaacagctttggtattctccaaaaccttggatttcaacacttaggagagtgttcctttcgagattaaagtagaagacataaaacggcttacatacctttttcttcgccaaaacaatttcacctgtagcagttatcccaacaataaaaagatcgtagtaaaccttaacgactctatcctcatccctcaaagtgtacacagatgttgtccattcctgtttctccacatcctctagaacccacatacataacttaaggggaaatccaccgccatgagcatacttcaaattaaccacacctaatttacctttatagtatatcaatttagtagatcgttcagaaaaacagtcttggtttagatttagacatttgaatttctcggacctgacatcaaagcaaactatataccccaagaaatcatcaatgttataagctatgtaatacaaagccccattgatgcatatccattcatgcgaaacaatatggatcaaggggcattgttggatcttcctccatctcacttttctagttcccaatgtcaaaatatgaatgtcctttgtttcattattgtttatcttattcatgagcaataccttgaattgcttgccaaccggatcaaacaaaaaaaagcttctcgtctctccatacgtcaacaacaatttaggtaacatcgcataatgtcccgtgctagggttacatatgacatctgcctttgtgatccacatagcagagaaatataccaaaccagaagtatagttacaaatgtttaggttttgagagaacttcgtatgaaaatccgcagttgctacaaaagatgacttcccatatggattctgaggctgaggcgacgagaaaaacctccactcaccgtgttttgaaaaggcaaataagagacgtggacgagctgacgatatggtcaagaacaactcgttgaaatatggacggcaaagcatggaaccccatagctttgagacgcaatgaaacctagtgattgactttgcaggcaatctcgagagtatctcaagaatgagatcgatagggatggaatctgagttttcttctccattcatgatcgtatttgtattttcttatctgatgagagatatgaacacaaaatcggtgagactcttaaataatgtatcgtacgataaagtttgacctaattaatcaatcttattcatggttttcgctaacctaggcccaagaagcatcgtatgattgtatgagtatatatatgttaattgtagtatctttccttatttatcattattcatttatatattttaccaaaaaaaataaaatcatttatatttttttcctgaaaacattcattttatacttttctgaaaacaagtcttgataattaatctgaattcttcttaaacagtctaatcaaggtgtttaattttatttttggagtccaaattaaataaaatgcttgcagaaagaaagaaagaagcatctcttatctcatagcagagaacaatggttaaagtatgattgtatatttgtatggcacgataaaataaagctcacgaatctctcatgtttagaataacttcttttattcactttactgcaacagtacgtgtgtgtgctccttcatctgtcatggtaaacactaaacagttccaaatgcctttttaccttttctaaatcctcaattctaatgattttaaatgaaacctaaaattgatagaatcacttcaagttttgttttctttgcaatcattcaaaaatcaatagaattttaaagattgacagaagatcctaaaagttaattatctcagccgatgtttagcacatagacgtaaagtcaaaaaacaaaacactctagttcctaatacataaatctctaaaactaaaacgtaaataagcagaacatagaaacttattttgtaacttcttttggtccgaatattttacccaattattacaatatgtaacgaacttcacttgtgtgataaaaaagactaattacatttacctattggattaatatgactacataaatcgacataactcctccaataactccaccacttgaaccatagtaggcctttctctagtcgactctttaatacaaagacaagcaatcctaaaatactcttccactcccttctcactaccacaaacacctccaaaatccaacatttcataacaccgattttgctccaccatgatcacagcccattgagccaacccaacttccttctcatccacaacaaccgttaaattcggccgtctccgcgtcgccaattccaacatcaatacaccaaaactataaacatcagctttaaccgtcgccgcggtattcccttcccaatactccggtggcatgtaccccatcgtccccgccacttgcgtcgacacatgcgacctcgacgcatcgatccttcgcgccaatccgaaatccgcaatatgcgccacgaaatccgaatccaacagcacattactcgatttgatatctctatgtataattggtttcggtaaaccatgcagataagctaaacccttggccacatcgcgcgtgatattcacgcgcgttgaccaagtcaatggactgttctcttcgtcagtctcgtgtaaccaatagtcaagactacttttctctaagaactcgtagataagaatccgatctgatcccgagatgcaataaccgaggatcctaactatgtttgggtgattgagacgacctagagtgtccatttcggctgcgaattctcggaatccttgtaaagcgtcgtgatcgagctttttaacggcgactacgacgccgtttgagagctgagctcgataaacgagaccgaaacttccgtcgccgacgataagatccgatgagaagtttttagttgctatagtgagttccgccatggatatttcacagattgatggatcgaagctttcggttactgtttccgtgtttagatcgggatcggggtcggggaagttacgattccggcgaggatggttttggattggaggacgacggcgacatacgatcataacgacggtgaagacgataagcaagaggaagatggagcttatgctggtggctaggattagtgagatttggtaatccatggatagtgtttgggatcagtatgagattgagagagagagattgagaaagagagagtaagagatgatccgccattgatagtgacggaggaggaagtgtaaggttttgattgagtcgtagtcgtagataagacaagtcaacgattgttgctggagaaagtctacgcaggttgtacacgtgtcttgacgatattggtggttacgaagtatgtgtaaaatgcttgaaaatttctgctatgaagtgggaatttctttacttgatatcaaaattagttagcttatagttttggaacaattaaactacaaggtttagttgcttaaactaatttatacccctaagacaattttcaatgataaagtgactctattttttttctttaattataaatttgaacaattcaaagtttagagtttgtgttgaattcttatattttttattatttaatggtagagtcatgcatggatttctttaagagaaataaatcatacttttaaaatgataaattataaatattttggattctagtaaaagcattaaaataattagaccaaactcatctaataaaagcatcaaacacaaactcatttcattacttgttacctagaccaaacacacctaaggaaagcatcaaacacgaactctttaagacaacatcattactaagataattagacagaacaaactcatatctacataatttgctttcattattagagaattcaagggttcagaacaaaatcatatgagctcaaaaccataagaaaccgtaaaactaagcgaaacagaacagaacatacgtcataggacagacaaaatggtcttaaaacactcgattgaattggtttaagaaaaagtagaagaatacactgtcacagattttcgttttgtttgttttcgtttaaagatcttgagttgttttgtttatgcttataatttgtggggttcaagtgtttcttgtcatgattatgattaatatttgatccaaatactatttttaacatccgtaaacattttgttatgtactaaatttatttttaaaaataacatgctggggatgatactatattttttttttttccccaactttttttgtcactgtttattataaaagggatgatactatctaatgtccaccaaagaaatcaaatcaatttttttttatgacgaaaaagaaaaaaacagatcaagagtcagaaatctcgtgtggaaaatcgacgctcatcgcgtcttcaagacactagcgatcgatgtatttgatttcatcaatctcttcaaacctaagaaaaaaaagtgcagactgaaattaagaactgaacaaaaacgagatttggagtatggtatagaagacggaagctgagagatgaagatgacattatatagggcacaattatttaccctaatttccattgatttgggcttttgtgaagcccaataaggaaaatgggttcacattttaaaaatgttcaaaaacgtgtttaaggttttgtataaaaggaacgtaaataggttttttattcctcacttctcgtcagagtcttacgccgcagggctcatcggagtttcaggttcttcttcttctctcttcctccacctccattttcaaagattttacgattcagacttagttagaatcttagtcgaatcaatagagaactgattcagagttattttgattagagcttgatttcaaatttactgtttattgaaacgaattaggaggagaagaagaatgtctcacaggaagtttgagcatccaagacatggttctcttggtttcttaccaaggaagagagctaatcgtcacagaggaaagggtatgtctttttttcaaacttaggactgagaaggaaataactccaatgggaggattcgcacattacggtatagtgaaggatgactacttgatgattaagggttgctgcatgggtccaaagaagagagttgtgactcttcgtcagtcactgctaaggcagacttctcgtcttgcgatggaggtgattaatctcaagttcgtcgatacctcatcgaaggggggacatggtcacttccagaccagcgaggaaaaggccaagtattttggtcgtgctgcaagaaaggcttaaaccaagtctctattcttttattagctcgtctttaaaaattctttgaaagataactattttttgaaccatctgttgcaattttgtattttagttatttggtgaatttttaacattttgcttccgttactattgttcctcaaatttcttctaactaaattattatgaatcagatcttatataattttttataagatgcaagttttattgagtctatgactaactggttagagtaaaatagagtgctcatgaacttttttagaaaaccagaactaaaacgtaattgatttgaataaaccaaaccatttttgagtaaactctaaaccaatccgaaccaattttgattggaatttattaaaactaaattaaccgaaccgaatcaaattgaatcacaaaacaaagagagcaaaacccaaactattttgaataaaaccagagctaaaccgaaactgattcgaacaaaccaaataaatttgaataaaatctaaaccaaaccgaaccaatattgattggaatttattagaagtaaattaaccgaaccgaatcaaattgaataaaaaaacaaagagattggtatgagaaaacccaaactaaaccaagagtgaatttggaatcaaaggttagagaattcatcttcgtttgcttgtttttgttctctctcccagttcctgggttcacgacgaggaatgttgcatatgattttatctcaaagagtaatccttttacgaaaatatcactcttctgcaaatgcccttgttaccaaatcaccaaattctatccccgagttggttaaacatattgattcggatctgatacgtaatgcacataaggtgttcgacgaaattcctgagttagatgtcatttctgctacagcggtgattggtcgctttgtgaaggaaagcagacatgtggaagcaagtcaagccttcaaaaggttgttgtgtttaggcataaggccaaatgagttcacgtttggcacggtcattgggtcttctacaacttcgagagatgtcaaattgggtaagcagcttcattgttatgcgttaaagatgggacttgcgtcgaatgtgtttgttggtagtgcggttttgaactgttatgtgaaactgagtacgttgacagatgctcgtagatgttttgatgacactagagacccaaacgtagtttctattaccaatttgattagtgggtaccttaagaaacatgaatttgaagaagctctttcgttgtttagagcaatgcctgagagaagtgttgttacttggaatgcagttattggagggtttagccagacggggcggaacgaagaggctgtgaatacttttgtggatatgttaagggaaggtgtggtgatacctaacgaatcaaccttcccttgtgctataacagccatatctaatatagcttctcatggtgctggtaagagtattcacgcctgcgctataaagttcttggggaagcgattcaatgtctttgtttggaactctctgatcagtttttactcaaaatgtgggaacatggaagatagtcttctggctttcaacaagctcgaagaagaacaacggaacattgtatcttggaactctatgatatggggttatgcgcacaacggaagaggagaagaagctgtagccatgtttgagaaaatggttaaagacacaaacctgagaccaaacaacgtgacaatccttggagtattatttgcgtgtaaccatgcgggcctaatacaagaagggtacatgtattttaacaaagctgtgaatgattatgatgatccaaacctactagaactggagcactatgcttgtatggtggatatgctttctaggtccggccgtttcaaagaagcagaagagcttattaaaagtatgcctcttgacccaggaatcgggttttggaaggcattgcttgggggatgccagattcactcaaacaagcgtctggctaaattagcggcgtcaaaaatcttggaattggatcctagagatgtttcatcatacgtaatgctttcaaatgcttattctgctatggaaaactggcagaatgtgtcgctgatacggaggaaaatgaaggagactggtttaaagcgttttacgggatgtagttggattgaagttagagaccaaattcgtgtctttgtgaatgctgacaagaacaacgaacttaaggatgaagtctataggatgttggcacttgtttctcaacatcttgaagaaaatgaatgttggaaagacttgtgaatacaacacatcatgttttttctcttctgctgttcttaaaaaggaagaagtaaatcgcatagtaatttgtatcactgcagcaatcaaacagtatcaaaacgataccatcactatttattgatataagatatatcaataagcctgtgacttgcatagtcattacttcattactactacaacctttttatctgctaacatcaccttgtcaccaatgttatattaggcccgcatgtatggaaaattaattgattagattgtattgttttaataacataaaacgtatatcgaataagataatgtaacaaagaataatttttaaaaatgcccctttcaaccctattattttttaattatatatttttttctttatcattttcatttatactctcttttactttttaacacttatccattaaaatcgggtaagcataatcaaaatcaggtttattatgatgaaatagatagttaaaatatatagcaaaatataaaatgtaagtataaattttggtttttaaaaaccaaaattactaaaacagaaaaagtatatgaactattatttaaagttcaaatatcatcaataatatagagtgtataatttaacttcggcttactataaaaacatagatagttaaagtgtataagaaaataaaattataaattttgaaattcgattcaaaacatatttactaaattaaatattaaaaaataaaaattacaatttactattaaaaattcaaatatcatcaataaaaacttataatcagcatgcctcagtctcagataagaaccacaaaaatgaaatcgtttcttgctaaaaaagaaacatcgaaagcccacgaatggcccagtgggtttctatgtgtttcaatagcccacgaaagcacctctactacaattatattcaccagcctaatattcaacaatgacgataatgtcagatcttccacgggatttgttagcggagattctcagtagggttccgttgacatctctaagagcagtgcgattgacttgcaaaaagtggaacgatttatccaaagatcggagctttctcaagaagcaaatcgtcgaaacaaagaagaagcaattggaatcgaaggagattgaggtgatcatgatgaggaattttagggtttatctaacaagcatcgatatccacaacaatgttgatccatcatttacgcctaaaggtacacttattagcttaagcgatgatgcaaaccatcatcaagtcgataatgtatctagagtctttcactgcgatggtttactattatgcatcaccaaagacctccactataggcttgtggtttggaacccttattttggtcaaacaagatggatccaacccagaaattcttaccacagaaaggacaattacgctcttgggtacgatgagaagaagaaccacaaaatcctgagattgaaggataattattacgctccacgggaacggatttgtgagtttgaactctacagttttgagtctaattcatggaaggttgtacttgatgtcagtcctgactggtatataccttcttataaccgtggcttgtctctaaaggggaatacttactggtatgcaacagagaagcatgtcaatgttgatttcttgatttgtttcgatttcacaacagagaaatttggaccgcgtttgcctctgccttttaacgctaccgagtctcctacttatgaagatgttgttactctctctagtgttggagaagagcagcttgcggtgttgtttcagagtgagtatacattgatgatggagatttgggttacgagcaaggttgagtccacagaggttttgtggaacaaattgttcttagaggttgatttgatagcaatcagctctcactttcagtttctggcagaggctgggagtttcttcattgaccagaagaagaatgttgttgtggtttttgataaagatatggatgaggctaccgatcgcgacatggcttacgttgttgggaagaacggatacttcaaaaaagtggatattggggaagaagcatacacgagttgtttcccacttgtatgttcttatgttccaagctcagagcaaatcaggcagctaacctgattattacgaactactgttttctttttctgtcatcttcgattgtataaatctgaccattgttatcagttatctggaatctcagagacatggcctctctactatatgtaaactctcgtgtggctcttctagacatttctttgaaacagtcaaatgcatcttcaactttacgtttgagagctttttttaccattgctagtatatatatgtgaaaaataaaggttgtaagaaaataaaataataaaagattaattgtcaggtctcatatttcttcatcacgcacatactttttttatttcttttattgtaaagggtaaaatcacatgttcactattaacttaccactaaaatgcggtagttttggatagatattgtagaatgtagtagatttagaaagggttttccaaaatgtggtagattcaacaaaatttctttttttttaaaaaaaaaaatctaccacattcgagagttgatactttgttagctttgctttgtattgataattttttttttttttttaattgataaaaagaaaactagatattgacattcggatttcggatcggatttgaatcgaagtttttcggattcagataatttggatgggaaagtttattatccattcggattttatgactattcggtttggatgatgttggattcagatcggttttaggaaaaaaaattggttaaattttacaaaaatttggttaaattttacaaaaaattgtataattgtaacaaatatgactaaattgttttggatatctaggttatttcggatattttttggtataaaattataactaaatataactaatattttttaaaattataactaaatatcataatatttttagaggtataattttattttgggttatcgaatatccgtttggtttttggttcgaatcagattcggttcgaataattcggatagaagaagtcattacccatttggagttttgtgattattcgatttggtttcaaaaccggatttttggatctgtttcatattgatttttggatttcggattttatgtctactcctaaaaaaacccatgtagttttcgttttaagtgtagaatttatcttttggttgtaagttatatctagtctatcttttgggacgtttggtttcccatgtttggattgtttgttgtaagtcctatgtacaactccatcttctatcgagaatcttttagaaggaaaaaaaaaactcgtatttacgaaatttgacagtagaaaacaaaaacctaagtacaattcaaattgacaaaaaaaaaaaaaaagtaaaaattcttaaaaggggactacagtaaaaattcatgttaaatctaactgctcgaacgttccagtttccaccacccggcgcgtgagtagtaccaccgtcgtcactttcacaatctcccaacagagatccttcccatggcgttcgaagaattcccacctctaatcgccgaccagctccactacttactcaatcactcacctgattccatcaaggtaacaataacatccccaatttcacgatattcaagtcttctttggattttgcttatccttcagaaaattaggttttctaagcttaagaatctgatttttttctttatagatcgcaaacgtgtggtctggtaacaaaattaatcccaagattctcgatcgctttactctcgtgataccttactgtctagagacaatcaaatgtaagtgtttcttcgagtaattacgctacgatgttgtcgaagcggatcgttgatttcgtcgtgttcttatggttgcaggggatgttatttacaattcagagtatgcaatggatcctccagatttcgtatttggaccagacgacgaagattttgtgccgtgtaagtgtagcgctattgctcctgatgatgatcagatatcatcactggagaaggctttgtctgagtgggatcacgaggactccactcggttacttgttatcattcaaggattgaggttttttcctttgaagcttttatcaccattgtttgttttagaatttgtcctttttttgaggtttgtgcttgactaagtcgatgtttagggatcaatatgtggcctaccaaagaaggcgtgtgggtcaagttgatgatgatcgagttaagtttgagattagcaccgtcttaactcgcaaggtatcactcttgttactttgtttacgatagaaatcatgattagttttgtttgtgtagctaaggcctcttcgagcgtatagattctgtttaatgttaggcttgtcactaactacggtttgataagtaattttggttcggaacaactgtaaccactattttagttagaatttcttattgttctctatgtttatgttcttcttgtttgctgattctcagggaattgaaatgcaaatggcttcaggagttgacaaggtatttattgttgtcaagatttttgattatttatctttgaagttagatgcattgtatgcatttgactttccattgcctttattttttagtgtagccagaggaagtcaagtttgcagtacctcttgtgatggatatgaacataaacaaaatggtggttggctgcccttggaagcatcagcagaagatttatcttcaggttttctcttcgttcttataattttatccttttcttcactctgttaaaattgctggcatcttcttgagaaacttgttgcggatccaggtagtatacccgattcttcggaaatatgaagcagcaccgtcagcacctcgtttgaaattagtatcatattatgatttaaaatcgctattctctgttgaggatgttaaactttctccatggatggacgggatgtaagttagttacagatgtacacacagttcactatacctgcaaaccatacatgtattaatcagtaatacttacatttctatttcaaaggtgcttggctgaatatcttccccatcttgaagaaacacttgagagacaggtcagttaaactaaatcttcttaatttcctgagtacgagtgccttatttaccttaatttctagatccatgaagctgttgctgcaattgatttaaggaggagttttattgaggcattaagtcttaatctgggaagacctcttgaagccgatcctgtaagcatttcttcgcacgccttgacatatatttagaactatttccgagcttcttaactttcttatttgtttttcttgctagaccttttgccgtaaggctacattccttaatgcctctggacaatttactttcatggtaattattctatcactattcaagccttgtttaaaaagttctattcaatctttgccaaagtggattttcatacttgtcttctagagaaatctcaatttcacaaaaatatgtagcagtggattattgggtttttggctttgctgtaggttcatttcttcttttcaactcaatttccgaagcagcaaccaactctgatgctgcaaagttgtcaggtatcaaaactatttgtaaacgaactaagtagaaggcttcgactttctctttatttatttaggtataaaaattgacaagctttttatatgcagcatttaaaccaatcgagtgtgccagtgaaatcgaatctcctcactgagtacccatggagtccaagatgggaagtgggacgcatggctgagcgactgtggttagtctctatggactctttcttagatgtcttatttaactaattctccttctgaacatttaaaattttacttttttgcagtgacttcctgaccgacgaggctgtcaactttaaaaaatattgtaacgaagctctgctccaacattagtgtatctatttcgaaagttagtattgtccaaattttatgtgacactcctcttgctatgtaaactgaaatggattactgttctgcattaaggagaatacaattataagcaatttgtcttgatttcaacaagattttgcttggctataggattcattggctctgtttgcttttacatttacatgtcataatagtttcgaattttacacatttcagttggatgttaagaaaagagagggaattgatggggttttgtgggtttaaactttaaagtagtcaagaattaagtcattggtttactgttgctctatatgtgtaaaatgaaggcaactccaacggttcttaggtggaatagattatttagacgatttaacatcataaagtccgtggcgactgtaacatcatagattgttttttatttttttcagtagctggtgatgttttttgatttaacttatactactcaaaatcaaaattccataaaccctagacgaccaaacagtctcttcaatatgtaaaacagaacaaagtttttgtagtagcctaaaaagacactcccatggaagctctgagtcacgtcggcattggtctctccccattccaattatgccgattaccaccggcgacgacaaagctccgacgtagccacaacacctctacaactatctgctccgccagcaaatgggccgaccgtcttctctccgacttcaatttcacctccgattcctcctcctcctccttcgccaccgccaccaccaccgccactctcgtctctccgccaccatctattgatcgtcccgaacgccacgtccccatccccattgatttctaccaggtattaggagctcaaacacatttcttaaccgatggaatcagaagagcattcgaagctagggtttcgaaaccgccgcaattcggtttcagcgacgacgctttaatcagccggagacagattcttcaagctgcttgcgaaactctgtctaatcctcggtctagaagagagtacaatgaaggtcttcttgatgatgaagaagctacagtcatcactgatgttccttgggataaggtaatttcgatttcggaataataaagtttcttcgttttaatttcatgaattggataaaggaaggaacttttatctagtgaaggttcctggtgctctctgtgtattgcaagaaggtggtgagactgagatagttcttcgggttggtgaggctctgcttaaggagaggttgcctaagtcgtttaagcaagatgtggttttagttatggcgcttgcgtttctcgatgtctcgagggatgctatggcattggatccacctgattttataactggttatgagtttgttgaggaagctttgaagcttttacaggtagtttgacttgctttggtaatttgacgagcgttggctttataagaactttcttgatttgatactttgttattgagtcttgtgtaggaggaaggagcaagtagccttgcaccggatttacgtgcacaaattgatgagactttggaagagatcactccgcgttatgtcttggagctacttggcttaccgcttggtgatgattacgctgcgaaaagactaaatggtttaagcggtgtgcggaatattttgtggtctgttggaggaggtggagcatcagctcttgttgggggtttgacccgtgagaagtttatgaatgaggcgtttttacgaatgacagctgctgagcaggtatacagtttagatacctttttttaatttctttagcatgatataactttaggtttctcattttaatgtatgttgtgtggtaggttgatctttttgtagctaccccaagcaatattccagcagagtcatttgaagtttacgaagttgcacttgctcttgtggctcaagcttttattggtaagaagccacaccttttacaggatgctgataagcaattccagcaacttcagcaggctaaggtaatggctatggagattcctgcgatgttgtatgatacacggaataattgggagatagacttcggtctagaaaggggactctgtgcactgcttataggcaaagttgatgaatgccgtatgtggttgggcttagacagtgaggattcacaatataggaatccagctattgtggagtttgttttggagaattcaaatcgtgatgacaatgatgatctccctggactatgcaaattgttggaaacctggttggcaggggttgtctttcctaggttcagagacaccaaagataaaaaatttaaactcggggactactatgatgatcctatggttttgagttacttggaaagagtggaggtagttcagggttctcctttagctgctgctgcagctatggcaaggattggagccgagcatgtgaaagctagtgctatgcaggcactgcagaaagtttttccttcccgctatacagatagaaactcggctgaacccaaggatgtgcaagagacagtgtttagtgtagatcctgttggtaacaatgtaggccgtgatggtgagcctggtgtctttattgcagaagctgtaagaccctctgaaaactttgaaactaatgattatgcaattcgagctggggtctcagagagtagcgttgatgaaactactgttgaaatgtccgttgctgatatgttaaaggaggcaagtgtgaagatcctagctgctggtgtggcaattggactgatttcactgttcagccagaagtattttcttaaaagcagctcatcttttcaacgcaaggatatggtttcttctatggaatctgatgtcgctaccataggtatgattaaatgatgcaattttcatatatctgcattgctcaaaatatgcttgttttgtgagctaagaacatagttcccacttaatacatgtcccaaaagttgtaccaagattaacaagttgctgagtaaatttcactaattatgctgcttgaattttttgatcaaactgtagacagaaatgtaaatttcactctcaacatttctgtttagaataacgtaggattagagattgccttagtgtggctttgtccaacttttctttccttgatttttttcttttcgatttagggtcagtcagagctgacgattcagaagcacttcccagaatggatgctaggactgcagagaatatagtatccaagtggcagaagattaagtctctggcttttgggcctgatcaccgcatagaaatgttaccagaggtgagggaataaatctacaattcaatcaattgtgtgaaaactgttggacatgattatagtctggtgccttgtttgattctgttatttataggttttggatgggcgaatgctgaagatttggactgacagagcagctgaaactgcgcagcttgggttggtttatgattatacactgttgaaactatctgttgacagtgtgacagtctcagcagatggaacccgtgctctggtggaagcaactctggaggagtctgcttgtctatctgatttggttcatccagaaaacaatgctactgatgtcagaacctacacaacaagatacgaagttttctggtccaagtcagggtggaaaatcactgaaggctctgttcttgcatcataatatactcatatgtagcatgtctgagcttgcgagattctctttgttttgtaaattctctctctaagttagtgtttataaatgaacacaaaaaaattaacgttcttggcacacccttttccttgatctaaactataacataagggctacaattttggattctttcgcaatcaggtacaagcagaacttgacttatcttacattcaagcctttcacaacttaactatcagtgtttggagacttctgtcttgtttatgttttataattgtgctctggttatcatctggtcaagcgtatagcagagaatgatttggtaaatctccagccagatgattttacgttttcggttctaggtaacaagctgaggccaaacatttccttcggcattcgacttggctcaacaaatccaagcagcttagccacaagagaagcactttcttttatgtggtccatatcttgggtgttggtccacagcttgtgcgccacttgcaggcttctctgctttgagttcacctccacgccccatttttggtaaagccctattctttggttccatggaaacttctttggtaattgtttggaaatccattccttctcgcgtgtgagtgccttcactgtttgcatcctgattagacaccaaaggaattggttagcatacttatgagtatatgattgatattgatgagactcgttaaaaaggtgttgcagaaaaataccttgatgtttccatgtcattagatatcgtctgcttcagaaaagatagccttcgaagttcaacttccatataaacatagtctgaaggatcacctttgaagagcaaaaagaagtaggttctgtgaaccagtggtacattgcatgctgcccaaagctcaattattttcctttgctgtctctcaaagtctgaagaactgattgaatattgtccattagcagctacctgtagtttctcctgggaagcctctgtggaatctgtttccttaggttttgcttcttctacctgcattttgtgatcatccaaactgttgagaaacgaaagaagtttttgtctccccaagaaaatattttttttggcttaccgaatcaccaacctgctctctctgtgactgattattggtggcatctgtggtttctttatttatatcctgaggatttggcaatgcattctcgtttcctctaacgctatctgcagggctttccggtctgatctccattctttcggtttttgtgggagcgtatggaatcccataatctagctccggtgtcgagtcaattgagtgatgcttctttgccatttcctcaagccctgctacaaattcacggaagctattgcccatctcaggatcatagtctttcaggctacgcgtatcaatggaggtagaactccctgaatcaaaggaaatgctcgaagtgttgggtcttccaggagaagcttttgtctgcataaccctccaggtaggtgatgtattgttactaacttccaaactctcaaaccaatgaggagatctaacactcaagagattttctctgcaacttcggcttcttttggcagtaaaatattctggaggactcttgaaatctcttctgaaggagggtgattgttgttgttctgctgtgtgcatgctcataaggtattcaattttcttctgcatctccttaactttttctttcaaagccatgtaagtgtcgttgtcattatcatctgtcccaatatttttgcagacagatgattcgttacaatctttatcagcctcttgttgctgtttgctctcccacttatctctagatgtcgcatcctcatctaacttagcatcgttgggtgttaactccacttcgactgttgcttctgattggttattaatagggagtgaattcaattcacagtcttccgttgattgctgttctgactgagcattttcttctttatttaagcattgctcagcttgctttgtggaaggactcattttcctctcttcattcttcatttgttcctcttcattcacagattcctgtgattcttgagcttcaactgatgggcctatctccaaatccgagttctttagagttagctcataggtctcaggcttagcattcacatctattgtttttaaagataagtcaacattttccttttctgcaggtgtgctaatctccatatcttcattctcggctttctcattacttgtagaagagttatagctttgttcgtattccagagctgataatggttcgtcctttctaggtgtgctaatctccatgacttcattctcggctctctcattacctgtataagagttatagctttgttcgtattctagagctggtaaagtttcttcctttgctgcaggtatgctaatctccatgtcttcattctcggctttctcaatacctgtagaagggttatagctttgttcgtgttccagacctggtaaagtttcttcctttctaggtgagagaacctcagagatagctatcttatcaacaatgtcgtctaatgagtcatggctttcgcatgctgctggttgtccactactctgctcagcttcaggttcaatgcatctaacttctttgcatgcatcttccagtctttcgtcggttatttgaaccaactcttcccagtcatcatacaggttatgcctcgaaaattgaggggtcttatcatctagcaggaaatcatcttcttcagaattttccaaaaactcaaagttcctctcggttaagttattgatgatactaggttctccaagatctgttgaatcatagcttcttcttcggaaatcagcatcaaaatccatggagctaaacatggattgttcatccatcctagaagaccgctcttctgctgttgatttaagtaaattctccacctgagattgagctatatcacatggatcgaaccttagtttgcggatgaccgttccaagagtaagtaaactcctgtttatatgacaaccttctttcaatcttgtaccagcagataaagtctgagaagcacgttcacttccagccagatcaatgaagcacttgagaggcagagaaccaaaaacacatgtcagcagagaaagaaaaaggtagtaagcttaatcaatcaaaaacactactcattgtaattgtataataccacggacgctgcaagagtgcttgagctatccggagaatattctcgaccagtgctttcgattgtctgcaggaaatgcattgtttagcatagcgaggatgaaaagttagaatcgacgaacaaaaggatggattaactgagaatatgtaccagccggagtatttgatgtgatctagagctaacttcattcagggaggtctctccaatcttcctctgagctgcaacaacactggtacattagttaacgttcaacttaattgaaatatttgtaagcccgggcatgttactcactttcacagactgtaagaagttcctctagatgtgttctgtcttggatggtctcctcaataagtttctcaacgacggttcctctctgatgaagcaagcggatggaaatgagtgggtctaacacaatatgatagcataatatcgaaaaacacgcgatgtgtacctctggatcatcgaggagcctccgttgattattatccccacttaggagatccctcacagcttcattgtagatctcaatcgcagagaatttgagggtaaatttgcggtccgtatgctgaagaaaatgaaaaagtttggttacttatgaaggaagaaataagaaagagatgtcaatgccgcagggtttttgttcaaaccttttgaatgtaacaaaaaatgtcatccattgcaaatttagtgatgccacacattgtatacgtcttcccactgcttgtctgtccatatgcgaaaatacttgctgcaaaaccaaatgtgtcaaaccaaattcattgttacaaagacaaattagatcaaagtatttaaggttgttttttggttacagttgattccgccgagaacacaaagagcaacctccttcgctccatcttcatagacttgtttcgtgggagaatcaaatccaaacactttgtctgtaaaacaaaatttaaaaaaaatcttagcatcatgattccacaatggttgaatcagccttgaatatttctgaacatcttaccaaatgtataggtagaggggaagagagacctctcaggcaaattgttattgcatactattgttgtgttgtttacacattcccaatcacatatatcattcctcgccttctctttctcgttctgcggccttacccttaccgaaaccaatatcttctccccctttccgccactcgccattttctataccctctctttcttcaatacattcctaccggaattggaaccccttgcttgaagatgaagggagagagaaaaaaggtttaggttgagaagaataatggatttaagaaaaagatagaattagaaggcaaattctaataatgggtgataattaaggctttattggggtttcttcttcctcaaacaaacatctatatattctctaaaccctaaaataagaatgtagacagatatatcctcagctaacctatgacctggctaagctttttacactattggccaaaaggcccaaaacgatcaaaatacagatattagagaaaattgtatccaatcaaatattgaaatttgaaaaccatgaatgcgttgccttgtcaaacacacaactgaaagcattggtggcatttaccaagaatctacccttatgttctatcttacaaataaaaaagatcgtataaattcattgttaatatggaacaatattacatattatatgagcgacatattatatgaaccggtgaacgtaagtgaatatgaaaattaacacaaacacttcataaagtcgaaaaatacaagtaaaggaaatcattcacatcattattttacctctctattactctatatcgttgtttttcttttatgtttgaaattgtttcacaagcatatcctaagttgtattaacatgttattgagatttagggctttgagtgtttacttctcacacaagaaacatatagatctcacaatattatgtatgtggatatatgagttttctcttttagaactctctgtactcgtcgatttatgtatctctatctccaaatccaggattatcctcttctggtcaagttacttctcttttatcctcttccttgggattatcacttcatctgactcgtgagctgaattgcttctctcgatggtcttttttgtttttggtaaaaggtgaagttacttctgtcgatggttgaaattctgagtatggtttttgcttccatgttttaacaaattttgtaaaacctaaacaatttcattttaataaatattttaattcttagtcaagataaatagcagaggtttgagaaaaagagacgaaattggtctattttgggatcgttttgctataaggttccactttcgtgtgctgtctcatgcttctacaaaagttttaatagatcagaagaatcttaagggcatctttaactcatctctatttttatctctaacataaagatttctatttttaggaaccattggagtaaaaatagagatttctattttttctctgtatttacaagaaaaaatagagacaatcattgaaaatggtctaacttgttaatatatagtagaagaattaattagtggaaagagagaattttttttttcatgaaggtccatcaaatttagcatttacattcacattttttttaatatgaattaataatgggaatcaaagctggtcttaataattattggtacagttttttatttaaatgtattaaaaattgattagctatggcgttgtttttaatggtttcatatactaaaaccgtgaacccaatattggtttaatcaatattaaaacccaactttatttttgatccaattccctaggttcaaagttcaaacaactacaccttttaaactttaaacgacacaacaaaaacagaacacaatataagaaaaccaaagtgaaacaatttgtttcggaaagacattagacaatatgcaaatgattaatgccaaatgaagacattatactcgaccacggcatctagaccaacaaccttataagtcttggcctgtgcatagcctctagcaaacctgaaagcaccggttcctccaataattggcatctctctcaccttcgaaaatatctcattccgtccatacatcgcgacggtgcttccattaaactctcccgccgtaaaagccaagttaaagaccattgtgaagcttatgttcttcatggctgtcaatgcgtacatcccttgagctcttcccacttcctttgagctcgggtctggtccttcggtcaacggatcatcagcgatcataatcacgccaaaattgacgttggaggagtttgttcggcgggcttccgcaactttgacggcggtaggtttgtcaccggagatgacgtcatggaagtaaaagtggaggtgggtgaatttatccggcttgtagccttgacacggctttgttgtggagtaagcttcggattctgtaacggatacggaaagaagtagaatagttgacaaaagaggaagaagaaggagaaaacgtttagccatgttagtgatatgatactgttggaaatgaaaatatgatttatatatacacaaagcaaaatcagtactctattgttggtttatattacatttgaatatgtcgttttcagatatgacattaccatgattcatacaggtataaacaactagatatttccacctgtatgaatcatggtaacgttatatcggagtttttttaataaaggtccaatggttagaagaattctaatgctctactgcgatatgggattagtctaggtttcggtatgggattctcccgtttaacaaaaaaaaagaaaagtactgtatttgatagtaatttaaaataggtataaataaaagtacgtagttgataattaacacaaataagaataaaaataaaattctgcattgtgcgctacataatgatgtaaataaatatataaaataaaggtatgtagtagttgaaagaaagatgtaagacattcttgtctacattaatgtaagacaaagtcaataatactactgttctctaattaattatatttccttttggtacaccatgaatgatccatccactttacaaagacactacaactttttgagacggcttctgtttggaaccacgccaattattcaattacaaatgattccacccatgcgtaaaacacaccattttttaaaaagattaactaattgtttggtttagttggtcaagtttttattatattacttttaaccacactagtgagattgtatggttgaacctttggtttcttaaaatttgctttaaaagaattatataaattatcttataactaaacgtagataatctttaagaatatatatacactaatatacatgcaaaatacatgggttttttttttgttacttgatgttgtgaagtcaaacattttcaaatacaattaaagaaaaatacaatgcgtaatactatataattaggaaattatgtttaagaaagcgttaaggactgagtggacaacaacacatcgcctacaccaaaatttaatcaaaataaaacgattaaagacggttgatgtatctatggaatggtatataatgtatatgatacatcaaattaaagtaaaaacaaaaaaaaaccaataattatatgtagtctaataataaaaatattgatttggttaagaatataaaacttacttatttttgacgaagccatatcatagacttcttaaaatttcaaattttaggggttcatcgtcttatataaaagataatcttgaaaataaaattataggaaattagatgaagtcaaattaatataagttaaagagaaattataaatatatattaaatgaaaatatataaacacataagtcatataacccacgtaggcgacgccaagtctgtttacactccatctttttccgtttaaaagccatattatataaatatgatgaagatacaaatgatggagatcaatgaaatgattccaaaaactaagccgagggataacagaatatcttcagacactatgcccaaaagaggggagccgaaactaaaataaaagaaatcatacaatataatcagaatcaggcactaactaaaacgcctatcaccaaaccattttagagaaaagcttgataaagtgactaacctaaaggggctagtaactccaccacaacggagagcggttttccctttaacaaatgaagactatctcattgaaaagtagaacaaatgcatttattgaggatatacggaccggtttacatctagttattttcggtaatgttagggaaaataccaaaaaaatatatcaattatttttaatttatacgtttaatattcaattattttttgttgaaagattaatacataaagtaataaaactgtgtaatttaatatccaaaccattaactgttgttattttcattctcacgatcttacaacaaaaataaaatttcaattttacctttaccatctcaattttttctagaggtggatctatcagtccaaccgtctatgtctctccagggaattcacgaatcgatcgatccagaggtggatcgatcgatcccaccgtatatgtctgaaacgttgaagtacggaccgatcggtccaaccgtctatggccgatttgttgtagcctggaccaatcggtttaccccgtcttctctccgcttcagcttttctcgttctttctcgacccgaataaactcaaaactatctaatccattcacaagtacctaaaacctgcaaaagactcaagacttgatcaaaaagacgtaaaaacggactacgacatgataaatgactcaaaacgaaggttagacaagagatctaagacaccaaaaacgcaacatatcaatagtcttatcacttatgttaccatgaaataaacatataatgtagttacaaacttacaatgttttttagatgattactaatgtactggaatttgtatatcacaattcttttaagttattcaaggcactagtggagaaagattcaaggcactattggagaatgcttttctctcaaatttggctcattttatattgacaatggaggcaagtatctagcactggcaaacttccttgcatatcacggcatcaaccattacaaaacaccaccacacactccgaagcataatggtttttctgaaagaaagcatcgtcatatcctagagacatgcttgtctttacttattcacgcttccatgcccgtcaaagacgatgcttaaacaagttctgcaagcatgtatcgacgagctggggcagtttcttctcagtgttgggtttagtcttatctccgcaaggttcagatttaaagatgttcttaccaaggctttaccacggacgcagtttcatcttctctttgacaagattagactcacaaatggtggttcatcttgagggggcatataatgatatattatatatcttcatcttactattcctgtgtacattttcctttcctctagatataccctatgcacacctcaccaaaaaaattataaccacttatattatacgaatgccaaatctcgatataacaatttaattaaagtaataaatgttaatgaatttaggacatttcaaccatatatttactctatcaccaatatctacatcttacttgccccatactcacccttaattagtacgaacagaaatttcaagtaactacgagactctcacacatctgacatcttaattctcaaaatattcagacaaacaacaccttttgaactttaaacgatccacaacaaaaacagaacaattgttatatatatatatatatatatatatataaaagaaccaaaaacaatataagaaaaccaaagtgaaacaatttgtttcggaaagacattagacaatatgcaaatgattaatgccaaatgaagacattatactcgaccacggcatctagaccaacaatcttataagtcttgggcagtgcatagcctctagcaaacctgaaagcaccagttcctccaataatcggcaactctctcaccttcgaaaatatatcattccgtccatacaccgcgatggtgcttccattaaactctcctgccgtgaaaacatagttaaagaccattgtgaagactatgtccttcatggctgttgatgcgtacatcccctgagctcttcccacttcctttgagctcgggtctggtccttcggtcaacggatcatcagcgatcataatcacgccaaacttgacgttgagggtggttgttgggcgggcttcggcaactttgacggcggtaggtttgtcaccggagatgacgtcatggaagtagaagtggaggtgggtgaatttctccggcttgtagccttgatacggcgttgttgtggagtaagctgtgacggacacggcaagaagaagaatagatgacaaaagaggaagaagaagcagaaaacgtttagccatgttcgttgtttgtagctatggaaatgtgaaaatgtgatttatatatatacacaaaacatgatcgttacgcaattgttggctcataaaacatttgaatatgtcgtttctcgattggtgacaacaacatgtccgttgacgtggaagtaaactaggtggttcgatttataaacaactagatatttccacttgtacgaatcatgatataaactggcaaatatataaggatgcacgacgaaagaaaaacaaaacaaataagaataaaacaagattctgcattgtgatacactacatataaatatataaagaaagatatatagtagatgcatataattgaaattaagatcaaagatgtacatagacattgatgtttaaatttaggattgtcaatctgtatatatgtacctaagatatatattaatatatacatatggttccaaactcaataccagtgttctctaattaatgatcttatattttgtacactgaattaatcatccactgagtcccaaaagaggagggcataggtgcgacgggctagagttaaatcataaaatagattaaaaacaatacatgatatttgaaacaatgatcaatgacaagactttagttttcttgcaaaaagtatataacttattttagaaactccttgaattttgttataaaacaaaattggtagttgcataatttttttttttcaaaaaataaaacaacgatcaagaattttggtagttgcataattttgaagtacagttgtgctagttactcaattaaacttaaaatatattatatcaattgtttggaataacattcatctttcgtcttctcagtttacttggaatgcacgagagctttctcgttgtgagaataactcttgggtcatgcctaatgagaaatgcatggggacgagaatcctctgtcgagttaaaaagtatcaatgtcttaaggctactattaataaaacaaatctattattcagatcaagtaggtgctctgttttaggctgcaggaatccacgttcacatggcgtcaaagttaagtacgttggggcatcaaatgttgtttgtgataaaatctcataacaaatgtgctactatctaattatagagtcgattgttctgaggaaaggtaacgttttattgatatttggcgaccgagactgaagtttcaaaaaggccatattaatattgatcgtaaaatgttaaattatatataaactgtaatgaccacaccagccacactttaaattttatataaaaataatctaactggtaattacataataatactaatagacattttttattttatttttttccaattggtcacctaattttcaacaacaacagtgcaacagtaaaacacttaccaaatgggtgaaaaaagagttaaaagtttaaaaatttgtttttaccaaacgtaaaaacagttagaaagaaagaaatccatcttcctcttccccgatctgtttcttccacaaagatatttttctttattctctcgcagttcaattagggtttcaatctctctgctctgcttgtcatcaccaccaccaccaccaccgtcgtcgtctctctgtatctctccggcgggttctctctctacttcccccggtaaacttcgcttactcttccaccatcttctttctctcttcgccgccccttttcatttcacttttttctccaagttcttaccaagcttctaagctcatttcctattaatcgaagctcgtttgaagtaattagggcttggctgaatcctaattgctgaattaagttactcgatttgattccaaatggctaaatcctaattttgatgagctttgcctgtttctatcgacattagagttggagaatttttggattgtttctttcttttggatagtgtatcgaaccagattttgtggttttagagttcttattgatcatcatgagtaggcgattttgtgttttgtgttttcccaaattagcttttgatgattatcactatgactataatcgatgatactgtgtttcttttagctgagtttgatatctcacagagtttatgtgtattggttagaatcgattgattgatgtgcaaatcctgaaacaaaatggtaccatttcgatattaatgttgctatttttagtcatctgagtttgagtgtttttgttgaaagtttttcagaaaatactcatagatggacaaacaattgtttgctttgtctctgctgaatcatattctggaactcaagtatagattttttttttgcttcatagtcgtttatgtatgttcactaatactagcaatgctttggtgattggctattttgcttcatagtagtttatttatgaaatggtcttttttgacactgtttaatgattggctatgtgcaggaggattaaaagatggaccagtcttttattttgatattccgttagcttgttcagttattgtagaagctgtaccgtcaagacttttaatatctcaaatggatgatggtgggcatcgtgagaatggtcggcataaagcagcagttcagggccaggtaccttgacaatcccaaagctaaatcagttgttttcctttctctgctctatatatacatcttatgggtgttcatcatgcttgcggctaaacacctcagatttgagactgtttttgatgggaatgtatgatttgttcatgatgtaaaacagtggttgatgcagcatcagccgtcgatgaaacaagtgatgtcgataatagcagagcgcgatgcagcgattcaggagagaaatctggcgatatcagagaaaaaagcagcagtagctgaaagggacatggcgtttcttcagagggacaccgccattgctgagcgcaacaatgcgataatggagagagacagtgctcttacagcactccaataccgtgagaactctatggttactgctcctgctgccaatatgtcagcatgtccaccaggatgtcaaatatcacgtggtgtaaaacacttgcaccatccgcacatgcatcatcatcatcaacaacatcacatacctcagttgactgaaaatgcatatgaaaccagagagatggagccaaatgatggtctcccaacatcaccacctgccggatccaccttggaatctgccaaaccaaaacgtggtaaaagagtgaacccaaaggcgacaacacaaactgctgctaataagagagggccaaaaaatcagaggaaggttaagaaagagagcgaggacgacttaaacaagataatgtttgtaaagacgacccatgactacacagacgaagattcaagtaagcatatcttaataggatcaaaatctgactggaaaagtcaagaaatggtggggctgaaccaagtggtttacgacgagacaacgatgccaccacctgtatgttcatgtacaggagttctcagacagtgctacaaatggggaaatggaggttggcaatcatcgtgttgcacaactacactatcaatgtatcctttacctgcactgcccaacaaaaggcatgctcgagttggtggacggaaaatgagcggaagcgcgttcaacaagcttctaagccggcttgctgcagaagggcatcatgatctttcaaacccggtcgatctgaaggaccattgggcaaagcacggtacaaaccgctacattacgattaaatgatatgtgcatttaggtgtgagttgttcttacgacattatctgattttaaatcatgtgtactaaattcaaataaactcgagaggaaaagaattgtatgtggagccaatgttatgttgtattatataattcgaaaatttttagtaacatcacaaaccgtagaattattattttttgttcacatcaacaaagaaaaactagacaactttttcttttgaactgatactgaatcatggatggaatgtgagctatttcactcacctacaacttacggactgtgtgaacaaatggatctgatcatatctatcaatttggaatttttgataaagaaatcacaaatgattagtctagggagatttcactgtgatatacgactcgagagttttctctgctttttttgtgggacctatatattttatttattaagaaaaaacattatgtttcattaaaaataaaccaatcagtcgcactaaaataatctaaatactgtataaacaaaaaataaaatgataaaaacattaaaagctatgatgtatttattagtataaatacttttgatgtttaaatttataataatataattgagagtcaaataatttttgttttcgtttttatttaatatattaattttgaaaaataaaataactaatataataagaaaatatgaaaaacaattctatgcccaaattaaatgaaacaagtttctatctacagaatatgaaaatgctgaatttaagtgtaaattatttatatataattgattttaaaaattgatataaataataagtgtaaattatttatatataattaactcaaatttcacgcagataagtagcatttaaaaattcattatattttcttttgatacaacttagaacaatctattattagtagtgtgctgcgtctactccaagttttgttggcgtgatgacaactacataacaataaatgttgtgagtacaagcaaaacatcaaacaaatgaaattgacaaataatattacaaatgatttagacactaagagtgtaatattaaccaacaaaacgttcaaaaacacatcccaacagagagccatgacacgacaacaccagaaatatcactatccttaaatgagagtaaagatttaggacaacacggtaagttattcaagttctaaccagaaattatgcattgatccatatctcttttccactttacattttcactcctttgtaaaggagtgaaaacgaaaaatggaagagtgatatggataatacatagcatctggttggaatttgaataacctaccgcgtctacatggctctttactttaataattgtgagatctccggtgttctggtgccatggttctatgttggcatgtgtttttcttcgttttgttgggtataagttacactttcactctcaaatcattttgtaattttgtttcctaattttcaccaaatgtttaacattttaccaagagagcgattatatctaaggatttacaacttgctagaaagactctaaatgatcgactttgaaatcatgatattgtatcttttcaattttggggttattattctcatttaaatgcattcctgagattatcttaaagaaataaaattgtttagttgattcacactattttgtccatttaaactcaaattaaatttgagtcatgatccaaatgtttatactgtttgctatcaatcaagttttgaaatatattgtagtcatataaaaagtatatatatatatatatatatcggtgtttccatcctgaagacaaatcttctcctactacgtttacagaagtgtttcaatgtatgtttgattacattgctaggctttttgttatggttcgacctcggaagctcttgtttgtggctattggtgagtactattacattatatgcagtgttttcgtctcattacattgtatgaattttgggctttacaatttcgatatcagaaaaagcagatcggcactaatagagaagataatagtctaagttaaatcgtcattgtcttagctgagaaatgctctattacgtaaggcccgacaaagggtcccagatggacaatgattgtgggaaataatgtcattcccataatttggacaaataaaaagttagatcagtcccttgtgagatttgggaagaagtcgtcattattcattccatcaaaggcttaaatgaactaaccatatatttcatattttcacatttattttttaatgaatatatactaggctttgtggttcagcctgtcagagatggatttctagtgccaaatgttaagaaatgtttgaacgatccaacgtaagtagagagaggcggtcttaaacataaaaggacatgcaaatttatttattcaagcgacggttcgataaaactgtaaaatatgacaaacacatgcaaagataaacaaggatagaaaccacaaaccaaagcacaatgtaagaaacatgcacacgttcacacgcattcgaagctagagtgaagtcaatgaccaggttcgagtgtgcctttgaaagacctgtggggcggaggagaaggtaggtttggatttgtacaaaaggggattcgtggagaacatctgaaacgaggaatccctgtaggatggtaagtgtcaatttttcatcatttcactgctcattagtctattcaaatgcggacaaacattaaatcaaaccaaaatcaatattaattaaacacaactaataataataaacctaactaataaacataaaatgatactaatgacctcgggacatctaaaagactcactttgtttctgggcttcctcttgtgcgccaagggctttatccatatgcggaaacacaagaagaagaaggagaaagagagccatggaagagaccatagaagatgtcatcttaatattccctcttattttgcttatcagtgccactcatgcttatgcctttatataggctagggagatgtcaattaaagaaatttaaagatatgttggataatatagaaaggctaaaagacaaagaagattaggaaacctgtggacagtctagcgatagacttaaagcttatagccatcgacgacttagttgtgtgtatcacttatgagtctcgaagttttggtagtattattcagtgaaaagtcttcaatcaccaattcgccatgcatggtttggtttgtgggacaagtgcattgcattggattctcttcatattatttatctttttataaatttctagtatcctatatttactacgtcatattctgtaattagtttaggggagcattttttagattagaactaaaggagcaaaattttcccaaacaattatttacatatttcataggcttttttttaaaaggttagacgacaataaccgatcacatatataattaaaccttggattacatccggatatccttgatttcagatctagattcggattatttaaaaacagatcagatatctttaaatttcgattatccgatctatgaccaacactaagtataatatcctgaattttcttatagtaactatatatgcaaaattaatttaaatcacaaaagactttaaaatcctttcaaatttcttaaaatgtagaatgcaatcaaataatttttattcattaatccgatatgttcctaccataccgcatcatatgatttatataaatatatactgtacttatttatatatataagttcgagaaatcttctaaaacacattaaaatcattaacaatcaaacctgttcttaaaataattgttttcaataatttgattttgaatttaaaagagtttttaaacacatgattgaataacacatgatactttagaacatatcattccaaatgtgtgtttggatacactccctaatttacgaagatcgtgtgtgattatttaattaattcttataagaaaaaactagacctctgaattttggtctattggtcgtccataatatattatgtcgttcggtgtcagttgctgataaagttacgtttaatgcgcaaatcgcttcttccaaaagaaagattgaattgcaatatttgatttattttactcttaactatattttttttactcttaactagattttaattgcaatatgatttattttttaaacttaatatatataaaaaatttcaaactgtatttatttataaaatatttatattggatagtttataattgttattaactaacattttgccaaacccgtcatgctaaaaaactctttattgtctaaattttttaaccaatgtaagacgttaaacttacacattttcatcaactagataatatatgtccgtttttacaattttgaatcataatatatgcacaatttttcttaataaagatgataaaaaattcatagttttaaatcttaaccaaatcttctaaatatttatatttttaaatagtcgagttttatatgaacaacccaaataagatttaataaacaaaatagattaacgggtcggtaacaaatgtacccaaatgcattttaagtttttaacccacccataaaaagtgactccaaaaatacttatagaaatactaaaagatc

SEQ ID NO: 815 - DNA, 33963 bp, Arabidopsis thaliana
actatccatccactagaccagtaaatgaaagagaaaaaaaaacatgaattttcaaatttgaaacattttaatccccaactttaaaaatatatggattaaatcattaagttttttttttttaacttagccatttaacatatgaccaccatccatttattttaacaaattaacataattatatagggtaaagaaatgcttttcttatttttgacattctaattctagggtaaacaaatacatttatatctaatttcaatatttaagatttttttttttaaataaaaaaaatgattgaatctggtttaaccaatttgaaccacaacccaacaatttatccggttcgatttggaaatagcaagtgtgggactgttatgaggtcatcacaatcaaagtaaattaattcctccgtgtgacctaaagagtgaccgttcccgttcactaccgccgcaaagtcttgtggctacagagcttagggtttaaactttcttcacgataattttccgatgggagttccgtcgttctacagatggcttatccagaggtatccattgactatacaagaagttattgaagaagagccactcgaagttaatggcggcggcgtcacgattccaatcgattcaagcaaacctaatcctaatggttacgagtatgacaatctttatctcgacatgaacggaatcattcatccatgtttccatcctgaagacaaaccttctccaactacatttacggaagtgtttcaatgtatgttcgattacattgataggctttttgttatggttcgacctcggaagctcttattcatggctattggtgagtgtttttgtctcattacattttacgaattggtttttaagttttcgctgtgtttatgaaatttgtgtcattgtttttgttgtgtgtaatttgcagatggtgttgctccaagagctaaaatgaatcaacagagagctagaaggtttagagctgctaaagatgcagctgaagcagtatgtgccatctcctattttatactctatttcactgaatttgtatcatgaccgatcatttgatagcatgtataccactataagtatctctggttatagttgcatcgatcctgttgttggggttgatccactgttcaatcttgtatgatcatagaatgctactaggggaaagatgaatcgatcattatgtcgctatgttggtaacagttattactatcgaaaaataccttaacttttagatcatataagaaaagctttctgctgagtatagctttgttcatgtgatcatatcgttatatgttgtatgtcatgattagaattaattatctctgataataattattgtcttgtacgatcatatgattctactagtgaatgctgaatcaattgctatgttactatcttgggaacagtgtttaccattgagatatttttaagctcttacggtcttacctgctatttgcaggcagctgaagaagagcagctgcgggaagagtttgagagagaagggaagaagttgcctcctaaagtggattctcaagtttttgactctaatgttattactcctggaacagagttcatggctactctgtcctttgcgttgcgatactacattcacgttagactaaattctgatcctgggtggaaaaatattaaggtattaattagggtctctgatattttccttgacgctgtttacaatttacttcaagttttgctcatgatttccttattctgaaggttatactctcggatgctaatgttcctggcgagggggaacacaagatcatgtcatacatacgttgtaataagaaccatcctggttataacccaaacactcatcattgtctatatggtttggtatataaccttcctttaattctgatttcttacatgccttcatgtttgattttgcaacaaggttgttctgatcttaattgtgcaagctaataaggccattctattattatttcttaacaacaggacgccgatttgatcatgctgtctttggccacccacgaaattcatttttcaatccttcgtgaggtttgtagaattgttccttttagttttatacctagactagactagcaatgaccaatctatcttgtttgtaattcagcatgtgcttcttcaatatgttttgacacttgattaacatatggaatagttaccaatttgtatgcaagtctttgaagtttgaagatacgtttttttttttttctgcttcactttataccaatgtatctgtattttctccttggtgacgtcacctaggttgttttctttcctggagaggaaggcaaatgcttcttgtgtggtcaagaggggcaccgagcagcagattgtgagggaaagataaagaggaagacaggagaaatgcttgataatactgaggcagatgttgtggtgaagaagccatatgaggtacttttcaggattatacacctcaatactatattttcgaaattacatcgtatgtaaagggctcattattatctttaccagtatcattaactatccttactttttggcagtttgtcaatatatggatactacgagagtatttggaacacgacatgcagattcctggagcaaaaaaaaatttggaccgcttaattgatgacttcatcttcatctgttttttcgttgggaatgatttcctgccacatatgcctacgctcgagatacgggaggtttgtagttttctgttgataatactttcttccagttgtcgaaatgcctggtagagtgtgcccttccatttgttagtcatgtagcattatcttagttttttcaaaaacatctgttgaaaaatgaggtttcttagatataggagatgttcctatatcatacttttctatgtcagagtcataaatcacttcataaaaatctttataaaaaatttcatttgtagttgagaatactttggtattgaatagcgtggtacatatttactcatagtttgtgttctatcaaaaaagtttgtcgcatctttgcatcattgaaagtcttatgagcttacttagaaacccttgagaagtttaaaaaaagtttttcaacttattattgttgttgtgttgcagggtgctatagaactgctgatgtctgtgtacaagaataagtttagatcagcaaaaaaatacttaaccgattcaagcaaggtgcagaaattaaacattctttatcttacttggtgtagctgttggattgtatagtttttaaacttttgtttactaactttcagctgaacttaagaaatgttgagcgtttcatcaaggccgttgggatgtatgaaaatcaaatatttcagaagagagcacaagtacagcaggttaatgtccacatacaataattttgttttctgcagtaatctgcattttccttgcattttaagatattaggttgaaagcgacaagattaaataacattagcctccatctaatgctatgggtgtctcatctgttacatgtcccggccaggctattaatcacttctctctggcatgtaaaaaactttgtttcattgtacaaccgtatttcctctaggtgaatagtagctcagtggatttttaggccagggaaagtcgcaacttaaagttgagtaggagatacttaagacaaagtggaaaaacttaggaatggttaaagaacgtgaatgttttggggtaacaaccatgtataataaaaatattgtcagtttgcttctctagggaagatacttgtgtatttttcttataagaatagaatagtacttagcggttttctttctgaaagatggccatatgcctctctttccatgggttaaaaccttgtctacactagctgacgaatttaatacccctctgatccagggaaaatgaagattagaaaacatgaaaaatttataaattctgtttcatttctatggatagtttttcattggtgcaagtgttatgatgtctgttacagaggcaatcagaaaggtttcgtcgtgacaaagctcgtgacaaagctcgtgacaatgctcgtgacaatgctcaagcaagcagacaattctctggcaagttggtgcaattagattctctagatgaagtgtctgattcattgcattcatcaccttcacgaaaatatttgcgtctgtctttggatgataacattggtgtggcgaatgttgaaacagaaaatagcctcaaagcagaagtaagtcatctcgtatccgaggaggaattttaacaaatttttagctcttctcgcctttttttgaactgcatttcttttgtttaattttatcatgtgctggtttaagtgttaactactccattttaaatttttggtcttgaacttttctttcttattgtaagtgcactaaagtacacagcggttttcaggaactagataacgaagaagacttaaagtttaagcttaagaaactactgcgggataaaggtgatgggttcaggtcaggaaatggagaacaagataaggtcatatttctattttttcagctgtgtgttcatcaatgatttcatgagtgtgtaatcttcataagtttgtttgatttctgtttaatcaatcatttaatcacgctggcaagctcacatggctgttgtattatcaggttaagctaaataaagtaggatggagagagagatattacgaagagaaattcgcagctaagtctgtggaggaaatggaacaaatacgcagagatgttgtgagttgctcatatgtttaatttgatgaaaataaattacatttaagtcacccataacgtatcaatttactgatctttttttaattatttgctaggttttgaagtacacagaaggtctttgttggataatgcattattattatcatggtgtttgttcctggaactggtcagtttctggtcatcctcatacatattatatactttatacatggattattttcttgtggttcatttcatttaatatttcgaagcaggtgattattgtgctgagataaccatattgtcctataggattgtgatgctcattttaatttacacatcatgccaaaaaaattattgagctgttcgaaatatcaaattttcctgtgcaagacttccatcataattgtgccatgcatctttgtttaattcgaactgagcttgtacatatatatatcctctgatatgtttgatactctgcgtacgtctgtgaatttgattttaatgtctgttgtgatttaattccaaaagagcctagtttaagaggacaagatggccataataataggaatcttagtggcaatggcgacctcattgacacttaaatttctctcatgtgtttgtctgtggttaattgcgggtttattttgcaggttttatccatatcattacgcacctttcgcatcagatctcaagggccttgagaaactagatattaagtttgaactaggttccccgtttaaaccatttaatcagcttctggctgttcttccatctgcaaggtattctatctgtatatctgagcattcttaatgtctctctgctgtcactgattcgctcattggattcctgttctcagtgcacatgctctcccagagtgctataggtcattgatgacaaatccagattcgcctatagctgacttttatcctgctggtatgaagttgttgcagattggtccctttcgttgtgttattgtgcaatccatgcctctcattagcttttgtggtgtgcagattttgagattgacatgaatggaaaacgctactcttggcaggtttgattgtcttttcatgctgatggtttggtgacctgcgtaatttcttcagttagatgtagtcattttatggtctcatacttgatacttttatctttccttgtaaagggtatatcgaaactgccttttgttgaagaaaagcgtcttctggaggcagctgcgcaagtggagaaatcactgacggtacattgacttttgtagtggtttttgtttataagaaataattgtacaatcacatgtaactttatttttcttctatatgtttttttccagaacgaagaaattcgaagaaacagtgcgttgtttgacatgctctttgtggttgcttctcatccccttggtgaactcatccgttctcttaatagccgtaccaacaacttgagcaatgaagaacgtgcaactatcattgaaaaaattgaccctggactaaggtttgtgtctgaatcttgagaatagttgattcaataggtagttattgttatgatttcatggtgatgtgattttctgtgtctagttttacaaattatgttgattccttcttgagcatataagaaaagggataatttagtgagcacattcaaaaatttcttgatgtatgcagcgatgggatgaatggttacatagcttcatgtggtggagatagtcagccttcatgtttctgctccacagtcgagggtatggaagatgttttaaccaatcaagtcatgtaagccctcaatacaacaatttggggttaatcacttttttgccatccccatccatccccttgagctttatgaagatgcatattggaatctgatattcatcaaattaacattcttttattttcagttgtgccatatacaaacttccagaagatatcagaggcagtgagattactcatcagattccaagattggcaatccctaaaaaggtattgttgagtttactattgattggcttccaattttggtttcaagttgtggtgaagaacaaagaaactgctttgatgggttttagtagtagaaccaaagtcacttgtttttagtggttagtttacagtgttcttcatatatattcttcacagactatatctctagtggatttgaaatctggaggtcttctatggcatgaagatggggacaaaagaagagctcctccaaaggttataaaaatcaagaggtgaatattacgaaatgttgtgatattcaagagtcttggaaggcctttatttacggatggtgttaaatattctcaatttcttctctttgtatgcaggtataatccagaaggatctatttctgggggtaggcttgggaaggcatctcatagacttgtgttgcaaacaataaatgcccaacctgattatatgaacatcaactcggaaccagcgttgtgtccaaatactgttttccagaacgaacgagtgccgaaaaagatccctacatttaaagataatgggatacaatggataagccctcctccgagtcaaatcactccgaagaagatgaatagccctcaaaggcaaaaggcttggaagaaggatgaaacccctcagagtcgagagaaatcgaagaagctgaaaagctctctgaaagtaaaccctttgaagatgaagaaaactaaaagccctcagagagagttcactcgagagaagaagaaggaaaacataacccctcaaaggaaactcactaaggcacagaggcaggtgaaacacatacgcatgatggaagaggcgaaaatgataaaacagaggaaaaaagagaagtatttaagaaagaaagccaaatatgcacaaggagctcctcccaaaacagcttgagcttcgattcagaacgcctactcgatcaacttcaacaatatgatcaacaaaacaaaggaagaagcatttcagataatgcattgatgattgatatgataggttattttggtggatctaaacagttttgctactctcgtcctcttgtaatacagacaaatgtgatttagtgatcattacatatgtatttttacgtcagttggtttgatttctctgtgcggtttttcaccaaactctatttttgaagtaaaaattaaaaagttataagtcaagatgatgtaacgtacgagaaaaatagaatacctagcttctaacggtgtgctagaataaactaaatattttattagtcaaaaattggtttttatatgctttagggaactaatcaaaatccataattttctaagaggcgtgactttaaaaatctgtaaaaaagcaaatccgaagaaagagagagagagaaggtgattttgaaatttcagataacgcagaatttttttattctcgccggagttttctcctcccaccgtctctgattctcgtcgccgccgtacacagttgttgttctctgccggtaactttaccttctccgatctctcgaatcggtcttctttgtgctgttttcgtttcttatacgaggatttgagtatttgttgctaatcatcatctagctcgatcgtttaccctagttttcgcttattgataatcgttcgagtttttagttgttcaatttcgttttcctcacttgattctctgtaacattttctcatctcctttgtcgatttcttctcgatccgagaggattatgaaatagcgtaattggtcattcaccgtcttcaatgctcaatttcattacttctgttgtgatttttctagagctaagctcatatacatggatgattcgtgaaggttttaactcagtagttagcattttaaacaaggttaaactagtgtaggactatcaattttgcagtatctgatcttattcgaaaatatttctcatgttaattgatacttttttgctctgctttcagtttctgcaagatgattggatcgtttcttacaagaggattggtgtacgaaaatcatattctcatttgtttgctaaacgatatatgatgtggtagttactgttgattagttctccttaatttactactatatttgttataggatggtgttgggctatgcttaccctgcgtatgaatgttacaagactgttgaaaagaataggcctgaaatcgagcaacttcgcttttggtgtcagtactggtatattgtttattgccttttcctttgtctctcattcgtaaggttgaaggttggaaatttgtgacagagatgacttactttaagtaaacttatcaatcacaggatattggttgcttgcttgacagtttttgagagagttggtgatgcgtttgtttcatggtgggcatttctaaacgaacccgcttgattttctccaactacaaacaatttttttgctatgtttgatgattgttttgtcttcctttctttaagggttccgatgtacagtgaagctaagttggcattcttcatatacctgtggtatcctaaaaccagggtaagtgtttatatttgaatggaggaaaaacatgagtctttttatggtttacatgattctttgtctatgattgtttagggtactacatatgtctacgagtccttctttaggccatatctctcacagcatgagaatgacatagaccatagtttgctcgagctaaggactagagcaggagatatggctgttatatactggcaacgagttgcaagttatggtcagaccagaatccttgagattttgcagtatgttgctgcacaatcaactccaagaccgcagccacctcaggtatatttaataatctgcaatgagtatcgttacttgctgcatttttccttgagaaccagtcaatacatctatgatacaatatctaattgaatatgcatttaatgttctgtcatatttgtattcgtttgtgattcagaaacgtggaggtagagctaatcaagctcctgcgaagcctaagaaagcccctgtcccccaatcagaacctgaagaagtatcattgtcctcgtcttctagctcatcttcaagtgaaaatgaaggtaatgagccaacccgtaaagtatcaggcccgtcaagacctagaccaacagtgacatctgtaccagctgcagatcccaaaaacgcgggtaccactcagatagcacagaaatcagtagcttccccaattgtgaacccaccacagtcaaccacccaagtggaaccaatgcagatagaagaagtggaaggagaggcagaatcagggaatgaaaatcccaacccggaaggtccaaaggagacagtgatggaggagacaatcaggatgactcgtgggaggttgaggaagacgcgttcggaagaaagccgttgaaagaagaagaagaagctcaatccaaaaaattgttacttacttgcataacagtggtctctcttctctcttactctatgtttcctgcttctagaattacgttgacaggaactaacaactagtgggaatggttgtatgaaaagttaatctgttggttttgttcttttattcaatttagttgcatctttgacaaaaaaaaaaaaaaaatcaatttagttgcattaagtgtaaaagataacactcttgttttgtttgttcctttcgataactaattcggtaaaataggtacacctacttgagagtagaagtgaagcaagtatcagtcataaacatttaaaagttggattgcacctaaacttaatcatgttatcagagaccattgtaaaacgaaattagagtggttaaaaagaagtggaattaagtcgttgttggaagatccaaaaagactctttctgtttgtggatgtagttgataatagttgttgccatgacttatccacactgcaatattataaccataggaaaaagtctatgttttagcatttggtggcaatttcaaccttttaaacctcggttgttagtagcctgaatcagacccatgaatttctttattcttctacattagtatatttttggtcgtcctttggtcgtaaatattgattattttgtgtgaagtattgatttaacgtcattgaattatagaaaaaaagataaaaaaatgtatattaatttttctgaattataaatattaagttctataaatgctttgaaaattaaaaagttaaaacttttttgaattatgaaaaacatattactctaattagaaagcaaatacaaaaataaaagttcactgaacaataatatttagagctcctcttaatatttaaattttgaattactattcgactccttataaaatactttgtttcgaattcaagtagataatcataaattgaagttatacttttcaagaaagaaattcgttttggttaaaattgtagtaaagtgaaatgataaacgtttgtgtgaagaaaatcgtaagaacaaggtaatatcaatttattggatgaaaatagtacaagcaatatatgcttcaagcacttttggagattgagacacaatgtttccacaagtcatcactcttcttcaagtattctgtttcgtgggcaattaacatgggtttatttgcaatatacttaataagcgtatcgtgacatacttttccttctttgacgagatcattgcaacaaggatcaggcatgtttccattttcaaagacagcagcgactatatccaacgcacacttaggagtgattttaacaagacaagtattccataataagtttgcttcagcttcttcgactgagaaaaccggaacaaacgcacacaccaaagctacaacaatgaataacgtactaatctgagaattaaatttagacatatctacttatgattgaaatatacaagaaatattcttattttactaaacaaattggaagaaaaatgatttgtatttgttatttgaaaatgaagttatctaacctttatataggatatcaaaatcacaaagtaacttaagaaaaaacacaaataaagttaacgttatatttaatggtaattaaattttccccaaataactatactacaaaacttaaatttaatggtttatattaacgtttcaaaattaaaaaaaaaaaaaactaaatacaagtaacaatatccaatcaatataagaaaccactggttaattttcttttatttggatatctaacaccaaatatttaatgggtataaggttcaaattgacatatttatggtcttaagccaaataaatttaatttgctaactatttttaagtaaagatctatttaatttttaaaatataaggagcctaactcccattgtatctaaaacaagttatttattttaaaaaataaaataaatttgctcacaatagtcttaatcgaaatcgcaaataaatgttagtaaaagactttattcgacatacaatttattgaaaggttttcaaagtttctctaggataatataaggttcacaagagcaaataaataattttagaatatcaagtatagttttgttataagatttatgttaaagatacaactattataactagacaaaatttaaaagcatatcatttaaaattgcataagaactaaacattctagttaataaataaccaacattggttgaacatccatcttttcataacaagtgaatcataacatatattgaaaagtacatgataattaggaggagtattggattgatatgttaaaaatatataccaataagtagaatcaaagaaaatgttttaaatttatatattaacaaaggattcaagttaaatggtaaagacacttatatagatatctaacaactttatcactaatctttagatatgagttaacactaattaggatacatgtgacctaacagatccattagtaaatacatatttttgctaagaaaatttataaaactaatggatttagtagatatcatattcagatttgtctcaccctacaagtttttgttttcgcattgaaaattcaaaattaaaaatttgaaaatcaacttgaaacattttgattatttgtgtgaggtattgatttaacgccattgaattatagaataaacataaagaatgtatactaattttcctgaattataaatattaagttctataaatgctttgaaaattaaaaagttaaactttgttgaattatagaaaatatattactctaattagaaagcaaatataaatattaaaattcattgaacaataatatttagagctcctcttaatatttaaattttgaattattattcaactctttatacgaaattgtgtttcgagttcaagaagataatcataaattgaagttatactttttaaggaagaaattcactttggttaaaattgtagtaaagtgaaaagataaacgtttgtgtgaagaaaactgtaacaacaagataatatcaatttattggatgaaaatagtacaagcatatatgcttcaagcacttttggagattgagacacaatgtttccacaagtcatcactcttcttcaagtattctgtttcgtgggcaattaacatgggtttatctgcaatatacttaataagcgtatcgtgacacatttttccttctttgacgagatcgttgcaacaaggatcaggcatggttccattttcaaagacagcagcgactatatccaacgcacacttaggagtgatttaaccaagacaagtattccataataagtttgcttcagcttcttcgactgagaaagccggaacaaacgcacacaccaaagctacaacaatgaataacatagtaatctgagaattaaatttagacatatctacttatgattgaaatatacaagaaatatttttattttacgaaacaaattggaagaaaaaatgatttgtatttattatttgaaaaatgaagttatctaacctttatataggatatcaaaatcacaaagtaactttaaaaaaaaatacaaataaaattaacgttatatttaatggtaattaaatttttcacaaataaatattttacaaaacttaaatttaatggtttctattaaacgttttaatattaaacaaaaaaaaactaaatacaagtaacaatatacaattcaatataagaaaccaatgagctcggtttgggcttcacggttcgattcaaaagtctggtcgttacactatgtactctatgtatcatattggtctcattctatacttaggctgagattttggaggaatagttgttgaacaaaatcaactagtgtaggccttgagatccaagaaatcaaagccgattcgggatttgaatcattttcttgtattagtgactttttgttttgaactgttttgcagtttagaagacattaaggtgatatatagacgctatgcccgttgaataatgagttggcttaccttaaatgcatccatttgttcgttgagattttggatcatttcttcagcaatgtttgtgagattgatttggtgtttaacttctgcaaggtattaaaacttcatgctttcttactaaaacatgtttcaatccttttgagtcattgtggactgtgttgcttagtttgagaggttaaatcatcagagataatgtgactggcacttgaacagtattaatatgaaagagagaaaacagattagtgggagaataagagaattcctcaagaatatctagggtttgttcttgtgttcttgattgtaaaacattaccatacctccttcctctttgttcgcactcattttctctaatggaaaacttaggtgaatcatgttgttccaaacttactagattgcaatataatagtaaaatacattcaaaagaggagacgatattgcatattacatgaagcaaaaatcagtaaaaccacatttcctatagttactttgttctctacaaaacagaatccttagtttttactcttacatacccttctttccctcaggactatgcccaatagactccaactggttcctcaaattctgattatcctcaagcaacctatcatactccataagaaacccatcagcttgctttctcaaagcctctgtttcaccttgtgcacctttcaattctttgcctttactttcactctccgattctaacgtctttatcttcgcttttaacgccgcgatctcttccccgagcgctttcacttcctccccacttgtggttttcccatcctcaaaacctctgttctgcttctttgcagtctccattgtcttcctcaacaaacgaagctctctaatgtaatggtgtagtctatcaatcataagcgagagaaacaacacaaaccctgtaatatacaaaattcaataaccaatatcagattcatataatcagatctacataactaataaggatcacaatttgctctaaatacctccttaattactgattttaagagatgaacaacacaattcctcaaatatataatctcaatcaatatctaattcgtcttctaatcccaatttgacctaaattacactccttaatcccaataaatctacttccttggaaatcgaataagggaacaacactaaggatcaaaatttgatctaattacatccttaattactgatttaagagaaacatcacaattcttcaaaaagcaaatcaaattcatatcagatcttatgatcaaggatttaagagatcgaggattttgtgatttatacccataagagaagcttcgagaagatgcttagacgcaaggacttgatcagtgggattaagaacagcaccatcttcagatcggcgttggatattaaccaaactgtagatactcgacaagagaacgacgaatacggtggttcctatggttttgacgacgacgggaccacggccacgtttgattcgatcgaaggtgaggatgattagctttcggagaggagttttgaagaggaggagaaggatcagtgccatttcggcgaagatcactgtgtaaaggaggtggatcattgttcgtcgccggtgagagtaaaccctagattgatcggagaagaagaaaaatgagagagaacgtgttgtttgttgtgtcggtcaatggaaataaaatgaaaaagcgttactttattgatgagcaatacatgacacgtcatcttactttttataagaactatttatttattgcggttaatacacgtatttggaaagtcatgtcggcaaccatgaaataatgaagaaattaacttatttgatttctcgaaggagcaaagaagagtagaagaccaacacttttggagtgtggagtgtggagtgtacttttgttggcaacatatgatggagatagcttgccatgattcctagtaggaggcggcttggatgttgtcgggctgatagagagacgccttgagcatcgacttacattggaaatgctttaactagtgaaagacgagatgagaagtgccttgagtggtaacaaattgactagaaagtgttttcggaaatgacaataaagatgggaggtactttaggcaatgacctgactagggtggttgaagaccgactaacggtcttgcaaaggccgtgtgcaaaaactgctcgtatagaagaaggtgctggagcatctgacaaatagctccagaaatgcttgaggtatattcaattgtatggaagatgtgtgaggtacttttgagcaatacatggctgacttaggaataaggaccaacatacaacattaaatgtgctttaagtaacatttgattgactcagagatgcttgaaaactgatagacaaccttataggtgctttgagcatcatccaagtgactgagagatgcttgaagactcacatatagtcatagtcttggaagtgctttcagcgacattctgttgtgcaaaacctgcttgcgcatcgataggcagtacatccaagcaaaggatgatggttattaatacatccgaatgttattttatgatgtcctcttttatattagaaatttagaatcattaacgctaatatgaacgtgatctttattattttattagacataacttacatataaacataaaatattcttacatacttgactttgaaatacaacaagcacaactaacatagtaaaacgtctttgatcttaacaagtcaccgaacttggattatgtaaatcaaaagctgaaagggtcgaaccgaacaacaggagtgcacttaagcggatgagccattttcaaactaagtcctgaaacagcctcttccatgtatactttctctcctttaattctccagtcaaaacactgcaccatcgctccaatcgcagtttccataaagatatgagctagttttaccgcgggacatgtcctccttccacctccaaaagtaacatacttcacggcttgctctcttatcttttcttcatctcctgatatcgaagaaactaaaaacctctctggcttaaacatatcaggatcttcccaagaatcaggatctctattcacagcatagagattaacaacaagtgttgttttctccggtacgtagaactctttgacctcgcaactttctccaaatacccttaacaagacaggagccgagggatgcaatcttagcccttctttaacaacagcttgcaaataagggaggtttggaagatctgattcttgaatcaacctttttccccccacaacggaatcgatttctgctcttaatttctcgagaacgccggggttgttaagtatctccgccatagtccattgtatcgtctgcgccgagctgtcagtgcctccaagaaaaatttcctacagttttttttatatagtcagacctaatctcaaaacatagattataaatgaagcaaccgaaaaaaaaacatttaactttaccacaattaaagacttgatctgttttctagtgatcttatattctgcttcttcgtttctataagcttccaacaaatgatcaatcatgtccctatcttgatccccctcaaggttctcctcgtgttccactagaatcctctcaagaaactcgtcgaattcacgagaaactcccattatatcttttctgaacatgtttgaaaagaagagcttcactgataaggcaaaggatttgttaaccaattcccttgctctctccgctacaccgttcttctctgaacaactccttcccatgctcatcctacatatgatgttgttagtgagctttagtgctactttaccgatctcaacgctctccttcttcctcgccttaccttgcagatcaaggcaaaaccgacgtagctcctctgcacggttacctttcgacagctcgagtgcatgtggtcggagtagtttcgtggatatgagcttcttcatgaacttccagtaatctccataaggagcggttacgaatcctgaagatccgaacactagagagtctttgttgactgggacaaagcgatacgagacgtttacgtcgtttgtcctgaagacctcgtaggccattgaggctgatgagacgaggaccatggggaaattaaagatgcggagatggagaagaggtccatacttgaaggagagtttttgaaaggacttgtgtggtagagatgatgagagaagatggtgaagatgaccgatgattggtagagaaggagggctcggaggcaggtcaaagccttttggtttcttgaagaagagagcgtaacaaaggaatgagaagagacataagaggatgaagatagatatgttttgaaagtcaacgatgatgagttctgccattgttgctgaaaacttgaagtggaagatgaagcaagaatatggatccgtcaattgtatatatggtgctataggatttatttttaacagtgattttaatgtatttgaagtttggtaaattgttatgaattcaattcaatggacatggattttcacttttttaatgtactttgtaatgtcatttgtgcctttgtgggttgtctttgtatattttattcatttaaaaccttctcggctctagttgtggaacacgttccaagttcaacatcaagaaatattagaattattgggtgtttaataataattagaaaaactattatatcaataaattcagacgttaaataagacaaagaatacacgtttaaaactttaatttatcataatgagaaaacattaaaagtactttgtacttaacttaaacttaactttttcataccaaacaaaataaaaaactaaaacttaactttttgttttcacctaaatattttaatacgaactacatcgggtgcctctaaaaaaaaaaaactaatattcgtactctcaattaatctaagactaggtaagaacccctgccggctgccatacagataaatattatgctatttaattttatgataaaacaactaaaaaaggtgaaaagttttagaattgattgaatcttgagatatcaaaaccaaattttgtagatatattgaaatatgttgaactaaaaatacagatactatgcaataacacaaatttttagtctatagaataatcttaaaaattcgattttatatatttaatgatttatcattatacaacttgcatttacggtattcataagcttaggcttataaaatatgaaagaatttgttggaattgaaatgctatattttatgttatactgtaattgaaaaacactatatatttagtaaaaataaaagctttatatagtggcattcttattttaaaatttgagatattaattttggtaattttagttaataagaaggagttctatataaggaattaaaagggttttacaaagacttaaaattgtttggcagaaaaaataggagttaaataaataaaaaataatatttcagtctcaaatttgaaagtttatgttttatttaaaaaaaatttagttttaattgaataaaactaacttacttgtatgtaacatgggctcatatctcaacatctcaacgcaaccttcgaaaacaaatcttaaccgaaagtccaccttaacttttattgtaaaatattttataagccacgcttttgatttgtattattaataccaaaaaattatttgaaagcatatgattatcattatctttctctaatcaataaaagattgacaaaatagaaatcatttatgttgtggattaaagatttcagtagtgtatagtttaaaatatatgcttccattaaaaaataaacaataatgagtctagtacctattacttaatatatttatacgatctgtctgttcaagatttaatttgtatgtttttgggctttctttctttctgattttgtttacggacctctctacgagttttgctttgtatccccttgtgtttgggcctttttctaaaaaaaaatctttgaaatttgatttctgtaatcatcttgtatgggttaagcccaatgtgtttgtctccatcatatgatccaaaaaaatcaacaaaaataaaaacatatatatattttaagccctttaaaatatatatatagttatttcatacgcaaatagaataactttatattcgtcttttaagtttaagaacattttttaaatatttatctctaaggatctaacacaaactccatttacattcttgcttaatttgaacaatcgtaatttatagtgtactcatttgatcgttgtagatttcaccccatattattatttttcacgtgaaatttcaaatgatttgtgttaaaataagaaatcctatgttataaaattatagatttttaaaagtttcatgatatctaatgttattgaactagtgattttaaaatctactttaaaattccttattattgaaaacattttgaggattagatttttagtgactttaagagacttaagtgaatttagtgaattttcttagttaaaaatagagaattttaaatttcatggttttaggtggaatttgaaaaaatttgacaataaatcataacaattttcttaaatacacccaaaattttcaaatcatataaaaactcaaaataatttaaatcactcaaaatgtaagattgaaaacaccccctaacttacttgtaacaacatctcatatctcgacatctcaacgcaaccttcgaaaacaaatctttaccaaaagtccaccttaattttattgtataacattttattagccacgcttttgatcattttgtattattaataccactaattatttgaaagcatattataatcattatctttctctaaccaataaaagttttggacaacatagaaatcatttatgttgttgattaagatttaatttgtatgttattcaacaataatagatctagttgactggcattttgtttatatgcgatatgtcctttcaaagtaatcagattcagctgcacaaaatcgggagaattctcattattgtagatacggtccattacttaatagaattctacgtaaccaagtcgttacgtatcaatttattattacggaagcatgtggaaagataatgtatagaaaatagtttatgtgtaagtccaaaaaaatgtggataatataatattatgcaatcgatgttggactactacaaatgatgaagaccgttgatttatatatttatttaatataaaaatgttaaacttgttgattaacaaaaagataaatgacaatttgtgcaaagtattggaagttgcaagtaaactctctgaagagtgtagatgatcaaaacaaaacaaaacaattaggtttagacaaaaaaaacaaaaaaaaaaaaaaacaaaaaaaaaacaattaggttgatttgctacttgggaaattcttttattcttcaaaacaattttatcctgcttcaaaatcttaaagttttacttttatgcattttcttagataccccagtttaatcatttattttacattcaatttagcaccgtttttgacctacattgtagcgttcattgcaaaatttccaacatgtccattatctggtcctaggaaaactgacataaggcatttaaaaggtatacttagctataattttggggctatcatcagagattatttcgctatatagtccaaaaatagcccaacatacatttttgtaaacgactaaaacaatgtggctattgattaacacatcgattaaatcttatgtgcatacgaccccaatcgaatggtataatgatgtagcactttaggatcaaaactattaggaacaatgcttaattcactagcaatgtatatatgccatcatttaatctaagctagagaatattggttttgttttttataaaatttaagtagaagactaacaaaattcaaaaacaaagtgggaaatctactaaacagttttaagcaatagataaaagaataattgctcagaatgcccctacctttttcaattctaccctttcctatttgccatttttatttttataccctctttaaatttttaatgaccattttacccctatttgtaaattgttttaggttaacaaaatgaaatattaatatttttcacctaaattattccaaaataaattttccgccaaaaattttcgaaactttttttgggaaatttgcaagaataactaacaaaaacttataaattaagaaagtaacataagacaaaaaaaatagctatactctctatattatatataataatggcatatttacccctctctctccacctcattctaagtctctccttctctcctttctctctcatctctttttcttttttctctcgatctcttctcttctttttttctgtatcacataacaaacaaacgagaaagacaaagtagatttttcagataccacttatgttatatggttgcttgggttaccaaggttgtattttagggtatagtttttctatacatccaaaataatatagtacaacattttaattctatccaaaatagtacataattttacttacaaacactatttactattttataaattcaaatccgattttaaaaattcaaactattttgtatgtagaaaaaacatagttttttttgtaataaattttataattggaatctatttttttgaaaaagatatatcgcaaaaaaaaaacaaatgggtaaaaactaaactaagtgttactaaatcatctcacctccaattcaacactaaaattatcttttccttatcctcacatgctattttcttaatttctatacatatggtgctatattcttaatatgtttatcaaatatggttattcagctaaatcacaaaaaaaaattcccgccaaaagttttttccaaaaaatattttttccccaaaaaaaacttttttgacgggaaatagatttacaagggattttaaaagggttttaaaagatttacaagagattttaaaacatttacaagagattttaaaagggttttaaaagatttacaagggattttaaaagagttttaaaaaatttacaatggattttaaaagggttttaaaagatttacaagggctttaaaagatttacaaatgttttttaaagatttttaattggtttaaaattgttttaaaagggttttaaaatatttacaagtgattttaaaagggttttaaaatatttacaagggattttaaaagggttttaaaatatttacaagagattttaaagagttttaaaagatttacaaaggtttttaaaagatttttaaagggtttaaaagtgttttaaaagatttacaagggatttttaatgggttttaaagttttacaaatgattttaaaagggttttaaaagatgtataagggttctgaaaagatttttatagaatttacaagaagaccctttaaaaactcttgtaactctttttaaaaactttttaaaattatttgtaaatcttttaaaacccttttaaaatctcttgtacatcttttaaaacccttttaaaatcccttgtaaatctattttccgccaaaaaaaaattataaggatttttaaaagcatttttttggctgagaaaaaattcgttacaaaaacaaattggcgggaaagtttttttttggcgggaaaaataaaatttggcgcaaaaaaattagcgagaaaatttcagtttccaattacatgtttctattagatgagggtaatttgatcattctgttcaagggaaaaggtatttttaaaaatagacaaaacaaaaggggttgttacaaaagagtagtattaaaagggtaattttgcaaatctccctagataaaatacatatgtttgggtttagaatattgactcgggtgatcactaattaattcaagatgctctatcgatctaaaaatgccatttagtcttagaactgtactaatgtaaactagtccacttctatggtactaatcgtgcactaatcatgcggttaacaaagatttccatccgtaatcgttagactaatatgcattaattccaagcctaactaaccacctaccaccctaatcatcaattgtcattggctaggaatgcgaagcactcactaaatatttttggaaatttcatctaactcttctgggcatgaaacttcctatgagctaaactagcttaatcaagactaatctaacactaagaacacgtaaagagtaatgatatataaagatttaaccctaaccatcttgaatcaatcaacaacctttagtcttatgtccatccaaactttaggtaattccttttgcaactccttttagctaggggaaattgttttattaacatttcacaaacaataatacaaacaatgtgaggtcgttaagctcatggagaggaaatggttttccatgggaaaataaactaagcagaagatggaaagacaacaagaggaaattttcggcaaacatcgattccagctccctctactagatctggtttatcatatcctgaaggtccatcctcaactctccagtcaaaccgtttcacaagattggccaaagtcacacttgccatcaccgacccaagtccaatgccgggacataaccttctccctgctccaaatggaatgtatttgaaatttcgtccaacaaaatcccaagttgaatcaaaatgtctttctggcctaaattcttgtgcatccgatccccatgtcgcagtgtctcgttggatcgcccaagcattaatgatcacctatatgtcacatttaaaacgttttatctaaaatgtttttgatatcagttataataagaaaaaaaaaaacgtaaatatatttgacctgtgtgcccgcagtaatgtcgtatccttttaattttacatcttcgcttaatagtcgcggaactaatagcgggagtgggggatgcagccgaagtacctccttgatcacagcttttaagtagttcatattttcaacttcttttcctgatacatatgaattcatcttcgaaactgaacgaatctcatcttgaagtttcttcaaacattctggatttctcattaggcgtgtcatcgcccactctattaccgcggaagttgttgtcgtgctccctaaaaacatttcctataaatggaaaagaacttcatatgattatcaaagtattgtatcattaatatatatactaatgatgatgatagatgcttaatcttacaaatatgatgacttttaagtcgcttttatccaattggcattgtgcagtctcatctctttgaattgttagcaacatatcaacaaaatctggtgtttctttgtcggcagttgtatcctcatgttcttgcaacactttttctataaaatcaccaaactgcttggttattttctctagcttaccatctgaacccgtaatcttacctatccatgccaaactcggaatgtattccccgaccggggaaagccccacggcatccaagaaactctttgttatggtcttgacatcgattgtgccttcctcgccgctgtattttttccccaatacaactttacccattatgtcgcttaccatattagtaatgagtttgcttagattcaccgatgaagaagataaacttgcttcttccagcgtctccatcaatagagttatctcttcttctcttcttttctcagaggattgaaccattttgttgctgaggagatgtatcgtgcatagactctgcataccaagaagaaatcaatacacaacaaattgaagagccattaactagaatctgataattcagttacaaaaaaactttaaatatccacacttaatttttaaaggttttgtatcgaaatgtattatttatcactaatgttaacatacctgtttatcctaaataaatttcaaataaaattaagacattatgtttgagagattttctattgcaatgtttgaaactaataatcataattttaagttcatgtagtatatctttttcactaataggttcaaaaaaaaagttaatttttagaagattatatatggatttccctctctttaaattaataaactattgattttttgataaactactattaatataataaaatcgtatgattaatgtagtaatagtttgtagcagtcttactgtaggtttgaactcattttagtttttcgtattattgaaaagaaaactagtgattatattttggaactaaaatctagaaatgtggtagtatactgttagttccaattatatgtcagtttggattagaaaatttgattattactttttgggcaaaaacttagaaaatttgattaaatgtacccttttaaactaatttataaaatctaattagtgaaacaaatattgatatttaattaataactcctccttctgataaactaatcaaggagctcgtgaaagcaaatctgagatcaacttatgaagactttggagacaccacagataacgaaagaaagtacaaaccttaacgttcctccagtattcgccatagggggcgaataccaaatctcgcccgccattcgagattttatgggcagatttcgtgatcggacggttggcaaacttaagatcatgtgtcttcatgacatcatgagctacgtcagcagaagagacaatgagaacagggacacggccgaaacgaaggagcatgagtggcccgtggcgcgcgctgagggaagagagagcacggtgcgggtggagactgagctgatggaggtttccaatgaccggaagacgccatggagacggaggtaagttagagttgggtcgtttgaggagtgatttgaagaagagtagaatagttaggaaagtggttaagcacagtgagattaatatcatcatttccattttaggatttttggataaattttgagctcaatctctctcactgtgttgaagtgttttgtgaatattagtgatttgattttgggtgtatcgtcatgtgtctcttggctgtgaattttaaagggaagatggtcaatcatcattctaataatctgaaaataaaagtatatatgatgtggcgtgcttataataattttgctattattaatgaacttgttcaaataactactatttacaatgaactagtagttgacccacgctacgcacgggcctttaatgttatttatattaatagaatcgttctttcacatggaagaggaagaacatgggggctctttacaatattttagttataaattttgcacaattcaaagttcagagccttatgagaagactctatttttttattcctccaatggtaaacccctattttggggccttaacaataaatcattaacaatggtaaagaccaaagagacattgtatgtttgtttcagacaaacttaaaaccaagccaagctagaactagttcctctccttatgtcatcatgtattcagctgcattccttctcataatccagtcgagaaaaaccgaatagtttcagaggaagagagagagacacatttttttattttgttaaagtagctcagccactgagatgttgacacgtcagggccccttccaagtgcttaaacctcttaaacaaggggcgtccctctccaatattaggtattttgatttaattttaatcctataaaacctagagcccttgtttaaagtcccgcgttggacaggctcttagagtaaattttagtcccggttacattttagttctaagagtagaaaattgttttctttagtttctaaatttcgaataatctaattgaactagaggaatcaacttttttggttgttttctttctttatgattggtcccagtgataaaaaaaagggttagacgaagggtgtgatggggttagaagaacttaagagaagttaaaaagacgaaaaaacttagaaaacgatgtatattaagaaaaatgcatacaccatatactccacactaatcttatacacgaagcggtgtattcttttatgtgtacactgtatattagtatataatatgctacaaagatcgtacaacttatatttcacaccgatcttgtacactttggagtacagacctatgttagcgggttacacggcggtgtatatcgcatagtacacgacggtctactccacatggtacaaaatggtgtatttcgcatggtaggattatcgcatgatacatgacattgtagtaagcatggtacatgagggtgtactatgcaaggtatatgatgatggtatacgatgcatggaacatgactgtctacttctcatgtcacacgacaattttatctttcgaccttggtttcgttggtttacaccgcatggtacaaaagagtgtgttccaggtacatacgctgcagagtacatgacggtgtatttcgtagattagtcgacgatctactccacataatacatgatagtctactccacagagtacatgacgatgtactccacatagtacacaacaatctactctacatgatacataatagtgtgctctacagggtctgtacgcaacatggtacactacaatgcactccaccatgcatgtacagagcattgtaccctacatggtagacgacagtgtaattgtgatctatacaccctcagcgagatcatactctttcactaaacctatgtaaagagaagacaatggagatactgaaaactcctatggattgttggatttagagtaaagagttttggagcttctcatggacaagtacctgttggtaccaaaaacgtataagaccgatcagtttggattttgtcctgatcggtttggcttttgtaaagtttctatgttttaaagctccgaatcattttattctagccgcagagatacgtcttttactgcgattttcaagtatctaagattgtttttctttataaaattttgtttaaatattcttaaaatattttgcaaactctatgatctttttatctattgtgataatgtaaactttgtcatatgtaattatgcattataatttatttatcatcaagttgttattctatggctgtcacataataatttaaatataaatttgctattatgattgtgtacgatacaaatttattaaatagaagattaaaaaaactaagacagtttggctaaacgatgttgatacgacttgatattatgtgatttaaaaatgacaacttttgtctttataataagtattgtatatttgaactacatgtgaatacgttagaaacaaatattgtcataaaaaggccataattgtcataaattattataaggtcacgtaattaacttattaacgcttcttcaaaacctctatggtcgaggaaaaaaggtcaaaataaacctaaacaaatgttttttccaacccaaactctagcattttgcatttatgaactttaaaaaatattttttttaaaattatcaatttgaattatataaaccgttaaccgattttcacattgacttaaacggacctgagtaatacgagaccaacactctgacaacttacggcgtgcatgggataaccgtgatgcactgatgaatgacattgtcataaccattgcccaaagtgtaccaaaataataggaatcatggagggtttgtttgatggattcaagcaatcgtggctagtgcgtaaagttggccatgtaatggacaattatcctaagggtaatcataattatagagagtgtgggcagcggggccacttcgtacggcagtgcaccacctccaaaaaacatgtgaaagtaaggagatcataacttgggaattctaccaccacctgagtgtataaagtagtaaacgaggataaggcaaccgattgttggtaagtcttcttccaaaaaaaccaaaatttttaagttgttttcttcctttatatgtgttagtagagcttgtagttgttgtatatttctccgggcgctgaggaggatcatgcaatgttgtttcactatatcacttgtcgtagatcctacaacagctcctatggccacttctggttatgattcgagtccatcgccttgtgtcaaggaggaggtttgagataccatcgccttgtacatatctaccttcagggaatgctagggaggagcagagtatcacacgtgagcacatcaggagacatcatggacagtagtacaactcagacgattgagcagatatgtagagaacaaatcaggctggtttacactaatcgctatggattgcttttgtaatcattcggtgtcatatataaccgaccagtatacgtttactttcatagactaaaccgtgtattttcgttttccatttctatctttggtcatatgtgattatgcattataattcatctatcatccattaatttgttattctattgttatcacatacgaatttaaaaagaaatatgctattatgattgtatacgatacaaatttattaaatagaagataacccaaaaaaaaactaaaagatgtcgatacgagttgatattatgtgattttagaaagagaactttcgtctttatgtattacgtatatataattgaaccacatgtggatgcgttagaaacaagtattgtcattaaaagaccataattataataacttattgttttggccacgtaattaacttattaacacttcttcaaaaccactatggttcgtccatcgtgagtatatttaaagaaacttttgttccattttatttcaaacactaaattttaaaacattgtgaggaatcacaataaattttaataatagattttggagttcctggtaaatgtttttataaagtttttaaacttttatttttattttttaattgtttaatttgttcgaaacaaaaattttatttttagtcgtataatatatatagaataacgtctaaaataaaatatcactatctatggcttttgttgactactattacaggcgggcataaattcagaaccaaagtttggtattttgatttaagcttgaataccgattacattttttatttttgaaataagcaacccctaaaccctaaaccctaaaccataaaccctaaaccctaaatgttcagttcaagttggtcatcgatcactttacatattttgtttttaaaatgttttagaagttttttcaatcatttctattttttgttttctcgtaccgaactttgaagataaccaatatgatatcgataagtttgggttttctaaagtttcattttttctatgttttattgctctgaccattgcataataatatccgatgtattttagtcgaatgagtgcgacattttatgcaatttttctagtttctaagtttgttcttcttttgatagttttgtttaaaacgttcttaaaaccctttgcaaatctctattcaaagtcaatgatctctttttctattgtagtcatgtttactttggtcatgtgtagtagtcctatcattgagttttgggatttgaaagaggttgtttatttaaaaacttgttatattatctatgggattgttcttatagttctctttttttttatgcctaagtttaattaggccaatttggctaatgctctacaatcaaattaatcaagccaccaagagttgtgtacttgtgttgaatcgatggatctatcattagctgggcaaagctttcttagccaacaaacaatcgattttattgtgctttgtgaattgattgaatgatgatcttaatgcttgtttgaatttcttgagacgaaggatagtttaattcttaggaaaatgataggcaattatttatattaactaaacaaaaataattattactgcggatttgatcactaattactactctctctcttcattaatacttgattttctagaaaaaacacattaattaaaaatatatattaaaaactgattataaattcataactttttgtgattttaattcttttataactctaaaccaataatatttaattatttattttgaagtttgatattcatcaataataaccaattaatattgcatagaaaatctattaaattaatcttttagaaataatttttttcttctagaaaatcaactaataagtaactgagggagtattagatttttatctatctatatatctaatttatatactttctcgtgtgcttgataacactctgtcgattcgataacaaattactattgcgtttaatactgacacttaagttattatatttaggctaaaacatgtgttaacaccgaatattgttttgggttctatttggtaccaaatattctttcataaaccgaaccaaacttattcactttcgaataaaatcaaaccaaaccgaatctatagttcggttaattttagcacatttttcataaattgaacgaatcaaagtttcgaacagaaccggacgaaagtttccgattgaaaacacctattataagctagtctttttaaaacatattttatatgattttatcctctaaaattctaataatgaaattatttcctattatgtttgcaaatgttaacacacttaatttcctatatttatatgaataaacttttaaaaacatattttatatgattagctagtgtagtataaagttttctttaacaaattgattgtgagctacgacatgaactatagcacttcacataaaatatatagagtaaattattgtaacaatacttacacgaaaaaagaatttgtatggtaataaaaagaaacaaacataacttatgtaatcaacactaacaactaaccattaatatttgttatctctatatgatctgatatttgtttttattttcaagattggtacaaaaataaatctagaacatgggttgcataatattctattatccatgcttttcactccgtattcaaaattggattataaaaacatattttgactttatggatttaaatagaagcatgttgcctatgattagaaggaaaaaaaaaaaacaatgtttggttcattgaaaagttgtttaaggtgctgaaaatttgatttctttatgtagcaaatatatttggtttatttgggagtctttcttgaaaatatttaataaattgtctcttttgttaaccaaaaaaccttaacaagaggggtatttaatcaagttttcggtttagtttttcgagttttggtaaaacaagcaaaaatgttttataaagacacctattagtgacatccacaaagcgttgttgttaaataacaacatagtattttaatctgttgttagggtgtcgttatttaaagatactataatcctacaacttaatagcttcacacacctaacaccacaaaaatgttttagtgtcttgaaacacttctccaaatcgagttttagtcatagcccatatatcctatttgcacatatttacacatcatttagttttaataaattcttttgcatttaaaagtcccaatttgtattaaatttgtccatttggtgttttattatattctaggtacaaaaaatgacttaaaagtatgaggaacatagaatttgtgagtcataggaaatatagcgtatcacattaccagagattagtctagaacacgtattgcataatattgtattctccacacgtttcactacgttttcaaaattagaatataaaaacatattatgactcttttggatttacatgaattttttttttcttttgttgatgtgaaatctatttaattaattaaatatatgtatatttttattattaaataatagaagtgtccatagttagttatgtaatatattgacgatgacggtaatgatatattaaaaaatggtttagcattttagggaacaacttaaaataacgttttgagattattgtattaatcacgagaatcagtcatcgaacccaaattttttgtttgatatatacatatgtttttctttttaacgactctttcaatagataaaatcaaaagtgattacaatggagaacatttgtgataaaagtgggtacatagtaatgaaattgaaaagagctattattatgcagactagctgtggcgagaagatcagccgggtgattatttgaataatatatacatatgttattcaataataattgctctaattgattgtttaatattttgtgtatatgaaatatcttttaggttttcacgtactaatcagatatagctatttaaactcggtataatctcgattatcagacggtccatttgttaagtaataaaactaagctggcgtaaccaaacagttacgtatcaatttcttttagtggaagcatgtgccctgtat

SEQ ID NO: 816 - DNA, 51737 bp, Arabidopsis thaliana
gatcacagaaagggaaaacaaaatgctttgatagtttatgtaaaagttgtttaaattgatgaaaatttgattatttataaagctaccatttggttattcgagaatctcttctaaataaaagagttttaaaaagatttacaagggtttaaaaatttttgtaagtatttttaaaactttttaaaaataattttaaatcttttaaaattattgtaaaagaaattgtttttctggtattcagtagaacttgacaagaggggttttcaatctggtttttcgatattttgcaaaataagaaaacatgtacataaagacacctattagcgacatccacaaaacgtcgttaaataacaacatagcaataacatatcaacgaaaaggatttaaatctgtagttagggtgtcgctaaacaacgattctgtaatctcacaacttatagcttcgcacactttacatcacaaaaaggtcatggtgtcttaaacctcatatcctagtcaagttaaagtcatagtctaccctatttgcatatatctatacttcatttagttttaataactatgtttggcatttaaaggtttaaatttgtatagcatttaaacatttgggcaggggtggatatttcagtttaagttcgggttatggtaagtttggttaattcagttttcgtaaaccaaattcaaccgaaattagtttagtttgatttgtgttttgattagtttatgttcgattcggttcaggtagagatttggttcagttttaatttgtttcggttccatttgcttaaaaattatatatatgaaagttggtcaactctttccatatgagtgacacatcatcacaccagtgagtgccacatgtcattctaaattaatatcattaaaatataacaaaacttagtgataaaaattttaaagtttcacattgcattaaatcatccattaatctcactcttaacaaaatatcttcatttaaaagaaaaaaatacaaaaaatcatgttaatgtatcaaacactactttcattttacttttcttgtttttgctattttataatagtcattacttgataatgattagaaattttcgtgtattacaacttagttgtttgctacttaaaattttttagtttagtaattttaacttagtcttttctttttattacatcttttggtttacatgatatggtcttttttgtgtttatgataaattggtaacattaataatgacatgcatattttgtaagtaattatcttttgagacgttagatataccaaaaagtttaatatacaacgctttctctaatatggatatatgcaaatgcaaagagagaaacctaaaagtgttaactcaaaagactatttaatttatgcttttttttctctttcatgtgaaaacttttaaagcaaatgagtaatttatatatttgttattcaaattatgtcaatctaatatttagtcatgagcctatcattatgtgattcgaatactagattaggagagaatacatggaataagaaattgtttgtttagaatcaagttaggcaactttcaaaccaaataagtagcataattgcataccattgtatcatattgttgatgtaaatatttcatgatagttaaaaaagtttagaaatttgagtatatagataagaagatttatacataaaaaaaatataattgatatttgaatcaaaagtgaatctaactgtacaaatataattacataaaatgaatataactttattaactacataataacagacacgaaaataacataaattagcaataaaaatagttaaacataattatttttaaacaaatttcaaataacaccctatgcgtagagtgtgtactcacctagtaataattaaagacaacaaaatctttttgtcgtgatatgaaagtatttttgttccttgtgaaaatctttgacgtttttacagctttaagagagttattgaacgtaagattttaattgaatatgaaagaatttaacattttatttaaatatagtgttattcaaaatctagtgttatttaattgattggttttagaattctattaaattttactgttatttaatttgttggttttagaaggaaccaggtggcctcttagccagcgtgtatcatcttacgaaattaaaaaaaggtgatatgattcggtctcattatcaaattgactgaaattattttctgtccgtgaggatcccacattcaaattgataggcgtacttgtacttcgtgaaaagatctgttatttaatgttaaaattgttttaatggcaatgtgatttgattagaatttaaaagaaatcaaagacaataacgtgaagaaacaaatcccacctattatgttgcgatttggattaatttgtcaaatacattaaaatctatatatacatttttgcagccactttgaaaaataaatcctggagttgaaatttatttacagtggctgccactggcatttaataattgtttttgataattagaaagaaaatctttgaattaaatatttgataatcttcccaaaatctctccacattaattacacgattagttactaaaataaaacttccaaaatatttaatatcatttaattactacaaaattatcatttttgatattgtttttctacatgactataataattcgattataatcatcaaaccgcaaagatatttgatagcatttaattactacaaaattaaaaaatatttagacaatgatttataaacatatcataaataaaatcagtgagttttttttacgggacggattggcgggacgggtttgacaggacgttacttaataacaatcgtaaactataaaataaaaatattttatagataaatataatttgcaaacttttatatatagtaactttaaaaaataaattgtctccgcggtataccgcgggttaaaatctagtctcttacatttttattaattttaattattttaaattcaataacgaaaagaaagaaatcccatcaattattcatttttaattttatattaatcgaaaaatcagacgtatcaaatgacaaatgcaacatgggtaccgagtaagattatatatatatatatatatatatatatatatatatattattaattaattaataaaactcattaggttaaactgaaccgtttggattgagaaaaaaccaaaccgaatagtttgagcagtagtccaggtttggtttggttcgatttgaatttagttgatagcagatcggttggtttagttaaaatacacacccctacatttggcactttattaaattataggtacaaaaaggaccatatatatcatgagtgacatagcatttgcgaggtataagaaatatagcatcacgtaaccgtatataaaatatattaatgtataaataattaaataaaaaaggaatttacatggaaacataaacaaacaaacataacttatgtaagtaaaaccatacccattattttaatctgacgttttttttctcaacattggtacaaacaattagtctagatcacggattgcataatattgtactatcaatgcttttcactccgtatactaaattataatataaaaacatattttgactcttttggactaacatggaatattttttttgttgatatgaaattcatttagttaattttgaaatatttatttaattttttattcttaaataataaaaatctttatagttagttatataacgtattgacggtgttgatgatgatatattaaaaaaaaaggttaaaaaaatttagataacaacttatgataacgttttgagaatattgtattggtcacgaggatgagtcatcgaaccaaagtttttgtttaatatgcatatgttattcaacgataatggctctagttggatgttaatattttattcatatgatttttctgttaggctttcatgtagtaatcatattgagctatttaaaatgggtataatcttcatctggctattatgcggtccatctgttataaaactaaagttgacgtaaccaaatagttacgtatcaatttattacaacggaagcatgtgatagtggcttatgatcacaaaaagaaaattaaaatgttttgatggtttatgtaaaagttgtttaagtggatgaaaatttagttacttatgtagcaaacatatattatttttcaggagtctttcttgaaaatattcgataaaaatccatttgctatctaatataacttgcgtggggtattcaatcaggttttttggttttggtttttctattttcttcaaaataagcaaacgtgtacgtaaagacaattattggcgacattcacaaaacgtcgttaaataagaacatatcaaagacaactatttaaccgaagaagctttcttttaaattcttgactactgcttgccaaaagaacatgtacataatgcttcgtgattgatattccttcagtgagaccagacgctttcactaaatatatgtaaacagatgagaatgaagataccaaatactcatgtggatttggtggatttagagtaaaaaatattcaagcttctcatggacaagtatcgatcggtcgggacgcgaaaccgtatgaaaccgatcggtttggatttcttactgatctgtttggcttttgtaaagtttcatttttctaagttttagggcttcgactcattatattctagccgccgaggtacgactttttgtgcgattttctagtgtctagggttgttcttctttatatagctttgtttaatagattctttaaatcttttggaaatcacaattcaaactctatcatctctttttatactttgattatgtttactttagtcatatgtgatcatagattataattcatctatcatccatttgttattctattgttatcacataataatttaaaataaatatgctattatgattgtatacaatacacatttattaaatagaagataacaaaaaaaaactaaacgacgatgtgggtacgagttgatattatgtgattttagaaagataacttttgtctttacattacgtattatataattgaaccaggtgtggatgcgttagaaacaagtatcgtcattagaagaccataattgtaatagcttattgtaatggccacgtaattaacttttaacacttcttcaaaaccactatggttcgtccatcgtgagtatatttaaagaaactttggtttcattttatttcaaacactatatattttaaaacattgtgagaaaatcacaataaaatttaatgaaagattttggagttcctggtaaatgtttttaatgtttttaaacttctatttttatttttttatttgtttatttgttcaaaacaaaaatttcatttcattcgtatactatcagaataacgtataaaatgaaaatctatattagaaatatcactatctgtggcttttgttgacggtactattagaggtgggcataaattccgaaccaaaattgggtatctcaatatttaagcttgaaaaccgatgacattttttatttttgatttaggcaacggattcagttcaagttggtcatcgatcactttacatattttgttttcaaaatgttttagaagttttttcaattcttttttttttttttttttctcgtacctaactttggaaatgaaccaatatgatgaaatgtactaaaattttaaaaacaattgataaaattattgaaatatttaatgatttttgcaacaaaaattgaaccaaatgataagtcataatattaacagttattaagagtcattttaaaatagagtgttgagtctttttgtcgataaaaagttagtttacgatgcttttgatcattgcaggtttatctgacttgttggagtaaaaagaggagttcaaagataaaatggagaaaatgagtcaagaaaatgattgactttttcactggtcggtaccgaagacatataaaatcgataagtttggggtttctaaagtttcatttttctatgttttagcgctatgaccattgcataataatatccgatgtattttagtcgaatgagtgcgacactttatgcaatttttctagtttctaagtttgttcttcttttgatagttttgtttaaaatattcttcaaactctttgcaaatctcttttcaaagtcaatgatctctttctctattgtaatcatgtttacctgggccatgagtagtagtcctatcattgaatttgggatttgaaagaggttgtttatttaatatacttgttatttaatttatgggattgtttttacactatcaacaagaggacatctaaacatgggtgctgccaacttacaaataagttttacatgtctatacacaaaagtgtaaacattcgtttggtaaatgagatgaataattggcaaaaataagcgagaaataacattttttacagactactcaaagcaaataaaaatagtgtctttctcaacagagtagccagccttcgctatgtacctagaagcgatttagaaaaataaggatgaattttattttttactttatctttaattccccgaattgtaaatgataaaatggatcacttggtacgaaatatttgtatccaaccacatcttattatctatgtaaacaatattctttagtattgtttacatagataataagaaaaaacaagatccgtatgttacgttttcatgcagtaatcagatttagctatttaaaattgggataatctccattattatacggtgaatttgttgagtgttaaaattaagttgacgtaaccaaatagttacatatcaatttattataacagaagtgatgactggtataactgcagacgaattattggaaccggaacaaaaactaataggtttataaaaacacctattagtgacatctacaaagcgttgttaaataacaacatagtaaacgtatataaccaacaagtattttaatctgttgttagggtgtcgttgtttaaagatactataatcctacaacttaatagcttcacactcctaacaccacaaaaatgttttactgtcttgaaacacttctccaaatcgagttttagtcatagcccaccctatttgctcatatgtatacatcatttagtttaaataaattgttttgcatttaaaagtcccaatttgtattgcatttgtccaattggtgttttattagattctaggtacaaaaaaaatgacttgaagtatgaggaacatagaatttgtgagtcataggaaatatagcgtatcgcataaccagagattagtctagaacacggattgcataatattgtattatccacacttttcactacgttttccaaattcgaatataaaaacatattttgactcttttggactaacatggattttttcttattttttttatttttttttggccaaatgaaatttttgtttttgttgatatgaaattcatttagttaattttgaaatatttatttaattttttattcttaaataataaaaatctccatagttagttatgtaacatattgacggtgctgatgatgatatatttaaaaaaaggttaaaaaaatttagataacaacttatgataacgttttcagaatattgtattggtcacgaggatgagtcatcgaaccaaatgttttgtttaatatgcatatgttcaacgataatggctgtagttggatgttaatattttatttatatgatttttctgttaggctttcatgtagtaatcatattgagctatttaaaatcggtataatcttcatctggctattatacggtccatctgttaagtaatgaaactaaagttgacgtaaccaaatagttacgtagcgatttattataacggaagcatgtgattgtggcctatgatcacaaaaagaaaataaaaatgttttgatggtttatgtaaaagttgtttaagtggatgaaaatttagttatttatgtagcaaacatataatatttttttcaggagtcttttttcagcaaaaaaccatttgctatctaatataacttgaggggtattcaatcagtttttttggtttgatttttctatcaaagacaaacatttaaagacaaatatttaaatctaacctatattgcacggaaacagaaacgaaaacgcagaagtgaaacattttgtaaacgaaaaacaattttttacaaattaaataatataaacacttcagaagcgtattacaaaaaaaatgatcaaaacaacacaaaaatcaaaaacattaatattaaatagtttgttaccgaagacacattttcattcttattttaatcatctccatcaaacaaaaaatccttccaaatcttgtttgtcgagagaaaaaacttaaagctcgaatcttctaattagttatatgtattataaatcttaatatttttaaactatttattactaagtttccggaatttccaaactaagatttgttggaaacttatttccgtggcgttttttggtgtttccaaaacgttatggtgtaattaaataacgacactgtaaaatcccataacttaattgcttcaccaatcttacaccaaaaatgattatagtgtcttgaaactcctatcttaataaagttctagtcataacttactctacttgcacttgcacttgcacatacggtgtcttgaaacttcatttagtttaaatcactttgttttgcatttaaagtcctaatttgtattgcatttgtacataagtggagatttattagattttaggtacataaagggcctcaaaacatgaggaacatatcatttaaaaaagagtttaggaggcgccaaggagaaaccaagaagaaggtaaaagtatcagccaaggacatcaaccgacggaagtagaagactaagtccaagaattgaggcattgatcgatatctgcaatgcacatgggaaggcatggatggaccataatgtatggttgactgtgcaatcaaacgatagggttcctccacacaggagtccataagaaatatgaggactcatcgaccaccaactattacaataccacacccgaatttccccatttgaacccatttttagtttaatcgatccaattttttatcaggggtcgaccctactcggttactgttcatttatacgctaatgtaatgcacattaaaccttcagttttgttttaaccattaacctagaggattcaaagactatatcttgattgaagattcttttctttccttgttgggtttatgaaacttcatatttcatcgttatttctgattaaaatcatgtgtgagtagatttcccctatggttcagagtttggtaaaattcaagaatgaatcttgattcaggaaaaaacctacaaacaattattgcttggattggtattaagccttgttcgaaaaatcagcctttgcggtctatttatcgccagaaaaaaaaaaacagaaaaacgctcgacatcacccagtcgccgcgatttcatatactcggccaataaatctgatatgtaagaaaaaatcactttttttttgttaaatttaagttaaaaatcgattatttataaataaatctgtaaattttgggtataatatactgaaaaccaaacaaaaattgattaaaaaaagaaagaaaaaactggataagagaaatcaatttttggaaacagaaattctcatgtgttgaattccagtggacaagaagatacaataacaaggctgctgatcgttagcaagggaacctctagtgattccaaaaagctttatatcacacttttacattccatgttatcttgtaaacaacttccatgaagatcacttttcttattaatcaaattcagccgttaaaaaaaaaaaaaaaaattggttcgtgtttagggttgtggttgcgcagccaagaggaagaagaagaagcgaaaatacttattttaccctctattaaaggtgaaatgattaaaaattagttgtcgtagttcaaacccgcaattaagattaagaattgttttatgtatatcattaagcataaatgtctaaagagtatatgtaaaatattaaataataaaaatcatgttttataaaataaatcaaataagaagttaaggtttcttattgacaatgtaaaataagtaattacattacttaattgcctttgaatttttggttatgccataccattaacctactagacttttaagggtgatatatttttacttctcgtatacgcctcagaaagaaaataggtaccaacataagaccgataataaaaagcaacacccagccctaacgagagacagggtcaagagaaggagagactgtaaaactctaaaaggtcactgaggcaaacatatgtatactacaagggcatccttaacgaaaaaagccaaaacaatcttcttttatgttttatttggaaatttaatacctaattatttttggtcgaaagacaaatacatatacctaattattatgattatcaaaataacatattttatttttttgggtattaaatcatacattttaattattatgtgtatctttttctaactaaaaacaacataatttgttagaaatactctttcatcaatactatttttttgaaaacgaacattaaaaaataagtatctttgcaaatgttttaaaaaataattagatattaaacttccaaataaaaaataaattaaatatttttggcttttttctcatccttaacttacgcaaatatatttaatttatattcttatattataaattataatctatctgcaatgttctatttacaacttcacgatgacagctttctcgacaatacatggatccacaacaaaccgttgtatcagcggtatatcctctagacagcttacctttgactcacaattatagactgcagtgcactgaaacttcagatacgctttgcatttataatgtgtaagagagtgtttctaggaatcgaaacccaagattatgtaaaatcattatatcttggattactaagttaagaaccttccacaagcgagttccacatgacaagcttactatttttataatcctatttttctgttttgaatgcatgtaacattttcaaaactcaataatttaaaagatgattatatacattaaattaaagaataaaaagactacatcctacgttatgtatctacagctggcttatatgcagctacatgaaacttccaagactaaattaaggaaaatatttggcagccacatgaaagagacattatcacacattcaaattttaaaaatgtcttgttagttacacgaaatattgcaattacatacaaatattcgaaaacaaatataagtaattttttttatatatataggttttgattggtaacacgcataatagaataatgatgtttactaatgtgattatgaagaaaatttaccgataaaaaaactgcataattgtattaaaaaaatcaaaaacgcaagatttacattttcgcctatagttacaaataaaaaattcattatgcaaaaaaatagatatatagttgcttatttgtataataaatactcttctacacatactacatattaataattgtaaaagaaaaaatataattgtttacaccaaaattatatcattaatagtataaaaaaactttttcacattttttaaataaattttaataatcttgtatgtttattatcttatcttacttagaatacattaaaatataagtaaaatataattttatttattaagtatatatatatatatatatatattaatataatattttattttgccattctgcaaaatgtatccaatcaacatattttagaaaaaaaatcattcggaaagttttcatactgcaaaattttattattcattttatgcaattatgcaatgttaccaatcagaaccaaatttttgttaactaggaggagtttggacctaaatcttaatctccctaatagtaaagacccgcatttgctaataccttataacatagcgtaaagcatacctcctaccgaaaatcgaactagggagcatatggatccaccttctgcacttaaaccgttagtccaatgcaccattggtaacataagggaacatatggatccaccttctgcacttaaaccgttagtccaatgcaccattggtaacataaatcatgttgcagacatcataactatcatactctattgatctggttgccgaatccgaacgttgaacgatgtgcaccggtattgaccaaaaatattctctttgatgggacgataatctatttagttatggtatattttattcatattttgttgtaaaatttttgaaaaattgttataacaacttattatcatgttaagaaaaacatttaaagactaagaactaatcacggatcgattcctgcttaatcttcgattttattgtccgagggcacctgaaacctttgacaagtgcctataaaaatttgctaaacaaatcatcacattaaatgattaaaacaactctaaaaaacaattttatgttttgaaaatttaaaacgccacaaacatgcaatgccatttaaaatatattatgtgaaagcttatataaactgatgcttaatcgtaacaaacaaatcctcacacacaaacatatacacgttaaccagttagcagattgacacgaaatgtggagactgcgaattggagctgaggcaagacaagaccctcacttgttcaccacgaacaactttgccggaagacagatctgggagtttgatgccaacgggggctctcctgaggaactcgccgaggtcgaggaggctcgcctcaatttcgcaaacaacaagtcacgtttcaaggctagtcccgatctcttctggcgtaggcaggttggtgatgaaacctctttgcctttgaacaaaactctttttttttatgacaattctctataacagcacagtttaagtttttgttccaaatatatcatcattattttgttcttttggtaaacagtttctgagggagaaaaagttcgagcagaagatcccgagagtgagaatagaggatgcagagaagataacatatgaagacgcaaagacggcactaagaagaggagtactctattacgcggcatgtcaggctaacgatggccattggccttctgaagtctctggttccatgttcttggacgctccctttgtaagcttacctcacttggactctctttatttgtttcttattattcataattatctattcggaaggaatatgattatttcttaataataattagtgatttaaaattaaataatcacaggtgatatgcttgtacattaccggacacctggagaaaatctttacactagagcatgtcaaagagttactccgttacatgtataacactcaggtataaattgtaacagattatgtacatttattcaaaatagacaaagatatatatatatatatatatatatatatatatatatatatatatatatatatatatatgtacacctcgttagctcaactgaaaaaacacctcaaatcaaaacaaaacctagaggtaacatgatcgagtacgcttggagtgggaccatataacatgctcttgtctcgtgttaaggggatgtacagaccttagttagaacttccttatgattcaacaaaacaaagaaaaaaagataaaagatgtatacaattgttagaacttgtaacctataatatgttataaccataaccattggtatgcagaatgaagatggtgggtgggggttagatgtggaaagccacagtgtcatgttttgcacggtcctcaactacatctgcttacgtattttgggagtagaaccagatcatgacggtcaaaaaagtgcatgcgcaagggctcgtaaatggatcctagaccatgggggtgccacgtatgcgcctatggtggctaaagcttggctttcggtatgttttcacacacatacgtataaaattcgaggtttttttaaccaatgttttatataagttgtggttcgattcattaagttaatcaattaatgctctttatacaggttctaggagtgtatgactggtctggttgcaaaccgctaccacccgagatttggatgctcccttctttttctcccattaatggaggttccataattcataccttaatgatatgaatatttatttttttgatttgtagcacttgcatgagctatatatctttatgacactgagtaatacctatgagtgtaggtactctatggatatatatccgggatcttctcatgggcatgtcatatttgtatggtaaaaaatttgtagctacaccaaccgctctcattctacagctccgagaagaactttatccccagccttacagcaaaatcatttggagcaaagcccgtaatcgatgcgcaaaggtttgtgtagtcatgtggaatatggattaaaaaaaaaatgacatcttatattaatataagaaaacaatttgtgatcacgatgatgcaggaagatctattatatccaaagtcatttggacaagatttgttttgggaaggtgttcatatgctttcggagaatatcataaaccgctggcctctcaacaagtttgttagacaaagagcactacgaaccacaatggaacttgttcactaccatgatgaaacgacccactatatcacaggtgcatgtgttgcgaaggtactatacatacataaactaaactaaaatccacatggtgacaaaatgacggacttactaactattaaaatacaaatcatcaatcagagtcagcgttgagggcatgaccattcacatttgccgccctataatatttattttatattaatatatcttacgttgttgacaaaaaaaaaaaaatatatatatatatataggctatcatatatatatatatatatatatatatattataatttacattatatgaaagaagttaaaataaattatcacgatgacgaattaactttttggttttgttattttgatgatagccgtttcatatgcttgcttgttgggtagaagatcctgatggtgattatttcaagaaacatcttgctcgagtccctgatttcatatggattgctgaagatggccttaaatttcaggttaattaagatattagctctttctttaattatttcagttgtttcggattaagataccacaacgaattttatttcaaaaataattgatgatgaataaactggcttgtatcgttttctataatatttcaaattattaatgctagatcctaaaatattcatggctttgagtttaaaattagttgctaagaaaaaacgatttaactcatgtatttattggagactggacagttctctaaaatactatatttttaactcttcgttcaaaattaccgttaaaatttttatttttcaataataccaaactttttaatattaaaatgattaaaaatctttcttaatttgcaatttaaaccctaaatattgtcacttgtgcaatcagttaatggggatgcagtcgtggaatgcagccctctccctccaagttatgttagccgcaaacatggatgacgaaattcgatcaaccctgataaaaggatacgacttcttgaagcaatctcagattagcgagaaccctcaaggtgaccatctgaaaatgtttagagacattacaaaagggggatggacttttcaagatcgagaacaagggttgccgatttcggatggtacagcagaaagtatagaggtgtccactatacaaatcttaaatttataaaaaaaaactaaatatttttatatactcttattgaccgcatgtattgtgtgccgctcctccctcagtgctgcatacacttccaccgcatgccctccgagttcatcggcgaaaaaatggatgtagagaagctctatgatgccgtcaattttctaatctatttgcaggcaagagaatatttacattatagctagttatatagctgccagagctttttggattgtccggttaaacaaactcttttaacattgattaagttgtctcaatatattacagagtgataatggaggtatgccagtttgggagccagctcctggaaaaaaatggctagaggtacgtatacaattttctttaaatttgtctttttaattaaaaaaattctcgtcgaattttttctttctaattaactatttgaatgaatataaatgaaaggatttttttttaagagaggctaaaataaaggtgatattgtaaaaaaatgcagtggcttagtccggtggagcatgtggagaacacagttgtggagcaagagtaatattatattaactactttatttttggacataattaataactttgtaagagaaaaattatatatctacggatcttttatctttaggtaccttgagtgtacgggctcggtgattgcgggattggtttgcttcaagaaagagtttcccgatcacagaccgaaagagatcgaaaagttaataaaaaaaggcctaaaatacatagaggacttgcaaatgccggacggttcatggtacggaaactggggagtttgtttcacgtatggtactctctttgcagtaagaggtctagcggctgcagggaagacttttggcaactctgaagctatacgtagagctgttcagtttattctcaacacgcaaaacgccgaaggcggttggggagaaagtgctctctcttgccctaacaagaaatatattccttctaaaggaaacgtgacgaatgtggttaataccggacaagctatgatggttttacttattggtggtcagatggagagggacccttctcctgttcatcgcgccgccaaagtgttgattaactcacagttggatattggcgatttcccacaacaggtttatttctttttccttctaataattttgtcctaatttgatttttttttgggtactcaaaattcatcacatatagatgctttgtttttcattttgcaggaaagaagggggatctacatgaatatgctgctgcattatccaacctatagaaacatgttctctctttgggctctcgcattgtacacaaatgctctgcgtctgcttgtttcttgacgacttcacatttaaatcttaataatgaatcaccatcggtttgatgctatatgtatatcctatctgtatatctttcttgtttgtccctaaatgacataaaaataaaactatttgtgtacaaagtgtttgttgtttatatttgatttaaggaataacgaaatatttcatataattgctctctagtaccttcctatatattaagtttaagtttcattttcttgtacaaattgtatgctttgtaaatcaacgttattgctattaactcatatttttatatatgtttcaagtcttttaatgccgagtcttgaatctttgcaacaaaaacaaaatagttttcgctgttttgtgtcttattaggtttttacacttgctggaatgaataagaaaatttggagtgcaaatggattaaaacagcctgaagtgaagaagtgatggaagacgacgaccaatagaatattgttgtaatcggtcactacttaacacatagataactgatcggtacacactgtaacccatcggttgtcgttttgaaagttttcaatgtttagatttagagctttttcattttttgtaaataccctatttgttcacaaccgcagaagatacgaatattgtgcgatctggatagttctaaggttgttcttagttttcataggttttgtaaaagagatttctcaaaacctttgttattcttcttcaattctgttatcatctcattttgagagtgaatatcatttttggatgttttgttttataataaagtgataaattttgagatatgactttaccaaagttatctcgctttgaaattcttttatctttttccctacgaatgaaaactcttcgagtttatttatctcaaactaaatcttattttaagatgaataacatacccaatatggagtgatgtatttaatcctatatttttataaagatgtgggacttgtactaccccctctcaagactcgtttattgattttattaatcactaaatgatattttttttaaagtttgttctcactcacatgattccgacaatcacttttcatatgttcaaaaaagcactaggtgcttaggggaaggtgacctaatgcctaacacaaaaaaaaaacttaatccgggcctagataattttagacggtctatacgttacaccataaaatattagaaatatgatattatagataaaaaattatataaaactatatatttagaaaaataaaatattaaatcctaacaaaaattagacaaaaatatttctttaattcatatcaaacaacatataaatgtttataaccatgtgtatagagatgaaacttcaaaaattaaatctatgtagtttgaaattaaaaaaaaaagtacactaaaaagagatttatactagtttaggcagtcaaaaaggttatttacgcgtcacctgagcgcctaatgcctagttggagcctaggcaaccggttagaccatattttaaaacactaatccagaaaatgacgtatcatagattattttacctcaaacaattttagttttagaattctctaaacatgtttgaccaaaacaataaatatactttaataatataagtgatttaaatcaaattttaaaattctatatgcttgtactaccatatttcttaaatcgaactattacaataactaacaattggaattgttatataggattgtggttaaacgggactaacaatctggctcggtcatattatacataaattacttttgatatggtccttatcatccttatccatcacaaatgtaattttccaacgattttagttttaatgtatgcaaaaactaagtggtaatctaatactcccattttgacttccgacaagaaatatatttatttcaaagtttttttatgtttcgtatcacccgtcattcatgggaaagcaggttcgttttctataatcacaatatgtaaatcaagattatttaatgtttcaatattttattcctcatgtaatataagatatcgaatacagtatatgttatcctcgttctcttccacttacatttctattctaatttctaaattctctacgattggattgtgggtgattacgtgatcttttctataattgattcgtaggaaagctttctagattggtgactttctactatttttgatgactttttcataagattttttttttcaaatatcctacgaaatatttattttgtaggaaactcataggaaaattgtagaaaatcgaatctattaaaattttgataagaaatttgataggatttagcaatctgtataagtacacttaaatctgcaagttaataaaattcgactagtttaggagacacattgatcttgtcaataaaaagggtgcattattccgtcgatgtattattcatgtttactctaaacacaaaacattttttctattgaatttttatgctggaaattcaataatcttttaggaagtttataagaaaagagagaaagaaaaaaaccattaattagataatttaaattcttaaattttagaagaaaaaaaaaacattacttatttagttagatcaaatttacatgtcaagtcgttacaaaaactttgtttattatcaatgtcactttggtgatattatttttccttatcttctttgtcacaccttatgtaaaggttcaacaaaatgaaattgttggagatgaatttatagctgccactaaaaaagtgacacgtggacaagagacaaaatgaatataccaactcctcctgaaaatagaacctataacaataaagtatcagaagcacaccatgaaaatggaacaaaaaatgagacagattaatccaatggactgccccgatttagagccgaaccacaaaacaagaataaggtcgattaagagagagaaagcacccatataatatcgaacatatgttatcctcatactcttccacttgtatatttgattccaaatgctataagattaatatgttattgtttatttatgcttcattgtaggaatagttatggattagcaaacatatttctgcatgttggtaaaattcgaataaattatgaggaatgtttaaaatgaatcgattaatgatgagtttttttcactaaaatcccagaagcatcttataaattttattttatcttgctaagaaacaagatccgacactgacactatattcttatttcattgaatgggaattcaatcatcttagcatcttctaaaacactattaacctccatcgttttacaaagcctttcaaactgatcaagatggtctacatggtactccattggattggagtttccaaatctctcgttgttttgtgtcgtattgatcaaactagacatggtataaaagttgttatttgaaatccgtaccgtctcaatatattcttgaggttctggtaaaaccaacaaaaaactaaaatctcttagtaacatttattaagaatatatatatatatatatatattggatcttttatccttcagttttttttttagaattaataacaaacccatggcatttgcctaaccttctatggggcagagacggatctgtatgagattggaggtgtggttgaattatgtttctttacccgtgtgattggcttgtcatcggatccagtcacttgcgatagttgttcttgcacatgaaccggaactcttctttggtttacttgctcactcccaacaccttgagtgttgagtcattatgtaggttgttatcgtattttatccttaactttcttaaattctcttgttgtttcactttcctttctgaccaactatacataaaattaaatagattaagatttgtgcatggcacggactcttacctagttaactttaaattcttgcttgaataacactttcttagacaaaatatatgaggtagtgaatcagactagttgactagaggaataaaaggcaatgcgttaggtgacaggacaatattaaactcaatacggaaaatttagtctatattactagtattaatatatataatcaaaagtttggaagaaatatttgagttacggatgttgttgaatcgttatccaacataaaacctagtagatgaaacaacagtatgcaagactcaaaggaacaaaacagtgtttttataattaagtaaaagttttactattcatcaattgggactccctgattgttttccaaataaaaaacaataataagaagaagaagaagaaaaaaattactttccacatcgattccaattatagaggagaatctttgtagtgaaactgacacgtgttctccaatattcttatactcattgactcttaccaaagtaactaagattctctaagattcttcatttcacaaagattctcatttttctcccaaatataatttctaattattacagtaaaaaatcaaataaaatccggaaacattaacttttcttccttttacattttaacctaactaatcgggactatataactgtcttcttgccaaatatttcattacacaactcaaagaacaaagactcatactcaagattatctttctcttttaatggctctacgcagagcaatcactaaacgtctcattgactgttacagatccgatgtaacacaacaacactcatttttcagacaactctcaccctataacatgaagatccatcgtcagtacatgacttcacctaatggtccgaatcttacggaccggattgtcgggatccgcatcgagtccgtttctccgccgaggcgggaggaaacaccggtgatgggtttatcagttagtgagactaagaagttgttgaggctatatcaaatggagaaagtgaaagagagactcagagagattcctaaaagctctgtttcttattgggaatttattcagatctgttgtgagagttgtgggaatgatgagcaaggttctcaaatggctaagtctttggatcattcgggatgtgtcgtcgttttaggagacatagtttttcttcatccccatcaggtgaattagcaaacacttgtgttcatttttaatgtaattttgttccataatcttttagtatttaagatttgcttttggtgatactaaagaaacttacatagatcatataatataacctatctaagcatatttttgtctttacaagacaatatttttagcttataattttaaaataactttatttaagattttaaatgatttactgattattaaaaattatgttaatccatttttggtttttcgaaaagtgtattggtaggttgatagactccactaatatcaaatttccaaatttttaattaaatttaataattaatcaatatttgttttcttcaaaataccttagtatattgtttcgtttcattttacaattttgttttagtgttctactcgtatgtttcttcatatttataaatgaaatgtataatgggtgtcctaaaattagtggtccaaaatgaaagtttcatcataatcatttccgaaaacgcttacatttttacaaaaatataattttctcattcgtagaattttactattttattttagatagccaagtctatggaggcaatgatcaagcaaacatcagtacttccaaacgatccaaggaaagaagagttagttcagcttgcgactacaaagaagagtattgacatagaggcacgacgtatagtgcaggccgagttatattgtggtctcggtttcctagctgtgcaaactataggctttatgcgtcttaccttttgggaactaagctgggacgtaatggaacccatctgcttctttgtcacaaccattcatttcatcctcggttacatcttttttcttcggacatcgacggaaccatcattcgaaggactttttcgacagcggtttaagaccaaacagaagaagcttatggagaggcatggatttgattttctgaggtacaatgagctcaactctttgttcacaacatttccgtgtaaatttcattatccggtttagttagccgcatcctctccttggctactctatgatttgtaattttgtatagcttgtgtagacttaatattgggccttaacttgttgtatctatatatgataaagttggattcctactttttgtgcaccctcatatcatatatatctttgcttagttttatgagcttaggcctgtgttacggaaaaagaaccataactattgttttatctaacccaaatcgtttcaagagtttctttcgtgaagtaatttaggtaattttcaagaaatgaagatgtaatcaagaaaataataattatatgttattatggtttattgccatcaagactggattttttttccatgaacatgtttcatttcattatgtagacgtttaacgtaacatccaatgatgtcatacgaaaccaaactctagtaaaaaatctaacctttaacccccatttagtaaattagccagctgtgtaaaaaatgttaggacagaaagtcattcttttttcttaaaaaaatatttaaatcactttattgttattttttaaatgattttgtgcaaaaaatatttttaagttgtacatttttgcaattttaccttacactttcaaaaaatacaaattaattatacgaaatcaaaaataatacgcaatgtaattttttcgcttttttcaaatgaaaaatattgataaatgatatgtcaaatcaaagtcataacgacgaagaattcaaatctactttcaaaaatgtaaagatttaatgtatgtgaccatgaaaatgtttacaatatacataaaaatgtcatattgcgtattattttagactttataaaattaattatatttttgaaataaaaggtaaaattgtaaaaattgacaagtttgaaagcttttttgcttaaaccccttatttttattcattgttattttcaaatattacatttcccttgattaagtaacataaaaaatagccgacaaaaaagtaatagaaaaataagaaaatcatccacaaataacatgtataataaacaccttgttgaatgttattaacattatatttcacttcatataaaatatagctttcactttatcaacaaaaaaagaaaaaaaagaatatagctatcattcaattgtttcctcaaataattattaatatgtcaagaaaagttgatccatagtcctcttgtaattggtaaggatttgtaaaccattaacaaaaagaaaagagagacgtcgatatctattaatagtcgaaaaagttaagttggtggaactttaatctaccaactataatcatagtgcgaattcgtttgtgatttggaacacgtaaatagctggaggcattactacattcttgaccaaaaacgcaacaaaagcaaccaccaattgcattactataatcttgacgcaacaatgcactcattttagtaactatttacactattttttccttacattttctgctaaacaattacaaaataatcaatattacatacacaaattgttgaattattttctacgctccgatttaatacaaaatcatgatatctaaagggtcggatgaggatatcaagattttaaggtttatatatatggatttagatccgtatccgttaaaaaaaaattaaaaatctttgataaaaaaattttgaaaaaaatttattaaattatatttctacataaattctatgatctttttatataataaaaagtaaattgaatttatttattttttatataatttaccaaatttatttaatatcttattatatcaagtttcattttaaaaattaataacttatatgatcataatacgtatcaagtcgattagactgatactatcaaatcttgcaaattacactctaaggcacatcttcatgtgcattagaatctgatgtcaatttaactgtcatagtccaaaaatattcattatgatttgtccggattcaaccatcgcattaccaaactcatatacgattcaaatcaatcaaaaatttcaaaaatttcggatatctaaacgtataagatttagtctgtttttaatccacaaaaccaaataccacaaaaaggttatatttatgttactacttaaatagtttaatatagaaacttgaaacagatttaaaatcttaagataaggatgatgatgtggatcaaagacagcgaatgtcccaacagttttcttctattcaaaaatcatttagactgcaacaaatgtaaaatgtgtatttaataccaaatctgtaaccacaaaaatttcaaattagattatacaaacaaaattgacaccaaatattgattctcactttaaatgtattacagtaacaattatacattataccctaccaccaactcctacccaatccatttgtctctctctctctcatcctttagtgtcacttgtttttgtacaaagagagaaagagattggaaaaaaaaaaaaaaaaaaaaagatttttgtttgttgaggttgctgaaatctagatcacctgttttgaatcagtcatacctcaaaaaccctaactcttattatcctctcccaattgaatttttcaaagcttgaagaaactagtagtagtaatcttcgctctgtcgtctgatccatttttttatcaaaatctcgagctaaaaactcttgtgtttaagcaaatgaaatgcactgtgtttgattttgagatttgatggaagtgaagctgtttcttcgaagaatttcatggaggttttagttccctgttgtaggctctttgttagtaatcttagattcgtcatttcctgggtaagtttgtttctttcttctgtagctattgattttatcgatttagggtttttgggtatcctttatttttttgaaatgttgctttgatttctgggaattttagctggattagagcttaaggttgtaatctaaacagagataaaatcagatctctgttttcctttttttctattgtaaactttcccttttaagcaaaatttctcatttcgtttgtgtttttggaaatattctcttaattacagtttcatagcttagtaagattgttattacaattctagatctgctacatttgtttttgtttgtctattgttttaggtttcgttgattctattgttattgggagcgtctgatgcgaaagctaggcatcatcatcatcatcatcaacgaatagcagtggaaggtgtggaaagtggagtagcttcacactcgtgtattcatgatcagattatagagcagaggaagagaccgggtcggaaagtgtattcggttactcctcaggtttatcatgagccaaggagtgttgaaaaagcttttcatcataatggaagggttttgcttagtgtttttgatgaggagaaggatgtgaaacaacctattaggatttatttgaattatgatgctgttggtcattcgcttgaccgagattgtcaacgagttggcaatattgtgaaggttggtattaggagtagcttttcagatttatgaaatgtaagggtttttgaagttactgagtttttttttgttttactgaaatcagttgggtgagcctccttcaagtacttttcctgctgttcctgcttgtaatcctaatacaaaacctccggtttctggtgattgttggtataactgcactttagatgacatatctggcaaggacaaaaagcatcgcctacgcaaggttcacttacttgattattggtgtctaagatctgtgttggttactgatcctgcagatgttctgatttttaaatcttccaaatgaaggctttagagcagactgcagattggttcagaagagcgttggctgttgaacctgtgaaagggaatttacggttaagtggatactctgcttgtgggcaagatggtggtgtgcagcttcctcgtgaatatgtagagggtaatgccattactgttttactctctgattggcagtttcgtgccgttaaacttgttttgctaatttggtctaattcagtttctttcaaatcaaacagagggtattgctgatactgatttagttctattggtgaccacaagacctactactggtaatacccttgcatgggctgtagcttgtgaacgtgatcagtggggacgtgcaattgctggtaattgtcctatcccccagtcgattaccagaattttgaaatccctgcattgccctgagttttgaactaaagccaagatttttggtctttttcagggcatgtcaatgttgctccccgccatttgacttcagaatctgggactttgctttcagcaaccctcattcacgaggttatgcatgtccttggctttgatccgcatgcctttgctcattttagagatgaaaggaaaagaagacgcactgaggtatgttatgagtatctaatgtcctcctaatccagagaagaagttagctattattaacatgcctcaggctttttctttttcgtgtttcattgcttatttatatggatgagatgtctgaactttctatacgagctaccttgtaataagccattcttttcatgtttgaaggtcactgagcaacaaatggatgaaaagctgggccggttagtaacacgcgtagtgcttccaagggttgtcatgcattcacggcatcattacggagtgagttcaatgtcttttaattacttcattcttaggaaccaatgaatctttgcaagttaatttctatgactttagttttctgtcctgtagtcataagaatgtcaaattgttcaacaggcattttctcaaaacttctcgggattagaacttgaggatggaggaggacgtggaacatcgggttcccactgggaaaagagactactcatgaatgagataatgactggatcagtggacacaagatcagtcgtttcaaaaatgactctagcgctattagaggacagtggctggtataaggctaattatagcatggcagaccgtctcgattggggtcggaaccaggggactcagtttgtcacatctccatgtaacatgtggaaaggtgcttaccattgtaacacaactcaactatctggttgtacatacaacagagaggctgaaggttactgcccaattctaagctataacggagaattgccacaatgggcccgttactttccacagcctaacaaaggtatgtcctgatgattaattggaacatgctgatacgattatctagttctttcagtttttattaatactatatattcttaggttgttacctgcttcaacatgttaatttgatacgcaaaatatatatttcttttgccttggttgtatagtatataccaaattatgcaatcctgtagtcgtttcttgtttggtaaagactaatgaatttcatacgcaacgtattgcaggcggccagtcttccttagcagattattgtacatattttgttgcgtattcagatgggtcttgtacggatatcaatagtgcacgtgcacctgacagaatgttgggcgaagtgagagggagtgaatccaggttatttaacttaactttatcactgaatgtttgtaaatatccaaatggaatattgctcatgaaagagtttgatttatatataggtgtatggcctcatctttagtgcgtactgggtttgttcggggttccatgacacaggggaatggttgttatcaacatagatgtagaaataatttgttggaggtattcttctacgtcttcttctctgtcctaagatttcattttattttagttttaaaatttgggtacaaacttttatagatgtaaggcagttttcagaaaccacacaagtcatagtgccatcagtcctatttcaacttgtttttatcttgatacatggagatgaggagatcatgcttttatgctttctcatggcttcactagtaatgtttttcatgtcctccacaatgccattctattaggttgctgtggagggagtatggaaattttgccctcaagctggtggaccaattcgatttcccggttttaatggtaaaaattgctctttatcttcctaaaagaataataacatattgctaccaaatcttttgaaccatgaatgttttggttttgtaggtgaattaatttgtccggcttaccatgaactctgcagtacatccgtagtttctgtacttggtcagtgtcctaattcttgtaactttaatggagattgtgttgatgggaagtgtcgttgtctccttggttatcacggtcatgactgtagaaaccgtaagtatcctgtatcattcacactaaattgttgcttgtcaagtctctatctttccctaagatctgaacttagaagttatgcttttcaccatgcaggttcatgtcctaataattgcaatggacatggaaaatgcacaactcagggtgtatgcatatgtgaaaatggatttactggaatcgactgttccactggtaactatccacatttctatagattgtgtcaagaatacgtttatcaatattatatctgataagaagtttcttttcaactatacagctatttgcgatgaacaatgcagcctacatggaggagtgtgtgataatggggtttgcgagttccgttgctctgattatgcaggctacacatgtcagaacagctctaaactagttacaagtttattggtgtgcaaagatgtattggagaaagacatgtcagggcaacattgtgctccaagagagcctagcattcttcagcagcttgaggaggttgtggtaatgcccaactacaataggctgtttccgggcggggctcggaagttatttaacattttcggtaacagttattgtgatgaagcagctaaaagactagcctgttgggtgagtaacaatctcttgggatttgtagagttgtctaagtttctccatgattataggcaagagactagcattttctgatactgccatttgttctttatgatctctctgtaccagatatcgatccagaagtgtgatatcgatggagacgacagactacgagtatgccattcagcatgtcagtcctacaatatggcgtgtggggcttctttagactgctcagatcaaacccttttcagcacggcagaagaaggtgatgctgaatgtacggggtctggcgaaatcagatcgccatggtttagcagtttgtggagtagattagtagcaagttaactaggaacaattcatctgggcgaaagaaagatttgtgtgtacaaggtagatagtgaggcagagtattattttccaatctgtaatttttctagggtttatgaggagacgtaagttaggggtcttgccttagcccacctgttagatgaattagagtatctttgtctgtctttcgagtgaaaatgcaatatgtatttgaatataatattataggaaaaatgggatttttaggccgaaggccttccaagagaaaaaaaaagggaaaatctatttgattgtcttcttcttcttagctctctatatgtgtctctaattcattcttcaagctcttatgtttttgttacgcttcttagactctagaggtgcactttggagttggaggacttgttcctcaacagcaatcgctagataaaagttgtcccggtcactcttttcgattggtcgcttgtgatgttgtgtacattagagtgaggaccattgatgatctgcaagtgtttggcaatgtctagatgaaatggagaaatctatttggtatctatagcagaaacttattttggattaatatataattgcagaagcggatttgcttggatgtaagcgtgttagtataccggtcaaacaaaagcataagtgggtgaagctactctttgtatatcttggcgtggtacaagataagacaattgctctacatttgatagccaagctgcatgcacactgcacgtagcgaaccctaattttcgcaagaggatcaaacatattgagactgattatcaattggttcagacacatgtacaaacaaccaagaatattgccaaattctaactaaggcgctaattttggaagagagtgttgtgatatctgttgatcatatttttttttcttacttgtagatacgcttatcaagaaagatttgatatcttgttaataataccaaaacaacaaatatggtgttaatattgctccaatagaacggtaaaagtgaccctaaatattctcttgggtgttttatgaacaatgtcacaccatattattttgttttggtatcgtgttggagatgctcttagccaggcccggcccagagctaaagatggtgaagttagagctttaggcatcacattttagtaacaaaatttggggcatcaaattgtaaaattgttggtggtatagtggtcaacgtgttgaataaccttcttttatgtgtctagttcgagtctaacttttgtcagaatttgttttttttttcaatacctcattacgaatgggccaaacacatttttgctttacgcaacaaaaagacttggaccgaccctgctcttagccattccaatctaacagtaaagactcttaaaatttccttcatctaatctttctataaataatttgatacttggtttatacgcttttaaaataatttatttggtgccggctcatctagatgtactcttgaaaaaatatattaatttatttatattttgttttaggtaaaataattaattgttatataacaactaaaaaccaatataccgtcaataaattgtatgtcttcacttttaataatatgaacttttaattatagttaatatgacattataatttgtacaaaacatctaaataaatatcaaattaaataagattaaagagaattagtacaatgtaatgtattttctttcattttaaatttatagattgtaagtttctattaattaaattaaaatatatcagttataaaaatatataatgtttgtcaaactattaaaaataaagaaaattctaaattgagtaacataataagaaaaaattgtaacactaaatttggtgttccatggttggagttgctctaatactataaagattgaatatcagtgttcactcaacctgttcattttccgatctagatgaaataaattcattaaaattgaattgatgtcactcattacatcattttaattaggtgacgtaggttgcatggtgtgtttaatttcacatgtctaatttgtctggttagggttattttgtgtttgctataatgtataatgatatacattttgctttgacaaaaaatatacattttgtttgttgtaacctataaatatatcttttatatttcgtttcatcggacatttttaaggaaaactagagaattcaaaactccattttcaagatgttacaaaacaaaatgagtttatgttcgccactagataattatttcaccttttaattattttaatcattatgattattactccaaggtctttgatgagcacaagcgtccatgaggaacaaaacccgacgttctgaaggaagtcaaggtcgctattggccttacgtaacaaagctaccgatcaagaccaaagatcatatcttcttttatatattaaaatttaaatatgcagtccatgagcatgatataatattctctttgagaaaaaaaaattgatataatattctaccacacatctcgcaatatatgtgttgacccattattcaatataagcaaataatttactaaaactatagattttacttttatgtaacaagcaaaaaaaaaagaattgaccacgttacaaaaaaactctccatatataaccagagtgggagcagtggagcataccaaaagaggaaagaggcagcagaaactttttagttaccagagaatcttttccaatttatattaaagtgtgataatggaagattgagatgtttttttgaagactgaaacaaaaacaagttatctctacttgaacttgtactcccttctcatcgcactacaacaatacttactacttcaaacgattctcttgattatacatatcaaaaaactcatagaacattcttggaaagaagttcatatatgatgataatatgattcttccgaagctcatatgatcaaaacaagttaaaattatgttaaaactggtaacctaagctgacttatttgttgtagcttaaggcaattagcacttgagaagggttaaatcactggagggttccgcatattccatcccccaactaggccgccccaatgtgaaatccaaattgagatgaatgttggtatcctctttctcttcattgtcctattttcaaaatattacacattataagtacataagtaaaagtgtaccattgttaccattgtcagcatgcaattaatgagagataagggataaataatgtaccttagtgtgatgagttgttcccaagtgagaatatgcttgtgtagatatgctcctagatacttcctttgtcgatgaccatgaagctctgttcaaattttaataataaaacacattttagaaatctgtttataactcctattgctggacaaaattgttgtatttggacctacttctatattatcatcaattaatgtacatatacaaattaacaaagaaaattcaaatatcttatatttctaattagactaaaaccaaaaacaacccttaacgaatttaatgagagatggaaaagtacattcacataagccctaggagagggtcatattcatcaaatttcacacagaactaaggcaaaaagagattaaatgcaaaattttacaaaaataaatatataaataaaaagtaacctttgggtcttttgcacagatgatgagtttggcgaatttgtgtcagttccttcatcagcttcttcattattattattgtcctctatcctctgctctgcctctttctctacctttccttctcctgtttattcccaagaacaaaaatacaaattttcttttaaaaattaataaataatgaaattttatttacatttatatctaataagaatgtaaaaatcagtgaactagtttgaatgcatacctggtgatcctttatcagtgcatttcactgttctatacatctgcattaacaatcacacattcttgaaaaatcaaaaacaaattaaaggacgaaaaaaaataaaagaaatgtttggctaagttcatttcaactatgcaatcatgcgttagatagtggcccaattatatacatttcatacatatttacatatacctatatatctatctacatttatgtgtttgaattcgtatgagattccattaatttatatataaaaaatgaagaaaaaataatgaacctgcaagtgactcttgacatgagctagggttagatccttcacattcatgagctccaacactgatttaggcgttgctcctgagacaaaccaatacatgacaaatcttaatactttggtttcaaaacgttacactaacataccaatctcgattggttatgtctttcttttaaaattttttttgattagtataggaaaatgtaagaggacaatacatactttcatggccgccaagaagttgaacagcatggacgaagtgagcatgaagagtagaagtccatctcattcttggagcacgaatgcttcgtttaagaccaaccattgatgatgagcttctcttgaaatctcgaccgtagatttgaggttggaacatgtttgagcgcctttgatgatgatggtcaaatcctaagctcaagagaggtttgttgaagaagttgttctcatggctcaggtcactgaggctgcttccagaatcactgcttgtggagctccggtcaccgccgtgaagaggttttccggcgtgatagttaggaagactgatctgaagagacagatctgggactgagtttgaagctctcatactgtttcttgactctaacatcatcatctcactattttctttatgattcttgtctacttaaatagtggagatcaaagaatgtgtggaaagagaacgagagagagagagagagctctgcagaaacaacacttttattgagggagaaaaaaaagaggtaaaatattatatttctccatcgttgtcattatctcattaatgtattaaacaaaattctattgtctttttcttattattaaatggtttttttttccaacaaaacaattctctacaataccttattattctgaaaacgcttattgcactcttttcctagtactaccaaatgttagtcccaatgtaataaccaaaaaaaaaaaaaaactagaagtgaggaaatatttatagggtgaattgcaaaactaactgtttttgataatttatttaagaaactaacactataatatacaaaatgtagaaattaacactagagggtagtaaaattactaaattagtctttttgattggagatggtagtggtggtgatggttgtggccggtggtggccggcggtggtggatggagttgatggtggtcggaagtgttggtgatcggtgtggtggttgctatggtggtggcccgcggtggtagtggccggcggtggtggtggtggccggtggtagtggtggccggtggtggtggtggccggcggtggtggtggccggcagtggcggtggtggtggtgaccggcggtggtggtggtggccggcgtggtgatggccgacagtggtggtggcggtggtggtggccgaagttagtggtggccggagtcggtggtggccggatttgatggtggccgacagtgacggtgaccggtgttggtggtgaccggaatagatggtggtcggagttggcggtgatggccggcggtggtggcaggcagtggtggccggcggtggtgaccggcggtggtggccagcggtggtggttgctactgaaggtattgaggcaacaaggacaaattgagtaatattacatataatacagagaatattataattacatagttaggatggttagttagtgaattatagttttttttgttagttatttatgcaaatttcccatatttatatatactaaatcttgtagtcaaaagcgttgagtttttcttactttatgtttgaatataatataacattatatgttgaaagaaatttaacaactatcaatcttgtcgagatataggaattgctcacatcgaatgccatattacttgtaaaactcgtgtgtcttcttaccgttttcttaaattttttctttcttgaatgctctttttttttttttttttttccttctagcaatcctgaaaagatgcaatttaactcatttgattctcaactctcgatgagtgaggattagaattctcaactttcatctaatactaagaaaacattcaaaagaaaaatgaaaaagagagagtgattatatttctatatagttggaattgtgagagtattgtggtgatgtgcccaaaaagttaaatgcagtaacttggccaaaataattaataaataatgattttttacccaagaataataataatttaagaaacaacaaaagagtaaaaaagttggaagacttttatgacaacgtagattctgattagtggttaaaaaggtgaaaacaagcacagagagaaagactgggtgtgataattagataatgagtaccctatgatttgcttgtttactattttctaatatataaaataaattattttaaatttccaatgcaagaaaataggcttttaaaaggtctctgcctcttagggcttgatagagaatacaacagagtttgcatttaatattttactgcaaaaccttcaaagcctcagatttgaaaagttgactgggaaagcaaccgcggctttgtcatggagattcttgtttgaaccacaaagtccctccaaaaggaaaatttgtttatctttcaagaattgaggagaaataaagacaactaattactctcaatcgtattattttaattaattttcatgacatgtctcttgggtcttggccattaaaagaagaatcgtacggtcgataatattttgctttttctccgacaatattcttgtttacataagcatcttattgtgttttgttaaaaagaaaaaaatggtatactttgttaaaaaaaaaaacagacaaatgataaaaacctaacattcccattgatatttattattttgtttatatcaataagcatctgattaaaagcaaaatattctcttaaattaacatttaaccaatatttttttatataaaacataagaatattttttttttgtacaattaaaaaaacttcaaaaaataataaccacccgttttttttttttttgtgtgtacgattaataatagtaatattcaccacatttgaaatttctcagataaaaatacagcaataaaattcgatgtgtacatagacatcatattacatgtctccaggcgccagattaatggcttggcatcgaaaaagccgaagtggtaatatacgatggaatatttggaaagataatttgctttgttattgattgatggagacaccattaaatttctcttgtttcatttttttattaattaatttctatctgcttccttttgtttgtttcttctctcttctttgttgacactctcaaggctcctttttaggtaaaatttctggaactctcaaggctcttgctgctccttgctttgctattgaaaacaagaatatatgtacttattacatagatgatttttttcctatttaatttgttttcttttgcaaattgacaaactaaataatctccaagaatatattgtacttattatactaattgtatagttaaatgataataataaacgaaattcaacattcaaaaggctaagattggtagccatgtgacactggttaatgttgactatgagtatatatgtatcatgttctaatatgatttgaatcaataacatataaaaggaggcattctaataaataaatagtagtgaatgaaacaagataaatttttaactcaagaaattttttcactttctatctgtctaataggtttaagatgataaccatgagctgtcgtatatttcatagattaattgtgtattaattatgtttgatcgagatttcgacgggttagagtaagatgcattaataaaggtgtatcataactacaataagtctttttttctagcattgaaaatttgcaacaaactgaatccatttaataaattatatcatagaaccatgcattaatattttaaatgtgtattatgactactcagtgtacccatgtggtgtgtaatatagtcaaatgtcctttttgatattttattttgttgcttctcgcattttatcttaaattaaacatgagttggagaatgcaaatattccattttttagaaagatttgtatcattcccacgtatgtcatcgagctcatacatctcttttgcaaaaccccacggaacttcacttattattgaataacattttacattcttaactatcattctacatggtctagtggtttcgttagatgtacaatatttttattacagcggaattcacattaaacatactctacgaagtaatatagatttcagcttccaatctcccacctacaaaaatagaacttacagactccacaaattatgttcaatcatcgttttccacattgatatttaagtataaaaattttattaaaaaaattgtaaactccttaagagacacatgaaagctaaaactgcctttatcgctagaggactaatttatgttcaatgtctacgataacgcgaaaagttcatagatagactaataatattatctatgaatggaaaacaaaagaaaagattctacacttcctgtattatcgctgggcacacgtacgtagcaaaaatggaccaacctgtacacgtgcttggacctatcgaatatcactcggttggttaagaattaaaagtagtgattgtggaagatttacatattgtgattacataatgattaacaaaatgagaggccaacaagaagagttgttattagtaaagagagtaattaagagtggaataaaagatacactccgttagaggaaaattacgttattttgacgtaaaataaataaattaatccaataatgttattaattatatatatatgaaaaatcaagtgactatagattttcaagtaaaattatagtttgtcaataagtatttatgactttttataactatatgttcacattcaaataattcaaagtagaaaaatacactaattgcctataactaaaaatgttaatcataatcctattaaatagccgaacttttaaattatatggactcttcagattagacgtacaactttatagacaattttcactatgtggaactttggcattacgtaccaatcctataaccatgttaattttgaaggatattgctatatgtttattaatcgttgccaacttctgtgtgagaccccgaagatcctcgatgtgaaattcacgtgtacaacccactttgaatcaatagttacaataaatttaatctcaaacatttgctaattacatcttcaaataagtaaatatgtatatatgaaaagaaataagtttacacatttataagaatgaaattaactagagcaaacttaatattggtcacatctgtttgcaaaatgcaaatacattcatatatattaaactatataaaatatattttagaataaataatacttgtgttttacatagggtaatacacattgtaacatcaataatagtaaattgaacaacaatactatatagtagtaaaattaaatagtaaaatcatttattacaaaacgttgatagagaggagaggacaggggaaggcgttctattcaacgtgtagcattttgtcgtggcacgtagatgctgcatgagttccccaatattccctcctcattaaaggttttcactagtttttcataaatattatattgataattatgtatttgttacatctataacctatagtattagttttaccatattaatgtgtttgacgttttatattttgtttggaggaagctgtcgagccccacattcctcggcgccaacatggcctctcctctcacgtgacatttatttataattttgggttgcttattaaattagctaattccattttccgacatctacatatgcctcttgtttatcccacacgcactctatcataacattatcattgccggatccttttttgaaactatggtccgataaatcattgaaattggttagctcaagtttagctatgatctaattattggcatttgtacaccacaactaagcaaatttttctgttttataaaaccctaacaggatagtaaatcagctaaaccggatgtattacgatttaacctagtccgatcagtttaacccgattatatgaattcagagcttataaatgaatttcgattagtttcacgaattctggatgatttacttatgttatttatgatattttggattgaactatatatcaaatatgttttagttttccattggaccgattcaagtgaacggtttgttttgaaaattgtgaaatcagctacctcataatttttcaaaaaataatatattttttcttttttttgcaatagttaatatatagttggaatcatattgttctttcttttatatttctagctatttactccacatttatattatagttttggttgataaactcaattcacgtgaagattggacgaactttttggtctatagttgttccaaaaaactctataaactagttagactatttttcctgatctatttgaacattaagttacactttctccacgtaatattactagttgaccaacgaataaaatctttgggaaaaaaacccatctgtgtgctccaacgttagaacaaaatgatgttgatgaattaggaaggtgtccatgtacaaaaaaaatacaaaatctcttctctatcttttacgaagcattcgcattattgcttgatctaggaaaaaaaaatataaggaagcttgcttttactaagaataagactaatatgaaaagtgttgctaaaagaaaaggaaaagcctaattctgttttagctattacgaaacagattattatattggattaagaagcaagggtcagcgcctaatgcgctctagattctttgggaaatgtgataagtttcacctcttatgttataaaaataaaattagcaatacaagtgacaaattaacaattgaaattggtactaatcgaataatgcccttttgatctgcttggagttatcgaaaagttcgtgtgtaatatccggtcaacatatctctctcctctctctatctatttctctctcgcatttgttctttattccatattccatgtgtttgtcttgtcacagctcgagctcttcttgcattttaaatttgttgtttcttttgcaattttctaaaacaaattgtttatattagtgcattggagaaatgcacgggcaccttgtctacaatacgcaactggaattttagttggctaaacattttttaatgcggcttttttgttttaccaatttgtatagtttttgtttttgttttttaagggaactaaattttcacccatttaatcaaattcatatgtgctatgcaagttttaggaaaataagttattaaatatttcctacagaatttgttgaaagttacagtaaaataattattatgaagtcttaaccttgttgtcacaaatattagagttgggaaccccttaccaattagtgattgtaactttaaaaattatgggaagtagtggaggttgttgttcgggttaagcaaacatatgaaaagtccgattggtgacctaaaagcaaagatatttgtatctttggtccgaattactagctaattttgtggaatttcatcttagcaaaatctaaaacagtctttgatcgtctgatctctagaaaataaaatttaaaatttagcaatacagaaaacaaacttatgttctcatattagtaagattaaaccatttctgttttttacattttaattataaatacaacatgcatataataccccaatagttaaccacattgtacgccatagtgataaggtcactatcagttaatttctcataaatgcctctgaaataaaacagtttcttaccaattaatatacgggttaaagtgttcaacgttgtaataaataatggagaaacaagaatggaccacaaagctagcgcaaggtacaacagtttcatgaaaatggtaatgataaactaaaatgcttctgtctcaacattccttgttttttgactctttcattctaaaactgccttttctggtcattttattgtcagctcctacacaagaataaacaatattccatttactcattttcttgtaaaatattcattaatgctctctcactaaaagatgtctttatcttcaaagtcgtaattacccatctcattttcattatatcgaatccaacagaaattacaatatcatcattacgatttggttttgttttgtgacgttgttgtgtcttgtttaattctgtggtcgtctaccagttttcagaggcatctttgttaagtggagtgacgataatgatatattgaaaaactttcaaacgttgcaattattattgattattttatttttgaaattaactggctttgggtatatatacattcactacgtaagagagggaaaaaaaaaaaatacattcactacgtaagcaattaagatgtgtgtcggacaacttttggtggatctttttaccaaaaagaaatataattttttaaaaaaaattggcagagtaaaattgtttacaagtaggctttaattcccaaccgataaaagaaaagagttgagctttttttttgggttgttggaccacaacgggctcgggctggcctaattatccatttactccatccgacgtgagaaatgacaggccacggtatgatttaagtttgatacttgatttaaaacgtaaccttattgtataatttcattgtacactatgtttagtagcattttttacatttttatatccattatttcaaaccttttgatcccaacacgtacggccgggtcattatagctagtattatattttgccaacaattatattctatttttctctctttagatatatatatatatataattaaatcattttttcaaatgctgaagataaacttctttttctcaatactgcaaaagaaaatcataaatagttttctatacgatatttttacatatttaacaatttatttcctttgatatttagaaatacacatattttggaaacggtaatatatcttattattttttcagaaattaatatttagaattttttttgcagtattacctcaatattgaacaatcaaaaaatttagttaattttatgctttcaataataattctggatcctcccattacatttggatctatctaaatctataccatttttctttccgtaggatcctcccattacaacgccacgtactttcgtgttttctttaaactggaagctgatggtatatatatatttcaatcctctacggctctaccactactatcagtgtttttatatattgaaaactaagtttttcattaaaaatgactaaatgcaccatttttgctgtcttcgtcatccttattctaggtttgttttaccattctctaaacctattttaaaagcatatatttttaatacattttgttttctttaaactgggaaatgatatttacgtttcaaaatatatgttttgtagggatgatggtgaaagagatggaaggagtcacatattgtagtactgaattggctggagtaaattgtggtaattgtaacgatgcatgcaaacaaaagtataaggatggaaccggccaatgcacttcaaagatgcaaaccttacgattcagaagaagaagaaaaccgaaacctgctcctgcagtcatccttgtattttttaaattttattcgaagtgtattaatgattaatggatcacatttataataaaaatactaataaatttaataaaataaattacaagaatgtgaacttttattcggcatgttgtcaaagctggttgagatgttgaatcgaaatttacattatatacatagggaacaactatatattaaaatattttaagcctcataacataacactaatgttttcaaaagtatcaacacaaattcgacgtgttcacaacacacatggcaaagaaaaagccaaatattcatggttcgatgttgaattgggtaagagctaataccaattggtgatttcctgaattcgctgatcagacaaacaaattgggttaggattccaaatgcacttaattgtttcgtttcaggatcacgaaacatatccttcgaatcatgtttttcatctcatcgcttttctctaaaaacatatattaaaacgacaaaacgtaatgaattggcatgtttattggttataatctgtgtttatagtttttttttttgtttttgaaaaagaaaattctgaaggtatggttttttgggaggggactatataaaatgctcttctcgccgacctaaatggatgtacaggcctaggcccacaacttcttagttattccaaaaaaaattaaaaggtatttgaagtgtctttgaatccgggtctagacaatattcaacccacttgtttagacgataccaaatgtctacaatttttctttttcatcctatttcactttctattcctaatagttcaaaatttagatttgatctccttacgaatcttaaataagtattacaattctcatatatagaatgagaatattacacgtagagacactattttgaaactttagccacaaataggcactttgaaaggagaaggcactttaccaaatcaaaattcctaaattgccctctgaactacaacgctttctcctcattttctctctcaactcttttctccatcgtctttatttctctctctttccaaaatcaaaaccaattttttacgggaatctcaatattccaaatcaaaactaaaaacccaatttcatatgatttatcatcatcttccctgtctctcaacaattatttgatttggttccatttatttctctccttgattaaggaatctctgtcatcgattacaatgaaaagtgaggatgttaaccatgatcagttaccttctaagcaatctgggcttgaaacggttcgtgatgttgagaacgcgagtagcagcaaaaaggccattgtcgatgtaacttcatctgaggcatagttgtccattgatgagtgtccaagcattcaagtccaaatggtcatctattaactcacatttgaagcatagttgtccattgataagtgtccaagcactctagtccaagtggtcatctagtaactcacatctgaagcatagttgtccattgatgagtgtccaagtactcaagtttaagtatataaagcgtgtaagaagatcaattgtagcagcaatgttctgttgttgattcttaatatattcttcgtttttaagttatgatagagaattttgagataatctcagaatttctatgatttgtaagaattatagagaaccaccatgattgatgattttgaaaaagaaaataaaaatgatgaaaaaaaaaaacatggaagacagagaagataaaaaattatgctagtttgtctccatgataacttgtccacgtaaacgtaaccatgtggaaataagtgattctcataagcaaaagaatatgcttttaaggttagacgttcaatgaaacatcaatttatcaagaaagaatcaaattgtaccaaacaaggcgatcaaatggatatgaaatttaatactggaatttgccaacttgggttttccataaactctcaaatgtttgattttgataaactcttaaatgtttgattttgcaaggaaagaaaaaaaagtaataatgagaagagagagaaagagagagagagagaaaagaagaagcgacgaagaagaaggaaaaaaaaggaacgtggagagatgaaactttttttttaattataattttttaattttcaggggtaaattggtcaaaagtttaatgaaaaagttggaaaagtgcttcatccctgacaagtgcctcaaaaggaataaaattctctaaaagtgtctaaacgtgtcacattcccatatagaatttatcggtagttattttcatatttatttatttaaattagttttatatgtggtaaaatgtttagttatatgagatgatgacatatgtggtaaaatagacactatatgttagagacaaaagcgagaacgatgagtaagttttaccaaatatttgagatcaaacctgttaaaacaacttaccgtagtttttatgatggaatctatttttataaacacatattaaactaattttaaatcgtctatttttcactatagagattttgattgtatgaaatttttgatgcagagactttatttgtaaagattttagagactttagcatcaattggtaaaattgtggatgttaaattgtgattctaaataatagaaatatacctataaatctagaggatgaaataacaacaaaacacgcacaaactgtcatgttagagcaactccaataaggttttgttttaactaagtttcttagttttagagaaagaaaatatattaataaaaattatgtagctttcttgaatagtgaagaaactctcttcaaaatttcttatataaggtattttgacctactttggagaagatttcttcaatatataagaaactcacacattttttattaatatattttctctctctaaactaagaaacttatgttaggaactatcaatggggttgctcttatatgttatagtcatatttaatcaagttcagttatcgatctattaataatttaatattcaaaaatttagcttctaggtttccatcacaatttcactcttataaattatgagttatttgtggtatttaaaacaatgagaaatgtatctccatctaaacatataacagttaaggtttaaatgttataattaaacgatgttaaatgtcggtttaaatttaaaaaaaagaattaagattatattttttaattaaacgagattaattatcggtttaggtttaaacaattaaatttataaacaggtttagattttacaattaaacgaagttaaatattattttggatttggaaataacggttagagttagattttaatattaaacaaggttaaatattggtttgggtttacaaaaaaaaaaatttaaattttgtaatcggacgaaattatatatcggtttgtatttataaaagagtggttagagtgaatttattttataattaaatatttacttatttatttattagatgacagactctgattggcgggaataaaaagggatgaagccaagcactgttcattattaaatgagataaaattgatttggttaaattttaaaaatgcttaaattaatcaacaaaaaaaacaacaattttaaagcttcttaaaaatataatttaagaaaaatagaagtttaaagagagcaaaaaagtcagttaaagatgtaaagaaagaacactaatattttaaaaactttgacctaattatccgttaaaaaaatttaaactcaaaactttgtgttcaaaatcaaacaagctttaaaagattgaagtcaacattacaaatacatcttctaattttttaggaaagaatgtacaattcaaaacatactatatacttaaatataactaactagtcaacaaagattaataacccgccaaaaaagttattcaaagtaatcaataacgtgccagatttgaaattaactaaataacaaatatattgactttgaattcatgaatttcaatatattaccttttttgcacttcaaaaatatataaaaggatacatagggaaataatttagatacacttagagctacaaaatgtcttccatcccaaataggttcaatatttatggtggtgataccacaaaccatcgtgaatcgcttcccatcgaaatgaatcacaactctcgaatggttcgatccatgttcattacatctgatcgcatgaatcatagagatttgttttcttctcctccttctttctcttcttatcaaaattcacatatctcttcatcttctgttgggtttaataattcacatatgacttatcatatgctgaaaagaaattatgattctgtttcccgtgctgattatttctctactaaagatcattctcattttactcaagtatctttcactcaaaccatcacaaataagtatactactattgttccttccaatatatttgacactgttcactatgatattggtcgtgtcaaacgtgccatagattttagaaatatttggaatcctaaatctcatcttccaaaaaaatttaataggcaatgcgagattttgaatcctacccctcttaatatcgtctttccgcaccaggattcagctgatcgtcaacatttagacattattttctcgtcatcaaagcacaaccatgttttccaagatggtcgatccttgaagaaaatttccgaaccaaccaatctgtttgaaaaatctaattcttatgattctcaagaagatgagaaaatcgatgcttatcaatatgatggtcgtacacatagtctaccgtatacgaaatacggtccatatacatgtcccaggtgtaacggtgtgtttgatacttctcaaaaatttgctgcacatatgttatctcactacaataatgagacggacaaagaaagagaccaaagatttcgtgcaagaaataaaaaacgatatcgtaagtttatggacagtcttaaaatatcaaaacagaagatatgatccgtcgcgatgggacgatcaaatttttcaacatcttgtgatcgtaaaataagaccttgtttatgattttattttttctaatatctcttttccaacttattttattttaaaaaatgcataaatgtctttctatttctagtatttcatcatatttgttattactaggaatggatatcatatttgcatagaaaattgtaatctttatttgctcttcataatttaaggtttggttgttttttctaaagtaatttcttaaatttaatacataatatggatttacagttatgcatgtaaagacataatataattttcatttaatttacttaaagtgttcatttaattgtaaaattatttcgatatatggtaaaatagttttaaatgaaaatttcccaatatctaatttgttttgtaaggtcagatttttggacccaccatggaactttctcaagtacttgtctaccaataattcacacatgaaacatctcattcttgaaatgatgaaaccgactaggatcccttaaaaacgatcgcacgtacgtcctaatacatctcttccttctgttcatctttaacatcacgtaaatcagatccataagcagagtttcgagtccagattaaaaatgcctaaagcagctttctaacctctgtctactaccttagaatgcattatgcatcctacaagtaaaagtacttagtaaagccaaccaaaccagtttattctgtttcgcaagcaagatcccgacaagctcttccgcttcttttcccccagcatctatccaagatatatatcttccatacaagtgtaacatcgaatctttctgttcaagactatgtataccctaacaatagagcagtacacacagcaacttgttcatgaaccttctcgttaaacaccttacgtgaatcctctgttctttatgaaggttgcataaaacgttatgagcgaagtagggacatacttcattaaataaataaaaccctaacttgatgatgaagtcatgaactttgtgtaaataagtgaatgttcttgaggtcgaattttttcgactcttgaacaaatcaagagcttctccgctacttgcattctggtctaacccacataacattaattattgtctacctttaccaaactgaaaaaataaggaagcatcgtattccagttccacgccgcataatagcaacagagagaatcgaagaagatgaaaatattctgttattcaacttaatgattctgttacaccgatactctttatatgatagagtatctcggtttaatgtttggtttacacttaaccgaaatcaaagattacaaaccaactctagtctattatcctccctcaagatgagccgtatatagaaagaagactcatcttgccaataagagaattaaacagagtaggaaacaagggcttcgtcaagacatctgcaagttgacttgtagtatccacatgcatagtcttcaacattccttgctcaatcctgtcccgagtaatgtggcaatcgttttctatgtgtttagtacgctcatggaaaacggcattgtttgcaatatgaatggcagcagtggaatcacagaacaaaggaacaggcttagtttgtttaacctgaaactctgcaagtaacttcacaagccaagcaatctcacgacttcccatagccattgctctatactcagattcagcagaagaacttgaagccatattctgctttttagatttccacgaaatcagggaatcaccaaggaacatacaaatacctgaagtagatctcctggaatcaacacaagaaccccagtctgcatcagtgtatgccttgagacacagatcagattttgatgagtaaaacaaacccaaaccaatcgtgcctttcaaatagtgaacaaccttctgagctgctttcaaatgtgaatttttaggagatgaagagaattgacatagtctgttaatcgcataggttatatcaggtctagtgattgtcaaatacatcaacttcccaactaatctgcgatagacttctggattatcaatcacatgttcatcattgtgttgacttagtttcagacttggttccatcggaatggtcgatggtctgcaacctaataagcctgtatcctccaacaattccattgtatacttcctttgacacacagaaatgccttcttttgttctagcaatctccaggcctagaaagtacttcataggacctaagtctctaagcttaaaagctttggctaaatctttcttcaattcttctatattctcatcattatttcccgcaataacaatgtcatctacgtaaacaaggagagcaatgtaagctttacctgaaatacgcgtgaatagagtgtgatccgcatgagatttcttgaatccaagcttctttagagtagagctgaacttcaaataccactgtcttgaggcttgcttcagaccataaagagacttctgcagcttcaaaacaggattctgaggcaaaactcctccctgtttcatagagtatcctggaggtaaggtcatgtagatttcctcttttaaatcgccatttagaaaagcattggatatgtctaattgatggagactccattccttgatggctgcaacagataataatgttttcactgttgtcatttttgccactggagaaaaagtgtcataataatccaagccttctctttgtgtgtaacctttagcaaccaaccttgccttaaacctctcaagactcccatcagcattgagcttaactttaaaaacccatttacagcctattggtttctttccttgaggtaacgaacaaactgaccaagtattagtactttccagagcatctatctcaatctccattgcatcaagccattctttaatcttcttagcttgagcataagtacatggttctggatacttattcacagcacatatatatgcagtaaattcctcagagagttgagtgtaattaatataggcattaagaggatacctcacatcttttgtcacatctggaactgcattacaaaagtagtcctgaagataacccggaggtcttgattctcgtttagaagacactttaggtgcagattctgatgtagaaggaggattctcaatattctcatgaactg

SEQ ID NO: 817 - DNA, 78369 bp, Arabidopsis thaliana
gatcaactaaatcaaacacatctcgaggaatgattgttttatccgtaaaaggaaacacggtttcatagaacacaacgtgtctagagatatgaatcgtattggtttccaagtccagaagcttgtaacctttataacccgaaggatagcccagaaaaacacaagctcgtgctcttggtgcaaacttatgtctctgttgaggacttgtagattcatagcacagacatccaaatactttcaaagaagtataatccggtaccttcaaatgaagcaactcaaatggtgacttgttggatagaagaggtgtaggcagcctattaatcaaaaacactgcagataaaatgcagtctccccaaaattccaatggcatattagcttcaaacatcaaagctctagccacattcagtatgtgttgatgcttcctctccactactgaattttgttgtggtgtctcagggcatgaatgataggaaataatacctttagcttggtataatgcctcaaaacgcaactcaggagcattgtctgacctgactgctttcaccaaagtgccatattgagtttcaaccatctttagaaaatccggaaatatctgtagcacatcattcttagctttcatcaaataaacccatgtagcccgactgtaatcatccactattgttaggaaatacttgtaaccttcagtagttggagttgcaaacggaccccaagtgtctatatgtatcaaatcaaacttattttcagacatgttgttcttggaaggaaaggagagatgtttctgtttagccttttgacaaatagaacaatgaaccaaatcttctttattcctttttggtaatccaagtacatcatgtagaacatcatttttctcataggatggatgtcctagtctactgtgccataatgcactgtctacaacagcattacaatactgtttctctgtaacagatgagttaatatctacactagtacattcaacagaactagtgtctaagacatataatcctccaatctgattacctcttccaatcttctgctctttgataggatcctgaatcacacagcaatcctcatcaaaatagatcttacacttcatatcttttgtctgctgactaacacttagaagattaagtcgaaactctggaatgtataaaacatttttcaatgttaaattagagttcaacttgatcactccaatgccagcaattttgacatttgatcctgtaggtaatgttacttcattactcaaaccatcagataggctttcaaacaagtttctatcataagaaacatgatgagtagcaccactatctatgatccaggtattcagtgataacactttcttagaggatgtcaaagaacaaagtaaccgtaaagttgagggtgaaaaagagataccagtgaaagtagagccattgtcattattcgtgctcgcaaaagaagcaacagtgatcggttttgcaggattatgaagctgagtactgaaataggctatcacgtcctgtatctgactcttagacatacttcccactagctctacaattccatctggtccaattccttgagtaactgacaccttaccatcagtcaaggctaaattagcaacaactgattttggtttctctgatggtgtgacagtcttcttgtccttatgcttaaaaccaactggatatccatgtatcttgtagcaagtatcagcattgtgtccagtataaccacagtgagagcattgaactttcggtttaggctgagtaccaaaggacttggcaagattcactgcaaactgatcactttgaggagctgagacgttgaaagtagaagcattagtaggcattgttacaatgttacgttgactgtgatcttgatccaataggttgtaaatctcagcaaggtctggtatcgttttcttcataatgatctgactccttatggttgagtaagattcatttaaccctgagagaaacttaacaatcttagaatgttcaatcattgaggcagtagcaatacaacaggtacaattcttgcaggtactaacacagctagctccatccaaatcatcccataaagtctttaatgcagtgtagtaatcagaaagagacatcgttccttgttgaagtgaccaaatctgctgagttaactgataagatcttggtaaatttgtaatgtgaaatctagtatccaaatctttccagatttctgcagcatcattgaatcgaagaatgctcttatagatttgcttcgtgacagaattcagaatccaagatttaaccatactgttgcatcgtgaccaaactctaaagctaggatcagattcaggaggtcttggtaaggttccatcaacaaacgcaatcttattcttagcatatagagaaacaaacatcgcaatcttccaagaggagaaattagttccatcaagtacctcagaaacaagagtattccctggactgtcaccatttgagagcgcgaaaggcgagtagtgagcatccgagaaatcgaactgtggaaaaggatacatcgatggtcttttgttgagattttgttgaatcggaggtgaaatcggtggatctggtgaagtttgaacacgatctggagttttctcagctgaatttttgctcgatcttctagtacgacgccgcaatttatcaacggcaaccatcgcaagaccaaaaaagaaccttgaaacaactgaaatttccagaaattgaacgaagaagagaagaatcaacaagatcggaagatccaaaaacttgaagaaacacagagattaggttgaatcggacggatctttgtgatccattgctctgataccataatagcaacagagagaatcgaagaagatgaaaatattatgttattcaacttaatgattttgttacacagatactctttatatgatagagtatctcggtttaatgtttggtttacacttaaccgaaatcaaagattacaaaccaactctagtctattaccgcagtatctcttacaggtcctgcttgaacaaccttacccgtcctaaagtacccagtcaccatcactctccacgaaaccacacttctttcaggcatttcatcgaaccacgtcactgcgatatccatatctacacactttatgctaccatctttcacagcattttgtctaacagattcaacacatcaaccaaacaattgttcctcctctattccgagatcatcttggtttcaagactcacatgaggtgatgaacctaattgaaaatttctcgagagtcgtttatggctaagtgtgatttgggtcaatccggtttatgcagagaatgggctcttatgggcttatgtgtttacaaaaggagaaaggagtttctgggctaagcaacttatgaggcccaaaacaaaaacatattggtattaagatcttagcatttctctcgataatgttcatcttcattctttgttcatcaccttgtactcttgtagagcccattaattttaacacaaatacagctaatattaagtatgctcattgaagtgagttaaacataaatatctttatctttttaacacaaaatataattaccctctatggtcaatttacttttttttagcttcttcctcattttttttcagttctccgatcacgttgaaatttaaaatttagataacaattgtattatatcctttttagtttgttacataaatttcttaaaattaataaactttccaaaccaatttcaacttaactcgttcaatttaaatcattttagaataagaaggatgagaagaaacggaaagctaaggctgtctacgtgagggtcatgatgataatcattttttttcttaggtcatgataatcttttttttttttaaaggtcgtggtaatcttcttttttcgagtgaacatgattatgttcttatacaattgtttccgatgttagtgaagagtgaaaccaaaattagttgtatctccaccagtccatgatctcttcacttcaaaaggagtcgtaatcatgagatggttaataaagggatattttttcgttcaaatatctaaagctaatggaaacaatctccaatcaaaccgtgtggatgtcttcatttggcatgtgtaaagcatttgaatagtttacaagaggaaacggtctatatacaaatgcccggctttaagcaagtgcaaagtgtgtagaattgcactggatatatccacaatattttagccaaattttgttttattttagggcctataaatagtttgagatgaccaatgataatcaagagggaggcagataaaatgtatgttaataaactgaccattcgacctagaggaaggctgataaaataaacaaaaaaatctggtgcacaaatgatagtggaacatccgtatgatgaatctcttagaacatggtcccaacaaacttctctccaagtagtctttttgtaataaggatccctagactctatcacttctagacactcatcagtcgtcaccgagagatagacataggctccacacaacgcaaggaaagagacttaaccagagagagataagcaaaactccaaattaccagccccatctaaccatctttcagaagatttcttttattatcttcattaagaaagctgacgataatacataaaaggcttaaaacagaaaattgtgtatgggtattattaaaacaaatattctaaaaaattattgcactatataaacggaaacattcggttttataaaagtacaagaattattttggtatgcaggaaaatacactcttttataacatctcataatcaaactttaacggtgatatttttgttattttgtttcgtcactaacaaaataaaaacaatggttaaaaaaaccctattattcacaggctcaaaaaatatttgagtgtaaaaaactcgtgctttttttataaagaatatgctcttgtgtatttgaaattatctcacagatttgtaaatacttattaccagcttgaactttaatattatgacaaaaaaacgaacatgtagagcagcaacagattatacaacattttctcaaaattcacgaaactggaacaagaaaacagatggactacacaggtgcgaacatatacaattacaaatttacccttggctcctaaaagctagctttccttaacgacgagaaattaacggagcttcctaacggcgacgtaccaacctcaatatcaaacgaatcatatcgccggaaaatctcaatcacaaacaacctcgccaccaaaacaacaaaatccttaccggcgcattgtttattccccaccgtcggagtctccgtctccggtccattcgaccacaacacatgcctcaaaagcttctctccttcttctccgacgaatctctccggcacaaactcatccgcccgatcaaaaatcttcggatctctcgtcgccaacggttgataaccgtaaagcatttcaccggctttgactttaaacgccgcgtcgtggctttcgataaccagatccttcttcgctctaccgtattgagccgtaaccggtggttcaaaccggagacattcgtaaaccactgatttggttaactccattttctcaatcgctcccatcgtgagttctccgccgttggatttaatcacagatctaatctcctccgctaatcggttatgaacttgatgacccgcccgcccgatacgtttaaccatattcggaaacaaaatcttcatcccaccccacgtgttgaagcacgtggcgaagagaagattgtgagtagcttcttctcgtgagatacccaatttatcggcttcaacgagaatctcaccggcggattctaagaaaaactcgtagagtctctggtaatcagatttgactaacgccggtggtagactaaatgtatggatgagaggttcttctataactctcggtaaaccaatagagagtaatggatggagattgaataaaacccatttagtgatcaaacccggagcgtcggctttgagctttgtatctgcgggattcgtcccgtagaaagctcgagccaagaaattaaaggcggttccgtcgctggaaccgccgaaatccgctttccctttaagggaaagctctttctccaaagaatcgaaaagctcggagtaagtagcttgaaactcagggaagatccggtttcgagatgacttgaggaggaagaaaaggagatttttgagcttttcgtgtttaggctccgatggatcgaggtacgagaggatacggtagcctccggttagttccgttgacggcatgtaagtaccggtgaaaagatctttcttttcgactttatcgacatcgaataaaaccgggaagcttttaccgtcgagtaaagccacgacttgtggattctcggcgataaaagctcccggtggcatgttgactctgtacaccgtggagttgtatttacggattcgtgatttgaagaactcttcagctccttggtcgtaaaagtaatcccaacggtctttgattggtcctacgattggtaaaccgtagtttcccggtatgtttcggatcgggagatctttggatccggttcgtgtcgctacggttagatcaggagtttctgacccggaagctttgatcggacgggtcaaaactcggaatttcaacggctttgatcgtacggtttttgggtggagagaaatcggaaaaggggttgaaatagaagccatctattcgaaacagtggcgagtgttgtgattgagaatatggtagttataaagaaagaagtaaattatgtgtattgaatgattattgtgtagaaatgaatttgtatttataaaggaaaataataaatgtgaatgaaaatagtgaatttagtggccgtggaaggaagattcctttttcagaccacgcagttattaaagagatctattggagactctggccaccggccgattcatttagccacgtgctttgactcttttttccttcattttataaagttggtactttttttattttttctgacatattaaaaaattggtaatgtttttgttgtgtaaaagttggtactatttattctcatattttatcgagcttgttgctctgttttgtatttttgtttctttgtttaatattcctcttcttataatatatcctgaaaatgtactatcaatagtttatacaagcatttgagactttaaaaatatttgaatagtttttttttggttcacgtagtgttttgaagaatttttgatatcattacgtaaaatatccgtaaaattattaaattggaaaattttaaacaaatggttaaccgtttggttcgataaaccaaaccaaactgttatccgaccttatttcaaaatctaactgactggctgactcttataaaccggacggttaaccaaaccccaaatctcagtttggtttgatccagaaaaaccgattcagttaataatcggaggcctagcttatacaaagttacaaacacttgaggtttggtagactgcacttttagctccatcccttgagcatatgttattccacgacttgatccatgattataagttgattctataccaaaatcatttgataaattaatggaagtaaataatatcgagaacttaatatagatatttttttataaaaaaaagttgagtgaattagaatgaatttaagaattgatagttttgacttttatgagaaataaaaaaatatataattattgatgagttccaaaaggcagagataatgtttagtcattttcccaattatgtattatattatcatattttatagagtttgttactctgttttgtatctttttgttttgtttttttcttttccccttctgacaatatatatcttcaaatcgtaaaattaatattttgttatttttgtataaacacacacgttgttaaaatggtatgtgtattttatctggaaatctgtctcgataaagatttttttgaagttttgtacctaaaacacgtcccaagcgttcgttttgtatcctagcgcattttattgtttattgacgaacatatctagcttctaaattattcacatgatactcactatttttggacaaacatgataatatttgtctcaagcgtttacctgttttttgccttgttggaaagaaaatacttaggtctccttctctttgaataaacctcataacatattggaatacacagaaaattctcttaagtttttgattgtcataactaaacacttccgagttaggagtggctattgatgaaaacaacatttttaatttgcatcgagggcgttacatggaagtaatcacaatcacgaagtcctcaatgctactttaatcgcatgtgtcttgtgcttaaaagataatatttgaagcctctgtggagtagctttttcataagagacaccaaactacattagcctcgagcccttcaacattttggtcgtagagcttaacatgtagctgatctgtttgttctaagacattatgctacgatgatcatacaacatgtgaacaaggtagtaattaattctggccttagtaatcttaaacttcttgtccgacgcttgctagaggttctttgttgagtggtttacataaatgtgataaaatgcattctcactggtcaaactaaccaaatatatatcaccattgtacttttttggtaaagcttaccagttttcttaactgtttgatcaacagcaaatgagtcatagaagaaatgaagcttaaaacattatgttgggaacagagccccgacacacaaaagttgaatttctttaaagtaaaatctaaaatattggggtctctaagtgttttttttttttatttataaaaagttctaccaataattttttaaacattacgtattatcgttgatataatttttgaacagaacctacaaatagtgttttctttcgtaagggctagcctgtctaaaaacatatatataaagcttagctaaaatcgatctatttccgtaaacaacatgatatatatatatatatatatatatatatgtgtgtgtgtgtttttgggcacatagtattgacattgagtttgtatggttttcgatataacaaatgggtcgtaaccaatgggtttcgaaattttaaatggagtttcatcaaaaagatgatagccaaacagagagattactcagattgacgacgaaaacgaccaaaggaaataacatatttgatagtttattatcgtaactcttacatacgaaagaaaaagacgtttaatttcactttttcgattatctcgtgtgttctaaataagtaaatattggttgtgtattcatgctcatcgataataattatgtaattcctgattcaacttagtaaagtaagatgttaaaagaaaaagtaatgacattgactacgacttgaaagaaacttgatatattacgacggtgacgagaaataacttgtcacgcctaaatgggaacaaagtgaaaccaaaaattgtttgtcgcttttagactttttttgaacatatgtagtaaatctgtaaataacatattttattttatttttacaaaaatatatgtattgtattagaaaagagttcatcattgtggatctacgtgagaagtatgtggaaatctaagtagaagcttaacacggtaagtggttacagcttcttcctcatgatcatcaatctcattaaacatggcgattccgcgagcaaaggcgaaagctcctgtccctcccactacctccataacctctttcaatttatgtgtcatgtctcggctcctaatgctaacactccccgtgtactcaggcgtctccaacgtcaagtatatcacgttaaaatccgagttagcgaagtcttcatgcgggattatgaacccctcagctttgcctacgatccttgaattattctcgggtccttccgtgagcgtgcgtcggaaaatcaatgctccttttcctcctcctctgccgtgaggttggaccatgtgctggctggaccggcgagaggagtaggaggaagatggggtgtgggtttgttgaacatagagggagaaggagaagaatgatcccggcgggtcgtaatcaggaacaggtgacaacaaagcgagtagaaggacaataatgaaagcagtggcgacagcgatgaggaagatgattctagttaacatgatcggagaagaagaagaagagagacaaagaggagtttctaactgttctttcaacaaacctctttggttttaaagttagattagtgattttggtataactactacttccacaacataactaaaccactaccttcttttgtcctcaagctgttatttttattctgatcaggtttagttcggtttcagtttaaaacatgtcagttctgtttttatgtctacacgctaaatacaaaaaagattctaaaataaccaatgaattggaagcttacagtaaattcatagggtaactaacggtttagccttgcgtacatggcctatgctattgacgagatctttacgtgtacagacagggaacatgttgatgttcttgagaactttcaaacgccaaagaacgtatgggaaactcaattgatcacgcgaagtgaagcggacaacttcattgaaccagaggcacatgaatagatttgtcaatggagtgtgttcccttacaatcacagaggcttcagataaagctgtaagaaagtaaaacagccaaaaattacttccatcatcaaagtttaggagctttggtacaacacttatggtataaagaaatttaccttttttcccgttgaatcttttatcttcgggtaatttgtcatgtcggtattgatttatctgcacttcaacttcttcgggtgtagctttgtgtttcttgatgacagcgtttgcctcgtcgtatacactgcttcgagctccatgttctgaaattgcaagcaccgagtttgttcgccaaagaagagcatctagtacaccaagtgggtctcttctaaactgggattttgagtctacccaaatcgagtacttggcatctgggaaaaggcgatgggccaacatctgacagcatgtagattcattagtatcattatgaagcatcttatatcagacatacatgtgcttgaaagcaaaacggaaactcaaatattgtgactccaaccatatttaaacaagattaaaagatgtaaggaaaaaaaaaagacaacagtgagctaattcaaatcgagcacataccattttacacagcacaaaatgaaaaccaaagaaggttaaatttggttgtaatggaaacattttacacagtaccatgaacgcataatcagaaacgtttaacacccagcgaataagattgctacgtgcagtacaaatcatcacatgtgcctctgaagtagatgagtagtacctttgggatcttcccattaagcctttggtctgtaaaaggaagatcctttacaatcacaatacgccactttccaatgtgatcattctcatcgatcttatgaccctctgcttcttgtgttgtaagagtaacttcatcccaaaacgcaacatagcaaacctgcatccaaaaaactcattcaggattggatgcagcagagagagaatcacgatttgttcaaactccgtactcgatatgcaagagaaacagtggacaggagaaaatcagagtgaccaaccttttgacttgatgtcttagacattccaataggttcataaaggttatctccaccaccaaacgcacacgtcgagaccactacttcacatgatgtcataaacttcttatccttatccgaaatcctaaatcccccattttcattgaaaaacccacaatgcaaagaaactgtttcccttacctgatgcaataaagccaatactcagttcaagatccatataaaaaattcctaaaattataggaaactcaagttcttaagccttgtagagttaccaaatcatgacctgaaaactattttctctctcagcaaaagtctggttccccgtgaataaattaaaccgcgtcccattaccacgaacacctctcatttctcccaccgacacatccgtatcagttagatacacaactctcttaaccggagagcctgaatctttacgctctaagatatcaagatgctcaagctcctcaggtggtaaaagcttcaaacaacctaccacaatccatacaatactttcaatatcaacatatccttccacaacacacacaactcataaaacacaacaatactcaaattttatcacagatgtctcttttttcccacattcagacataaaaacagctcaaaaattcagatcctttttccacaatccatacacacttgaactattaacttaaccattccacaacataaaacacataaaatcaaacaataccaaagttttaaccaatcaataacaaattaaagcaactctcttttcccacattcatggcctattccggcataatcagctcaaaattccgatcctctttccacaatccaaacacatttgaactatcaataaccattccacgacacaaaacaaataaaaccacacaatacccaagttttaaccaatcaatagcaaattaaagacactctctttttccacattcatggcctattcatacataatcatctcaacattcaggtcctttttccacaatccacacacacttgaactatcaacttatcattccacatcagagaacgaataaaaccaaacaatacccaagttttcacaaaccaatagcaaattaaagtaacactctttttccacataagccaattcgtacataatcatctcaaaattcagatcctttttgtacaacttcacaaattaatcaagcttacgttgtctaacaccaccaataactttggtagtaggatccaatcgattcaaatttccttcatttttcttactaggactctctttcccattcaaatctggtttcttcaagtcactagatttgaatccgatcctcgttgattcaaatacaagcaacccaacagcgagaagaaaaactaagacgacccagtatctcacaaaaagccttagaacatgacgaggaagctcgtagctggttctgtgactcactttcttccgctttcgtcgggtacgagctcggatccgattcaaatcgttagattcgtcgtcagatactgagatcgagacactgttgttgttgaacattgttgtggtttcgaattgtttaggatgatctttggaattggtttctcgaaaacgaaagagttgagcttgtcgtagtagagagagatcttcttcccttagaatcgaatcatcggtgtttatcaaattgaacgaacccgattaaaccggtttatgtctcaataggatgttttagagattttattttgtttcattatatatgatgttatacaactttctatgcaatttataaatgatttggtatcttatgacttatgagttatgattatttctatcatgcaatcttgcatatcattagttgagtttgctaaatcaagtattaaaagatatttttaacgaaataaataattgtcttaaattgttagcttttaagtaaaacatcatataatttaaaatagaggtactaaaagttaactgttataactattttaagtttgttaaactttataaacgtcttaaatatttataatattaaaacctgaatgacattcaaataatataaatagtttaactttataagaatttataagaagtttaaacattataaatatttaaaatatttaaagtattcataatatttacattctataaaaagtttataataataatatttaaactctataacaattaaaaataaattttatgaaacttttttggttcctttgtgaaaaatgcaaccggtcaaaacagaaaagatacgactgtagttgaacaaatataactgtccaaaaaacccgtaaataacgaaaatatacgacaaaaaaacactaccgtaaaacaatgaccgtaaataattgagcgaaagttgcgataaaaaacgtaaccgttgagaagttcaaaagatacttgagattgttttgttattagattccaaaaaattttagttagactaagaattagagaaatttctttcatattaaaatgatgtatatttaaaataacttcgaaagtaaagaatttagatccattttacaaaaaaaaaaatttggattcatcataaataatcggtgtgaaggaacaaaaatatgagaactatttaggaagaaggacaaatatatagagttcaaaactcacgaacatttaaataaactactttattcatacgaaaagttgtgaaaaaagcagaaaatatataataaagagacgttactttaaatgaatagatgcaactataaagaaacaaccgcaaactaaaaaaattataattgtagttgaacaaatataactcaatgataaaaagataaaccgtaaactgaaaagatatgactgtatttaaattaatataactgtcagaaaaaaataatcgtatataatttaatgtaaagatgcgataaaaatatacaactctaaatacttgaaagaaatattgtgataaaaaaaggcagctattcagaatttgagatgcaaaatgatacgaacttagttgaacaaaataactgttcaaaacataacaataaatattataaaaagatacaaccacaaaaatataactgaaaatattttaataaaaactaccaaaaaaaaagcgaaagacatttattcagattatttttattattaaattataacaataagtttacttattctcaaactcttatctataatactgatgcaacctggaaggatgatcatcgtgcaggttttggatagatcctcaaaaaccaacatggatcaagattttatggtggaaccggctatgcggagtatgtcaattctcctctacaagcggaagccttggcgcttctctttgccataaaacaagttcgccaactcggtttcaaccatcttacctttgctactaactcttcacaactcgtcaaaaccatcaattcggagactcaattcaaggagctccatggaattcactttgatatctttgatctatcctcttcttttaccgtttttagatgtgtttttattcctcgtttgcaaaacaatttagtagattcccatgccaagaaggtcttatcatcttctgtaatgggcctagcccaatcttagagcagaaacgaattttttttttttttttttttttttttgtctaaatgcagaaatgaaatctatgttgcaaaaacaaaagtttccttatccccaaatcgagctgaaatcttcaagagtgtgtcttcatttatctactgttcatcattctcgtttaggacaagcaacgaatgttaaaacgggtagcctgattaattagttttgtttcactaaacgaaaactacgtcgtttcagcttagggtttatcaattaccagaatctaccaaattcacaacacgagagactctctcgatgtcgagaccctaaatccaatcttcatctcgaccacacgacgaacctttggaagagttcttcgagttctccacaaactaatttgagctgatttgatatatttcttcgagttctcgatatgctgatttgaggtcattctcgacaagtttctgggtttagactagtgtaatcgatgagatattgacattatatgaagctgagattacaattctgttttgctttgaaccgaatacatgctgcagttcacagttttgacaaaaaaatgagtgaaatgaatctaccatttgaagttggtcaaactgtagaattgaaatcttttgaattgggttttcgtggtgcttggtttcgttgcaaggtactctaaatctccattgctgcttaatcttaatttctgcatttgcaatcgaaattgatgttaaaccatcattattatcagattctgaagatatttcagaaaaggaaagcattattctttgatgttgagtatattgattatccaggagaaggtacttttaattttcaccattgttatatgcttatttgtaaatctcttaacgtttttgagtgccacagggatacattcaacaaaagtatttcaacaactcgaaggcggaaacgagaaatgcttgatgattcgacctgtatatccgccacaatgtcgtgaaaatgaagtcgatggcggtctagaagaagctcttgttgttcatggttcttggaaggttggtgatttggttgattggtgggaagcctattgttattggtctgggactgttctggaagtgaaagaaaatgaatcagtacaggtaactgctactctatcttgttgttttgtattctatgtttcattttatactcagttttacatgatctctcgacgaggcgtttcatagtgtctttgttacttcaattgttacatatgtgtttatgctcattttcttgcataagttacatttaaggttttattttgtggcattagatggatgcttttgaactttgaagtaaaaactgagtgtgtgtttcttaatggtatatatcgcagattgaattgttggctccaccatatggcgaagggagtagctatgaggctcagtctaaggatttgcgaccatcattggaatggtcacttgaagatggttggactgtacctttttctaaggttagtatttgagaacagatggatgaatgaaacaaattatttaagcttgcaaataaaactgatacgtgacaagggtttttggtgtgtttttcctttttaagcattagattgtttttgagagttttcatttttacattaggttttgatatttcctttttacaacatgtatcgggtggcttatataaaggtcttctttgcttgatgagaaaccaacttccaacaattaacctaattctctaagagagacttgtgttaagagaaagctttgtttaaatcgttctttctttcttacgttaacaccgattactagataaaagtcgaagtgttacaaaaaacgtatttagtcagggcagattctcttttattaagaccctaaagttgtcttgttgtttctttgtgcacggctaaaatcttgttgattaaatgtcagttataagttacaccttacataagtgtaagcgatccaaattggtatgttagtgatgcaaagtataccttatatatactcggaactttactgttttggttgcttatcttgttttaccatccatctttcttgtaggatggggaaaagaggcaatgtgctaagctaatgaaacagttaaatgaaggttagatttttttattgtacgtcaatgctatttccccccaatgtttgagctgttagctccttttgtttgtcttgatagtttgatttatgtggaaaatgaatgtttgcgttgtgttcttatgttagatcaagtgagtgaagctgaatctatggaagaagaaaagcagagaggagccgaacctaaagaagaagaaaagcagagaccgacagaaaagttgaaaagcgatgaagctcttcagttgaacatcatggattcagagtctatcgaagctgctgtcttggacttggaagagatgattgttcgtttcgagtggctgaaagacatcttaactcctgattcttcggaaaaaaattcctggatatacgaggattatcatccatcctcctcaagaatgtgacaggtatcgtttcttcttcgaacttgataaaaacagtgcttttaggatagctattaagagaagatagtgtcatgagaaactgaagttccaagattgtttacctttaagcgatctaaagttgttttaacttgttcaggtattgaacatatcaaactaaaatcttctcctctgggtgcaatttcgtacaggtaagatatatgtttccttttatcatttctgatggattcgtcgtccacactatttctaagatacattttttggcagtcctcaggtggaatatattgactagaaaatgtaaatgagcaaaaggcctcaggtggagaagattgaaaactgaacataactctgtttttgaaaatgtctgttcttttagatatttctgtttctttgttcctttgtgctttggtggttgatacttttacagcactttctctgtatcttaatggcacatttaactttgagccaactttttacctgtattgaatagacaaaactatatactatatagcatgaactttggaactaacaagaatgatctagattttcatcaaaggccaatgataatgtagagaattggagatctctcagccatgtttggagatatctttgggaactaacaagaatgatctttgcgtgactcggcccaataatccagatcagtcaacaagttaaatgtcgctattcaacttttgttattatctctctaagttataattgccttagacctagtaacaaaaaaacaaggtaaaagtgagagggagagcgtgaaatcttgcaagtgagatacctcaaatatttttttgccgtgacatggtttcctccacaccgatggtttttaatgcgtaatacacttgtatcaatcactgttaatcgttcttttgattcgtgataagatcgtaagctgaaaatttggtacttgattttgtgtttctaattggtggttttatggtttcagcacaatagagtgtttttcacacatagattctctaagtatttctaagaatttttatccttaaatgtctattccatgttgatctaatgtacttgttgttttggggtttttcttttgtttttggttttatgatcttagattagtgtttgaaattaacaagttcttgatacaactaatatatggagacttcaaaaagaaaacatatgcaatgaagtgatttggattagtacaagtgtctcatttgcaactaataacaaattgtggtcgtcctcatcggtagtgaggccccaataaaaaaggtaagtaagttttgataagttggtgcccatacttgacgttattatcaaaaaagaaaaatggataaaattgaaagaaagatagaaagaattcgtaaagatgactctccacacaatcattagtgattactttattgaaattttatagagacatttgcacatgccttttgccaaaccaccgttccttttcttttttcattttgccttcgtttttcaacatctcataagaactaacaaaataatattttatttatttcaaaggtgcttttcgtgaatcaaacctttctctttcgagggcctttggcttatctttcatatagggttgtaaaaacttagtgaaagtagtttaattagatgaataagattttcttttaagtagaataatgttttggcatatataaacaatagtttatggtcatataaaaactgtaaatcattcgctagtcaaaatgatgtcatgttttaagaatattagaaaatttgtgaatagacttactcgactgttagactcattttaggaggaaactttttttttttttctcttttgttaactaatatgttagtgaagtaaagttatacgcttaagatgttcctgtttgatcgtgaggaaaagtgttagtgaagtaaaatttcatatcggaagttggaactgttagggtcaatctattcattatatattggttttaagttgaaagtccatgttaaatctaaatttgttatagtatcaaaatcacccgattgttagactacttcgtaaatgttgtttctatatatgcttactcttcatatgttcatgcacgagcatcttacgatgtgagattttacttcactaacacttcccttcacactaagacataaacatataaagagtgagcatatatggaaaaaagatccacgggttagcctaaaaatcgagtgtttctgatatcatgatcttttaccaggattatccatgatctgctttaacaaatgagtgtcaccaaattattcttaacatttgccattttgcttaaactaatttagatttaccattttttgccatttgagaaatgttttataaaatataacttaataaaaatattataatctgaaaaaaatggaaccaaataaaaccaaacataatatgttaaattgtttttataagaaaatagcaaatctaaaatattttcggcaaaatggtaaaatctaaaaatgccaccaaaaagagtcgttatctagtaattgattatgaaatttaatattatgacaagaagattttttttggaaaaatacttttatgtcaaaacttgtgcttgttcacgaaagtgtcgatgaaatttctcaaataagtgaataacagtagtatacacatgttggtttggttctcttaatgatgacccatcccccacccatgaacgtttagggtgtgtggtctcctctccctctcttccactatcatatatcattaacaaaagcgttaatttctataatttaaaataagacatattcccttattaaaaaaataaaaaaaatagacatatggtcagtggtcacatccatctttcattcgttaccatcgttttcattagcttgacctgagtagacctcttttgctaagttattacactcttttggttaaaagttataaccctcttttcattgaatgtgtatcattatctttatcttgagagtgatttcacacatgaaaacgaaaaatacaagtacatcgtatttatatatgctatcaacaacatgcattatggagctttaaatctcgatggtaatgtaccgataacactattacaaaccataaaaaaacatatgtatgaactaaatataaattaatgttaaacttggaaatggtggtgtatatgagagcatgtccattgcacggactttgcaagtttcttaagagaattccaatgaaaagaagcaaaaagttaaataagaattgtgtaattaacgaaggtgcgaaccttgtttaaggtgtttttgagtgtgtaaggtgcgctgacgtggcattatttcattggatgacatattaaacaaaacatgttttttttttcttttctcgtgttttttttttctttcactcgcgatgttctcctctctcttctattgttttctccgaagctcaactttgacgaattatgttcttcatcgtctcatgttttctcagcgacgatgagaatctgctgatagattggtccacccgttctcgatcttgggtggttgtcaagctctgctcaaaggcatagcttctgaattggcctctaataagagtttcaagtttgtcactttctatacaagaggtgccggaaagtctgtcactttctatacaataaaaaacataaagatttaacaaaaactctaaaccttcatttactcaaaatttagtaataaaaaattctaaggaatccttaattagggtgcttcaatgggaatgctcttagttgaaactacttattatgcaacctttctcattaaaaattagtaatcagtaaattctcatttttcataaattatgttgctagtgaatgtcttaaacaaaacttgtccaagttatcaaaaatgcatgaatatgaaattacaatattcttgtaacatttatataatattgttgttctaagaatactatatcagacgccttgcttgtaacaatgcatgaatacaattttatatcgaaatttaaaatatgttattagttaaaagtctaatttataaaatgatataacatttgcaacaaaaaaaaaaaaaaaaaaaaacgggtcattttgattggtttattcgaaaatcaagttatgttcttaatgtcctcataacttcaatgacatcaaatttttgatgttaacgtacaaacattcgataactagatggtaatgtatggcttggttataaatacttgtcttaatcataaaccagaaaaagaaacaatgaggtatagtggtttctcctttttatcttcacacatgtctccgaaacccaatttggttcctctaattatttttcttcaaagattcccaaaccaaatgacaaaccatcttcctaacttagtactagacccccacctcccctccatatatcttttatatatatgctttctctttatattcatccacaaaacacacaataagaacaacaagaaaaggtgagtagaaggaaaaacaagtaaaaactatgccgatccgatctaaccccttcttcaatatggatagctcggccttgctctcgctcttgcggcacacgggtacctccatggactctaaaagctcgaagaaatcttctggaagcatcggtggtggggtgcttaaaatgttcaagctcataccaatgctatcatctggttgcaagatggtgaacttgttgagtcgagggcatcgaagacccttacttaaagactacgcaacaacgggaacaatattcgggtttcgcaaaggaagagtctttcttgctatacaagaagatcctcattgcctgccaattttcatcatcgagctcccgatgctgacttcggcgctgcaaaaggagatggcctcggaaactgttaggattgctttggaaagcgagacaaagacgtcgaggaagaaggtgttggaggagtacgtgtgggggatttactgtaacggacggaaaatcgggtattcgataaggagaaagaacatgagtgaggaggagatgtatgtgattgatgcattgagaggtgtttccatgggggctggagttttaccatgtaagaaccaatatgatcaagagacagaaggagaaatgacttacatgagagctcgattcgatagagtgattggctctaaagactctgaagcattgtatatgatcaaccctgaaggtagtggtcagggcacagagcttagtatttactttctcaggtctcattaactgttgttacacttttattttttcaataataattaatggtgataaaatatttcgttagaaatataatttctatgaaaaataagttaaatctttttttctaaaaggtgaacttttccattgagcattattaatgaaggaaacataaattgtggattagaggttccctatgggccataccattaggctatgactatggtcttgaatgttgatcatccttttcatacgtaaccactctaatgaaaaggctagaaaaaagtttgaaaggaaaaacacttgtctagataataatgaatgaattatttagaaaattaaatgacatgcgaatgatgatttgtagcttattagtttataatagtgttctaggtatatgttaatctagttcaggttatctaacatacaaatatacaatatatgcatggttcactaatttacatgtattttttgtagtcactacttatgtacatttttcattctaaattagaaaatctaagattaactaggcaaaatgaagtttatttaaaatgtaatatggcaaaacgggaatcgaattacatgttcaacagtttggaatttggctcatgcggaagaaaaacagaacggccataataagcagggccgttttgactagggcatgcgagatgtgcgacggtatgagacccagtgataaatgaagcccaacatttttcatcacttaagaaagggacttttgcccccaaaaagaaaaaaaactaaaacaaatacaagaaaaatacaaatacaaataagaattatttaaaatattttaatgaaaaaattatattacgtatttaagtagagacatctatttgattgaaatttgaaatagatggttactttggccacataattatgttatcttttatcttgtagtattacataattatttaacgtgatatatattgatttatcaatgtatataattaccaaatgaatatattttcatgtttatttagaacataatatgttacattttcactcatatattggttggtgctttttttttcctacttacaaactctaggaataatcatttatctaaatactttttcatttctcgccatatacctaatcagctttgaaattgatgtgtgttggaaaacaaacaccaaactaactcgaacacaatataggttcgatttttccttatttatctacatttttctgttgatgtaaaagtgtaaacaaaacctatttgaacctcagagaaaaaattaaaagaaagaaaacaaccccccttaggaaaaaaaaaacattttcagatggaaaaaagatatctaaaagtgaagtcataagggataatatggacaagagtagaagaaggggactgagacatcccttgttcaacacagttgagagcatctttacccaactcagtaggcaactgaaggaaaatccaatcaagcaatgattcaatgtcctttgcaaagtcatgactataccaatccatcagctttggtatccctattttcaccaccgatatccccaccgatgcttctaggtactctcttttcgccacctccaactcctcctctactttactcgcagtgtacacccgtaccttcatgaggttgcaacccatcaattagttttggaaccatgactatttaggagagaataagacctcattttctaagagtaagtttgcgttcataagtgaaaaatatttcatattttcgtattttgataaaacaaaatactaaaagttgtgggttcatttggaaaaagaacacaccaactttaaacacaaatgcaaaacaaacaaacaagacctaagtatattgatatgatatgaacatgtacttaccgcgggtgaggaccagctaccacatgagagagcaaatgttacaagtggctctgacaattccaatccaaatttacttctcactgccatttcatttttctttgaaccctttggagaaatctgataaatcaagcgaaaaatgtaaagtaaagtcattgatagatgatcatgacaactctagagaaaggaaagggaccaacgaacgaatagcttacatattttgagtgatgcggtaagcggaggatgaagtgttcgatcgtgattgcattgagaaagtggcctcctacatttatagtcgcctgcaagcacaaggggccatctcaattagaaacactgataataattttctatgtatcttttacatgcagagatttttaatatcatagacttaccttttgcattaatgtcaccatatcagggctctccggtattccatgttcaaggaaaccctaatgttttcattgtaacacaagttaataaaccaaagacaggaatatatctattactacatagatattgcttagtgcttacattcatcatgcagctgttataaatgtttatccagaaagctaacttctcttgttgattaagtttctgcatgttgactaaagaaagtcttccaagcaatcgtctgaaaaatttcaaaaaaaaaaaaaaagaattgatggatacacaaatcaagaaaataaactttcattttagcaagtaggatttttcaaaccgcgcttacttcagttggcggatgagaaacaaagaggaacttgacgttctgttttggttaagtgaggcttcttcaacatcactgaaattcttatatcgaccaatatcccttcttctaaaactagagcaaattccataaggatccctgaatgccgtatctttatcgttttcttgagattttgtaaccatggatctctttattgagctcattctcatgaaaatgttagacagacatttaaccaaatcctcggaaattttatttggttcatcaccgccaccatgagagctccgctctgcatttgttttgcgacatctatgactatcctgctataattatgtaagtgaactaatgattaaatctacaattcaagaaaaccaaatgaaaagataaaaagtattactatgtatgtacctttagtttttgagcttctaaactcttattcagttgtgtatgagcaatagtcgttttcttcatcggtgttttgatagaagtagcactcaacttgttttctttacccttcctacacactaaaaagggaacactagcatcatatattagtctaaatcacatcaagaaacctgacctagaaccctataagctcacctgaaacagaacaaggtgcccgtgaaagaggtgattctgattctctagcactagtggaagctgacttggatttggtctgccaatgcttaggaaatgcaggagagcattttaaattctctatcgatgaagatgtaaaaactgcttcttgatacaattcttgtctacaatgcacaatatgttcttctaaccgaaccaattcctcttccaaaacagccacttccgcaagtaactccaaaacctacatgaattaccaaaaaaaaatcccaattttagacaagatttagagggaaaataaattcactgagctatgtttttcagttacaaaccgatggaggtagaaacggaggaagacggggaagtgctccaagaggcctactaaatgctctttccattgctcggtgaatgttttcttcaagtctcagcttctttctcaacttttcaacctttaaacaaaataccatccagtcttataaatttcttcaagctgtatattgagcaaacctaaagacatgaactcgaaaaagccgttacatcttcttgcagagtaattatcttctctcgatttaacgcctttcgatttacaacaccattttcacaacctttcagtttcttcccctgcatcattcagctcatagtcagatcaatatcacagcctagttaatggatcttaaacactctttaatataaaaaaatgaaaaagtccaaggagattacataagtttctacagaaaaacctcaagaactacactttttaaaaaatcgctttcaagatcagtggaaaaaaatacaaaatctagatttacaattttgttataaaattaacaattgaagaacaccaagaggaaaatatcatcattaataaaaaaaacagagagatcaaaacgattgagattcctcactcacaatgttagtatttgtagatgatggagttttaacgcatcttgtataactactactaccattactactgctactgctgctactcatcatcataattgtcttccgaatcaaaagctgtataatacaaaactacagaggagaaaaaaacattaagaaacatatgaagaagttgtaaaagcgaaaattcacaactaaaacctggtttggatcagtgatcttgtgtcatcaaccatggtgatcattcttgaaagtttgaaattacagaaaggtacatgtgtaatgttgaatcactttctttgtaatattatatatgtagagagaaatgaataatttagtacgtatagatggagacagttgcagaagaggaagatttggtgatgtttcgtcttcagcttcggtgagttttttttttttccttgatttgttttgtgtattcattagagcaaaaaataaaaataagtgagggatatcaaaaggagcggtgaaacggtcggtcgtcttcatttttatttttaaattgtttctttttgtcttatatctttaaattgctttttttttgtgtggatcaaatgatatttttaagttttaatatatatactatttctatttctgtacacaaaaataaaatattttaaccattgtcgaatatattaaaagtatagaaaatttattatgtcctttatcaatagactaataagatttgtttttctaattagtaaactaaaataataaaattaaaattgagatttggtttaaaaatatttttgtgaaatcaaaaaagtattttttcggttaataaaataataagtgcttgcaataccaataaaatagttatggtttgattggtaggtaatcacagtttttgtcaaggtgattatgagagttttttggctgttaaagagaacggttaaagaaaaaagagacgattataattggtaattagattctaacccacgttattattgctttttagaatatatttattgtaaaaatgatagtatttaattacatttgtcatttgataatcacagttttgttaaagcgagtatgtgatgtttgaaggttaaagagatatgattataattagttatagactataacttatagtcttatagataatgattaaagaatagacgatacggattaatgcgtcaatctcttggtgcagtgaatttgaaactggtttagggtgaactgaaaaaggagagagcaaggtgcttgagccttgaggtgttgagatgaacacaagttacacttgcccaaaaaaaagggaaaacgaaaaagaaaaaagaacgcaagttacgacttgacatagtataagcacatgtgtgacgtggagaacagaagggaagcataaaactaacgaagatcatatctaattattgaacattgaagagatagatctctacaatatcctagaaattctttaataatcagaaaatgatcagaaattttatcatccaattaggtttacgaggataaatgtagtcggtacgtaatccattcatttgatttttttcatagtaaaatatagcactatttcgactagttgaaaaaaaatagttagataattacatttttgtggaaagttgatctctagtctatatctacgtagttataaaataaaagaggagtggttcatatcaaatatgctctaaaaatttcatgagcgacacacatgtgtactattgtgtacgtcacaccagagttggctaaattttttcattgatggtttttgtttgaagatcaacacgttgatagcttaatctgtttctcatcgttaaaacgtaactagtcccgaattctagtttacactatttttggattgttcgcaagcccagctggcaaattatattattacatagtttcagttgatatgtctctttttcaaaattatgttcatataccctaacgatacttaaattatagctttcgcttaatgatgatggatacatcatacctgctaaatttctctacctaatcggccagtttccttttggcctaaagaattaaaagcatcttccactaaatgttatacttttctattataattgtatatataataaggaacggagatattggtaatctaattactatattagtacatcacatgcactacaaaaaagaagtattgtgggaaagagatagatccgtacagaaataatgagggaggtgtgggcatgtgtttcaccatgatgagtgaacgtggtgcggtggagttagaaacctttttgtcttctctgtctcttttcgactgtactgttgtgtcgttcaaacaattatatatatgtcaaatgaatatgttttagagacaatagtaatatttatgttaggaacatggatcggtgtgtgtgttatggatgacaagatcttgaccacgtacgtactgataacaacgaccaaattatttattttcatgaggcaatttgaaattaaacaatctttaacaaatacaaatttcagattacaatcgcaagtgagatattgcatctctggttttcagttttcccttcgccggaaaacaaagttgttcgtcaccagactcttcctctagatcgcgagtgggctacttatgggcctttgatagttgggcttaaacttttcatatgttgaatttttagcccacataggcccaaatatatgtggtattatcataatcctgctttgactctttgaccattgtttctggaactcagtgcccacacaattcaaatacttgagctccgaacggtcgtcagctagggtttttcttcactcagagagaaccaaaaatggtggtcgaaaaacaaacaaagtacgaagaatttcgtttgaaaagagtggaagagaacaagaaacgaatggaagctctgaatcttccaaaactctctcaaattctcaattccacttccgtcaagatttctccggttttgaatcttttctctcttctcttttacataatccatacaatgatcgattgtattaattaaattgtgtaaaaatagatgaagaagagatctattcctcgaacaccagagaagaagatggtgattgttcgtagatctagccgtatctctaattcttcttctgttccggtttacagagaagcaagtcctctttctttaatctcttgactctcgaatttacaaaaatgggtttttttcctcatttctagggttttagctcgttttatgtaatttgggtttttgttttgttttctacaggttgatgttaaacgagtgcacatacagagaaggtgaaattgcaaaaagatcttatctttttcatcttttgttaaatctttgaaattagactagtttttgtcttggttttggttctgtttaggggagtgggcaagaagagagatttattgaatcgagtttatgtttctgaagaaatcagagatgaggccatttcaagagctaacaaatttcaggatgaattggggagtggttatccaagttttgtgaaatctatgcttcaatcacatgtttctggtggcttctggctggtaagcaactttcgtataccctaaatcgttagcttacattgcttgatttctgttctgtttggtaaagtccattgctagtctttacattgcttggtttaatcaattttcagtctttctaactcagtacctatgagaagtctagctagtagctatttatataacttacattgcttaatatttatgttctgttcgcttaaactccatcaccgttcttagtattgcttcgtgttactctaaaactatcgcttttgaattcgaaattgttgagataaaaatgtctaaccatgtaaactacacataaaagtttatgtgttaagtctagagaagaactattgtaactagcctaggggtgttgcagggaattgtagtttttccagctcaacaacaaatcttacattaaggttctaaggtcttggttttgtgcgtttctctggttaatcaagtctcttgtatggttttagaattgaatcttcttaaacttatctgatgtttttgtacatgtgaaatagcattagcagacagtacttctaacaatgataagctatttatataatttacttaatttctggtctgtttgcttagactctatcaccattctttgcattgcgtattacttggaaaagtatagcttttaatccgatgagtttgtgataataatgtcaagccatgtaaactacaaaatttttaattcaggacctctgaaatgttatgtctagagcagaactattgtaactagccttgggatggtgcagtgaattgtagcttttccagctcaagaacatcagctgaatcttataaggcccattctggattcgtttaaagtcttggtttgagtgtttctctggttaatgaagtctcttctatggtcttattaaactcatctgatgtttttgttcatgtgaatgttatcattatctaaccaagcaaagccattcttttggttgcaatcagggtcttccagtgcaattttgcaaatctcacctcgggttacatgatggtgtcataactttgatagatgaagaaggcgaggagtatgagactatctacttagcgagaaagaatggacttagtggtggatggatgggatttgcggttgctcacaatctagcatatggggatactcttgttttcgagttagttcgtcgtaccgctttcaaggttagtaaacctgttagttacctaccaaaaccgcaaaaaatgatgaaactgatgattgatgttgttattctgtcaggtttacattacaagagttggaagttgtggagaaagctccaaagatatgagctgatcatgtcaggaatttggatatgacctgagttagaagtttatttgcccttttgtcttttgtaagtaagatggtaactctaggctaattgtcctcttcagtcttccactgctaaatctgatattttgttaacaatattttggaagggttgcaaaaatccttgaaattttaggaatgggaaataacagtaaatttagtttgatgtttgatgtttttatttgttgttttaactcttaagagctaagttgttctaatgattaaatctcctactaaaatcgcatcactttctcctaaataatttaaacggatataacctaaagtatcgcttgatccactttagacttatcaacgaaattattaatgaaaaaatcttagtatcgagcttatctattttaaaaccattaactaaattattaatgcaagaaacacttcaagtaaaaatcctcaagtattagtacattcttgatgtgtttgagttgttggtagttgctactgatttcagcccaaagttatctcgctttcgccgtcatagatttcaggtaacatgtgttataaaagacctttaaaaaattctaaatattctttatatcatgcgttagaaaactttagaaatttgcatttgttatattttaaatatagacaaaaatgtagtatttttgaaaaatgttatcataaaaagtgttatttttgatgttcttcctaaatcatttgctcattttctatagtttatgaatgtggtgcaaagaaatacaagcttttaaatgtaaaagtacaaacttttcttcagtcgtttcttgattatatattctctaaacaaaattctcattattaagttaaaacatgttttgctaaaatagaaatcaaagctgatttttaagaatgctcaacaagtagtattttggatcggacaatgatatcatcatattagcatgcacaattcatttgaaaatttcaattttttctaagcgtaaattattgtattcatcttattataatcaatgcaacgcagtaaggcactagcagacgcaaaagagagtgagaagaggcttgaaagttaagtcgcaaaggaaagccttcgtcattgcttaacttgcaatcgaagtcaagaaacaaaaaattactctgaagggcctaacgttcacgtcaatcatccaaacacacacatgaattttttttagagtcttccattgttatcaattagatttttgctatcactactagaatactctcaccaaacactgaaagaaccatctcaaccaaagattaattcaagaaaacaactcaaaccaacaaacaaaaataaaataaaagtattgagtctttagaaataaccctaaagcaaatgttcagagacttttcttgtgtcttctattttctggactcaagagtaaaaataagagagaatgagttcgaatggcgagaagagaatgatgaaaaggtcagattttgcgcagaagttgttggatgatcttcgtgtgaggaaagaacagctttcaggctctcagaactccctacaaaaaggtatgaatgaactagcattgatccatgaaacgagagagcatgtagctaagctagattcttgaatcttttcgatatcgcacaacgtttcgtctgttagatctatatgtagaagttttcaacagaagctaaaatgctcccagccaattcattaaggcatcaaaagattatgaactaaccaataagttccggtcttaggacgataatctcctagggtcgcggaccacaacaggttaatttagtcccatcccggccgctaaagaatttttttgtatgcatatattccaacaaaggctttaagggatttacaacatagcttgtgtattgcaacaagctacaaagaaaaaatctctctaatgtcaattttggcttttttggttgcagataaatatgcatattcgaacagaggatttaagggatccagagcaaattctgtaagctgtgaaacatctttctaaactttcaaaatctacaatgagtgttaccataatattctcactaaaatcaaatgcttcattggttgtagacaacatttcaagatcttactagcggctgcatagaggcttcaaatcagttagttccttatggaaagggcaagagcatggagaaactcgacttgtcgaaagcattagcatttgcacttgaaaatgctggaaaagctacaagagtagatccttcagggagtgcctcaatcattagtttcttgcatgaagtaggaaggagatctttgggagaaacaagaagcagtcaagtttttgtgcaacaacaacaaccttcttcaagcagtcccatgattcatgttcatatcaaagagatttcaaagggagctcaaaagctgaatcagatcattaacgcatgtagcaacggcctaagctttcgtaaaggaaggtactctatacaatgcggggaacaactcatggaaggcgccattgagttggaacagtctcttcgtttgcttgtagacatacaacaagcatctgagtatacaagccacaaacggaggaaaaacagaatcaagctgcttgaagaaaatggtgatgatgatgaggaggaggatgctcataatcaaaactaccaaaagatcaaacaagtcgcaaaggcggatatcgagatgagactattggcacttaactatcaagaggataagaacaacaaacatagaaagcaaacaagttattgcgaagataccgagcagagatcaacgaaacctcagaagggaaggattccgagtgttgttgcaaagttgatgggactaggagagtttccacaagatgaaaaagagaccaacataaaacatgatggagagaatctcacaaggcgtagagtaatggaagctagtgaaaatcttgttgaactaaagacacaaaggaagtcaacatcattggatttagtaatccacaaggagactcaaaccgcgaatgagataaactacaaagccaagtctcagcaaaaggatagagagaaggatgattcaaagagtagaaaaagaagcaaggcttcatacaagaaagatggagaaactactacgaaaaatgttatcaaaaggaatccaactccaacagaaaataaacataaggttgtcgcgaggagtcaacaaaagcctttacataaacttagcaataagaaagagaagttgcagcgagaaagacatcgagaaaatggtgtaacgacaaatcattcacaaaaacctttgagttcagaggatttacaaatgaaggtacgactcataaacaaagctaaagctgtgaagaaaagcttttctcatgttgaggtagcacaaaagggaaaagaaggagaggttcttaaagccaagatctgcgaaaagaaaaaccaagacatctatatttcaaatgaagcattgtgcaaagtaatgaagcgaccagagattaagaaagaagatggaaaacatgatctgttactcaaaagttacaatgacagtaatgagaagaaagcagaagtagatacatgcatcaaaagttctcaagtttcaggtgttgagcataagaaagagatcaaagatgactcaattcttcttattgccgcagagagagtcccatgtcaagctccatcagaaaatgtaagcttactatttgttaacttcacatatataccatctgtatatgttagttctaatcggtgttggatgttcataagcagcatcatgggcgtatgttcacaaatgggatggatcaacaagctccaataccaaagtctgatggaaattcagatatattatccaagacagtatataaaggtaagaagcaaataatgaacttttggtttgtcttgttattaatctcattgcacatttttaaaaaatcactaataatcatttcgagcattatgtcaagattttgttttgataaaaatggaactaaaataagttacaattatttcagaaacaaaaggggagatagaagctggtttacccttgttggagaagcgacaagaacgccgaaaacgagaaacaacagagacattatccgaaaatgaaataaacctaaagaagatatttgtgaaaagccaattatttctagacacagcaaaggcacatttcaaactcaacattcctcaaaatgtctttcatgacaccaccagtgggagctattactatcaagaagacaagaatctaaccctcgagtgtgccttcgagctaatgaaacgaaaaaggagatttcaagagttaagtgtccatcctttcgtgaaggtacccataagttcctctaaaataaactcattggaccatcttattagacaaataagcaaagagttagagaagctgagagcctacggtagagactgccacattggatcacatgttgaagactacgtgttggaaagagatgttcactataaagacccatacttgaactcaatgtgggacatgggttggaatgattcgatgctcgcgttcatcgagaaagatgatgttatgagggatatagagagggaagtcttcagtggactcttggaagagataacaagagatcttatatgcatatagccgaaactcttctttctctccgatttaaaagtgagctcttgttttaggtgattagagtgtcttcaaacattaatccactccgttaatgttttgtctgataatggttttgcttttctttttattctactactcttttggattaactatcctgatatattgcatggttaataagaatggatgcgtatttgatgaaaaaacgtctactcattcatcataaacacaaaaagctaagtatctatttctcaaattctaacttcaaactatctaacttcttaattctattattatatacttttaaaactacctatttcactaaacttccacaacttattcttagcttttgtatgagttttatcctcagttttctatataggattttgaaaattcgttatttttattcgtgaagagaatgtacatactttgagatcaatctagctacaatagcacaaaaagataattgaacttgataatgtatatttgatggagaagttaacttgaagaggaccgatgaactttaatttcatcccaaaacaattaagtaacaaaagttatgttatagaaagaacattttggggttttaataacataaatttggggtttcacgaattaagaaccatgaatcggttaactcaaatacgataaacgactgctaccagtgaccagtcaacaatgttttggaagttacgttaatatacaaaatgattcaaacaatcgaaatttgaaatttgtggttcaaatgttaggccttttgtgcttttgttttttaataattttctcgtctttttgaggaaaaaaacaaacagtagtttaaacatgctttatcttttccttaggccacagcaaaagcgacttcttcttctttaatattattattctttttccatctttgtggtgtgtgttggaatgtctaattccttcctctcctcctccaccaccttcgatgcattgctccatttcttagtctagaaggaaaatctagttttcaaaaaagccctgaatttcttaaactagttaattacatgtttaatgctcttcattaagtgtgggaaaatccatttattataattctgtctcactttttcatgtaactaattaacgaaagatactttagggtttaattcccctttattgtctcttttaattgtcatgcaacacgtacttatacactgcaatgatgtagtattttgtatctttatctggtatatttgaaatttcaaatactcccttctaaacaaactattaaatgaatgtcagaaatatatatatatatatatatatatatatatatattttcaccaggtacgtttgaaatttgaaaatacacagctttaataaacaaactcttaaactgtatcagaaattgttgattataaaaaaaaaaaaaagaaaaaaaattcctagacatgaataatcaagagtttttttgttttcttcgttaacaatcaagagttctttgttatatatattgtttaaagtactcttgcgagcgctctttatggataatagatctagtagtcttcgtttactaattctctctcacaaatccaaacaaaaaggaactgtgtacttaaatcctgtaatgacaatttcatacatactaaacaagaactattaaatactaggataatacatacttgaagaaataacaactcttcatgtagtcgtgtctttttacaatttaaaatttgaaaaataaaagttacatttacctttacaacgtcggtcgttttccacacaatagattacccacttctactcgatagttttctctataatatagagacaaaagaagagagcatttaaattctaaagaacaaaaaaggaaaaacagagcagccatgagagcttctgtttattcattgatcctactcttcttctcgtgtttactacatctatcaagtaagttctacaacagtttcattgtttttctttactatataaaactttctctaactcggattctttcacatgtatcaaaacagagtctcaaccgttcctcggagtaaactacggcctaaccgccgacaatcttccacctccgtcagcgagtgcaaagctccttcaatccacaactttccaaaaagtccgtctttacggatccgacccggctgtaatcaaggccctagcaaacacggggatcgagatcgtcatcggggcgtctaacggcgatgtacccggtctagcatcggacccgagtttcgcccgaagctgggtcgaaaccaacgtggtaccttattatccagcgagcaagattgttctcattgccgtgggaaatgagatcacatcattcggcgacaacagtctcatgtcgcagcttttgccggcgatgaaaaatgtccaaactgccctcgaggcggcgtctcttggtggcgggaaaatcaaagtctcgacagtacacataatgtcggttctagccgggtcagaccctccttcgaccgcggtatttaaaccggagcatgctgatatattgaagggattgctagagtttaatagtgaaaccgggtcgcctttcgcggttaacccctacccgtttttcgcttaccaagatgaccggagacccgaaacgttggcctattgcttgtttcaggccaatcctggccgtgtcgaccccaacagcaacctcaagtatatgaacatgttcgatgctcaggttctacatttcttgacatattttaagttttagctattttactagaagtactatttatgtaccgaaattttagtgcacaacacataattatttcatcattccgttttttttttttggataaacggttttatttcatgaatttttctttttagtatattattaaagtacaacgagatgatattttagtagtttgtatgtttgataaatggaattaatttttctcaagtttggtttcggaaaagaaaaaaaaactttgttaaattaaagagattggcatattcgttacgtcaaatgaatggaaagtgaaaactgtactctagaaggaaaagtagtataaatcgttaaaggacacaaagtgagtgtaccttataaagttagtactggaaggtagaaatttgatatcgaaatttgcaataatggattcatactattaggaaaagagactacaatacaaattaaaaatgttatttgtaacatatataaaaagaagtaaacatatagatgatataattaatctgttttgtggtttaatttacggtggtaaaaatttgttttgtaaaggttgatgcggtgtattcagctttgaactcgatggggttcaaggacgtagagataatggtcgctgagactggatggccatacaagggagacccggaggaggctggtgcaacagttgagaacgctagagcttacaataaaaatctcattgctcatttaaaatctgggtccgggacgccacttatgcccgggagagtgatcgacacatacttgttcgcattgtacgacgagaatctcaagcccgggaaaggttctgaacgagccttcggtttgtttagacctgatctaaccatgacttatgatatcgggctcaccaagactaccaattataaccaagtaagttctcgtttcaaacattaaatagaaatattggatatgaacttaaacgtatagttttgatcagatgttctatttcataaaagtaaaaattgtaaactgaaaaccccgaaccgaattttggtaactagtcaatggatacttaaaattgaacatatatgattcatatgatgttaatttaacttgaggcaagtccatgaaatgcactacaatatagcctcttattgatgttaatttaactatcaattatctttgttacgtctcccagacttccatggctccattgtcaccaacaaggccacgtcttccaccagccgcggccccgacgagacaaacattaccttctcctccgcagatgattcttccttcaccagttactccctccgacaaaaactctgggcaaaccgatgttcacaattccactccgcgctctgcctctctggctcacatatgccgctctctctctatttcggcatcgatgttctttgtctccgttttgtatgcattgatcatattgttgtaaaatctcttcatcgatcttatattatgtctcttactaatttaaactaaactataattgaatggactaaaacgaatataaacaaatgaataaccactaactagaatggtttagaccaactccattggagggtccttaagagtttctagtactgaatccttacaaaaagaagccaaaattaaatcagaaaaatgaaattaatcaaggtacgcaccttagcttaggtattttgtgatgttttaggtgcgtatacgtggcggtttcccattgggtaaggtaagagacaaaacaattttttttctttcctctgtttgcgaaatcattgtctctcttctcttgttttctccggatgaattctctctcgatcagcttcatgcggcgtccacatcatcaaattggagaagataaccgaagaaaatcgtcccccttccgccgtgatcatcatctcaaccgacggtctcaacatctgtgacttcgaacataatcggcgattttgatgaaccaaatcggagagagaagattaataagatagttttgaggaagaaatcacaattagagcttaaagcaagaataaatcacaatcacaagatgagaatttttcggacaacgtagtgataatcagtcaatcggagaaagaaggtgacccgagtgttataaccatcaattgtcctgacaaaacgggtctaggttgtgatctttttcgtatcctcctcttcttcggcctcaacattgtctgaggaggtaacaattccatctcatcattacactttgtgtggttttcaaaaatttcttatttttgatatctgctgtggtttgtgacttgaatgtgttcgatgaaattcctctgaaaagatgtatcaactaatggaaaatggtgttacttggtcttctaggtgattgggaaaccaaacacgagatggaatctgttgaaggtgagacttgttgaggcaagtgcttctttttcttaggcctttggtatctcaagatgttacctttctcatcttttcaacattcaggtttgtgcaagtctttaatgtggttgtgagaatgccgtgtggtagggtcatcatcttagagggtctattgcagggcttcactctccttcgctactgttcctaatagatccttcaaaagagaaaccgtcatggaggatcctaaatgtcccagggaaaccacccaagttagcttggggacatagcacatgcgttgttggaggaactagagtattggtccttggtggtcacaatggtgaggaatggatactcaatgaattacatgaactctgcttggctagctggcaagactcggatctgtaaagactctttccttattcatttagtttgtggttatgtatctgtcacattccaaactcttatgacagaagcgtgtgtacatagtaaattagtgattgttgtacgctttagatattaatgtaatgatgttaatggttttgctgtatgagatccttctataatatacttactccttgttacatgaccatgcagcatttgattttgacgtaccaaaaggcttctctgaagcatgcgaacacataacatccaaaagagaagccactgagttatgacatatgtcaacaaacccaaaagtagaaataatcacacacacctcaaataaatagaatgaagaaaccgaacaagtaaagtacacaaactccaatacaaagctaaaacctatttaatttcatcaaaatactagttcatccaaaatggcaagttcttcatccaaaatgactggttttttttataaaaaaaattcacttaaggattctaccactggacagtaaaaaatgtaaagactctacaaaaactctaaactttaaaattttcaaaatttattattatacaaatgtaaggattcctttataaggacttaccaatggtcttgctcttatattctaattttaatacaaaagaatatcattcacttttttttgttaccttatattatgctatttttgtttgtttattattataaaatgttaaatttatttatcatcaaaaagagaatatgtacaatgaaagaggactgtcataaggcggactcagtaaactgtgcctagccatgaatgtattagcaagagctccacggctccgtcatcagctccagaatctgacacaagatcggagaaaaactcaaatgcagatgaagggtcaacgagtcagaacgacgtcgctgcagtaaacaaaggaaaagggatattgggccactcacctaacaagcccaatgtcaacttaactgagaagcccaacaaatcttcttcatcttctcaacggtcaaaaccacctatgcaagagaacaaagccagagtaacgacagagaagaggagcgtctgtcgtacgcctccaatcaacacggagaacagatttgattgtttgatgatctgctaagcataacaagattgagacatctgtcagtttacaataattgaaactctagcgttgtttaactataaaaggaaacttgtgatgtaacataaaacttaagtgaaataataagaaagtaaagttcactcaaaacattacctaaaatagccgtcttgctcttaatttcagaatggttgtgagttttcaaatagattagaatttaaattgtcaataaaaattgttaaaaatattccaaaaactagattccttgattttaaaaagaaccatattcacaaaatcttgaatgggtaaaaaataagtttttcaaaaacaaaaaccaaaaaccattacaaaaactagtaaacaatcaaagcctatatataataaaatattatccgccgtatatggcgagtgaaatcagtgttctaagatggtctgagaatcgtattgggcaagttataaaattctcaaaaaatattgactttgccttttgtttttgatttgtattccagtgtatagaaaatgaataaaccaatttccttaatccaactaaaacgccaccgttttaacattctctaccaacttattccgttctatcgcgcgtgttgcagagcagaaccttccgtcaacacgtgtcataccctcagctctcacacgcttcttccctatcggaaactttctctcttctagctttcttcttctcacaattccggaatcttcttcttcacctcatcttcgaagaccttcaggtttttgtttttgtttttgtttttgtttccttctcttgattaatcaaaactgtgataccaattcaagttttgttccgttaaatcgcgatgaacgacgactctcgcgtttcaaaatcaaattgttttgaatctgaatttttattattatttgactttttcgttgttgttgatgattgattactagtaatggcgtcatcaaccgctttgatttgtgataccgaagcgtggaaggatttgaaggtaaagtagtctttaaggattttctcttttcttagtttgtcaatggtggtttgtgtagagaagtgatttgggattgttttggtaatttggcagggacatgtagaagatattaagaagactcatttgcgtgatttgatgagtgatgctaatagatgccagtccatgatgatgtatgtcttcttttctactttggctcatatgtgctatgtacattatgtttgttgttgaactcggttgattttgtgtttgtttctagttattgtgcatttacgagtttctattgctctggtattgaacttgttaatgttattggtatgttttaattagggagtttgatgggttgctgttggattattctcgacagcgtgcaactgttgagacaatggacaagcttttgaacttggcaaaggtgagggtagatgtttattgacagattttaatagaattgcaacgaatttcactcgaattttgataatttgtttctatatgcaggcttctcaattgacagagaagatcagccgcatgttcaatggggagcatgtaagtatccgcatgttaatcttactttgatttgatcttatgaaactctttatctagtattacatattagagaatagagaatgcaaatgaattgtaagcgaattattctccatcttcttcggtactgagacagaaacattttctatcatctatggtgtctgatttgtttaaatggcttcctcagattaacagtacagagaacagatcagttcttcatgttgcgctccgtgctccaaaggatgcagttatcaaggctgatggaatgaatgtggttccagaagtgtggaacgttctagataagatcaaggaattttctgacaaaattcgctctggttcatgggtaaattctagatgccattataaaacctacctctttacgttttcatctccttgtgttgagtttttttgaactaattgacaggttggagccactggcaaaccgctgaaagatgtcattgcgattggtattggtggtagcttcttaggtccactgtttgtccacacggctctccaaacaggtgggctgcatctagtcttggtaccttgcctcttgctggtgttctttctagcttgttttgattcaaatttttgcttttatatgcattttcattcccagatcctgaagctctagagtctgctaaaggacgccagctgcgattgtaagcacagcattcctgtagttatgtagtctttttctgtgtttctgttcgcaatgctttggtagaatgaatgagcttcttgaagtttctcctgaaggtccatgaattctttctttaccattattgtcatagacactgcatactccttgtttgtctaaatttcatttaacctaggaagaggaggctgtattgaacttgttagcttctagttattccttttggatttcattcatgtggatgccttgcttggaattaatttttgtttctttttgtgcagtcttgcaaatattgatcctgttgatgttgctagaaatatcagtggactaaatccagaaactactctaggttcatgctcaaacctatcaacaaattcactttcatagtttccattgacggattttcactctgactaattctgaggatacttgtaatccagttgtggtggtctcgaaaacgtttacaacagctgaaacaatgcttaacgccagaacattgagggaatggataacagctgctcttgggttggtatttctggcatcttaatcttactttgttagaaaattacaattatcgccagaggaaagcttttatgcttgtacatttacaattattatttttttcaaaatataatttgtgttattctaccatattttggttatcgtggatgaacatcactcatttaacatgtgataacttaacagggcttcagctgttgcaaaacatatggttgctgtcagcactaatcttgcggtatgcatttgctagagtttcttttggggactttgtttccttattgtccatcttagtaaacttaaacttcgaaacacatgcactcgagtcgttctgattatgtagaacagatgacatgttgatccagtctttttagaaactgaattatcgaacagatttaatggactatggtagtctcgatgttctaggaattatgatttatttcgacctccttctacatatttcatattcagacagtacaggaaagtgtataaactatggatgttttgtttaacagttagtagagaagtttggtattgacccgaacaatgcatttgcattttgggactgggttggtggaaggtacagtggtaagttcttgtctctttggttggattcatttctcacccatatccacttaatctttatccgaattttttgttgcagtttgcagtgcggttggagtcttacctttgtctctgcagtatggcttctccatggttgagaagtacggtagcttctatttattacccttctcagagaatttcttaggaataggaagtaatgcatgtctgtcttgagatatttatctgcataagtttacagatgtactcgttctaactataaaatgtcaggaaagaaattgatgtaaattctgtttttttttttttttttctttatctgaatgatttcttcttttttcttgtacttcccttttatttattacccttccctatgtttctaaatccacaatagtgcagtcgatattcagtctttttttggatggtaggtttttgaagggagcttcaagcattgatcagcatttccagtccacaccgttcgagaagaatatacctgtgagtgctttattttgataatcactaagagtaacctgaagtcatcatttaacaaagaattactcttccaagaagttgcttatactcaggatagcaagcatttacattaactctccatagggatttctgtaagttagtttaattagtgtagtcacgccggagtgagaggttgatttggtgacttttgacgatttcaggtgcttttagggttgttgagtgtatggaatgtatcatttcttggatatcctgctagggtaagaatcgactcctttatcagaaagctgaagttttcatctcagtttaagatattcagcctccatcaacatcttttttgttttctcaggccatcttaccttattcgcaagcccttgagaaatttgctccacacattcaacaggtatgtgaactgggtttcccttttgtctccttaatctttgcttcttcatatctatttttgacataaaagtcttaaaattgtttacgggaatattaacggagcaattggttgatctcaggttagtatggagagtaatggaaagggagtctcaattgatggtctacctctcccgttcgagactggtgagattgattttggtgaacctggaacaaatggtcaacacagcttttaccaactcattcaccaggtacttgctacctataatttgagtttactggaaatttggatctagattttagcaagttctcatcacatgataagctaatgaggaaagcactaaatcttttgaaatgatgttttagggacgcgtaatcccttgtgatttcattggcattgtgaagagtcagcaacctgtgtaccttaagggtaggcttccattcctgctactgttaatttgacttgagctgttttatgcattctctttcgaaaataagataagttctgcattggattaacaggagaggtggtcagtaaccacgacgagctcatgtcaaacttttttgcacagcctgatgctcttgcatatggaaaagtaagacattacatttggtcatggcagtaaagagactgatgcatttactaaggttccatgctgaaacaaactctttgttcttttaccttctgtagactcctgaacagctgcagaaagagaatgtttcagaaaatctcattccccataaggtaaaaacttgtcttggatcgatgttgaaaaaacaaaacttctatgtttttcagtatataaatgtgttggagtaaacctgttggtatctttccacagacattctctggaaatcgaccttctcttagccttctacttccagaattgactgcttacaatgttggccaggtctgtctctatctcagggttatcactaccatcttaagattgagatgagaggatcactgcgacaaaagctgacatttttgcatatgttttatttttcagttgttggctatctatgaacacagagtagcagttcaaggctttgtgtggggtatcaattcgtttgaccagtggggcgttgagctaggaaaagttctggctactcaggtcaggaaacagcttcattcatcacgcactcaaggaaccgctcccgagggattcaattacagtaccaccacacttttgaaacgatatctcgaggtatggccgtgtaacgactctcacattctcaatctttggtcatggttctgattaaaacatctctgaaatacttttccagacaagttccgagccccagatgtgatgaccaagcccaagtttctctccttcgaccaaacgtgaaccatttgagcatttttcacccttgttcttctttttttcactgtccctgatcagagtatactttatcggcactcataaattatctaaaaatgggtactaataatccaaaccccataaaatcagaattgggagcataatatcagaggagctttttttctctaaattatatgcacataaaatgatttaagaatagtcggcagccttttcgtatccgaaaatcaacgtcgagtgactatgtacttcgatcgagtgttttgatgcttaacgtgtacgatcaaaaacttaacatccttaaaagaacgcacgacttaggatactttctcttattgctcatcagaatttcataaaccatagaaacagcatttttcaagcttgcatggcaatccggttattccgaaagatattgtatctgattaatgattatatacgtaactattcactttagattttgtagaatagcattcatgtacctctgtttacggttattgtatataacatacctcttaaaacaaatcaattgtcagtgccacagtcaaaagcagaccactagttaaaacaattttccaccaaagaaaccgttgatacacttttgcgcccaagtccttacccaacgttaaacattttttaccaaatagtggttcagaacaatatcgtgcactccaatgcatggaaagaaagtgaggtgatgacttggagagaaagtgaggtgatgacttttacaactctggtttgcccattaaacaacgatatttttcttttatatttcggagaatgttagttcacgacaatgaatgtcggcgcatgaccccatcttcatgtgcacgagttgtggtcagttaggtcaatgatgtgatgtgaccatgctttttgtgtcagaagtcatttactctggtgtgaagccgcctctaaaattggtaaaacgctactataaagtatcataatgctgcaacttgtgatccatgttaacaacccaaatgatagtgtgacgttttctataagaggatcgacctgccctacgtaagaactttaataattgcaaacttttggggtttgttctacctttccaaaactagcctaataaaacaagatatgtacttataccgttcatgcaacgacatcaacattcaaccgagtagtggcgcttccattgggcgtgtcaagggatcttgcccgtgtgcgaatcaaccgaaattctcgtttctaactagtagagttggacacggggcgagtacccattttgagtttgtgacaaaagttacagaaaattctagaagtagatcaaagtacactacataactaagcaaacaaggctaagtcgagagtggaaacaccgatttcgagttcacgaatcccggaagttcacgtggttgccacatgaccgaataactggggtcctcatcgttgttaccacgagcaatttatacgaggtccgtccttaaaagttaaaacctcgtaatagaagcctacatcttctctgagagttagaaacgtagaatttgttgtaagacatgttgcagatattgttcattatagacttcgaaaggttgttgacgttgtgaagaacatgaagcaagaattttgaaagaacaaattaaaacaaagcaaggattaggggagagttgccttcttgaatctataaacgttttcagtaactttgcatgtcctattgttgaagttaatattgtaacactttatttgttcaatatccttttaatgcaatacttcttttgcaggctaatgattagtggttagtgtaaaaaccgacatatacgtggtcaaatcttccgtgtcattttctttgtcaaaaatgtaattatttcattgaaaatgaaaagatttaagttttacaaaaatgtataactttggatttattggttccattgaacaaaaaaagaaaacaacatagaagcaaagacaatctcttgtgtcattatactagtctccaccacaaaatggttttgttctagcattggttatgtcagtgacaagtaaacgaagagggccgatctcaaaacccatctcttcttttgcttttcaaaatgaaactcttctcactttctcggtttttggtcatccccaatttgtggaaacaaacaataaaaccccagcctggacttgttgttatcgatctattattctaacaaagttgtcacatttttctttaaaataaatctctttttcattattataaatgaattatggggacacatagtataggaacaataactccttttttctatacacgaaataaataattacctctactgtaattcttaaaatccacgtcacacactaacacttttgttttttctttttatctttccgacaagaaagaacaacagattaaggacaaaagaaaaaaccaaatcaagaatccttaaccttatcatcacgatcaacggcgcttgagttcttgcaatgagcaatagctgcttgaatcgcagcttgtaactcttccatggtactatcacttgacgatgatgacgtggaccccgagcttgacgatagtccggccgtagacacacgaagatggccactattagtcggagatgttctcatcgacgccggagccgagaacaattcacctctccttcctcttatgagatctctcttgttgtaagatccattaatcattgttttgctgtttccgtttggacccataagagaggaagagaaagagtaagaagaagtctgtcttctgttccaaaactgcgtgccgtttcctcttttctgaaacaacatccttatgtacttcttgacggcgtgacttaggtctaagctcataggtttcttgatcttctgttgttgttgttcttgttctcgctcgttgctttcaaaaccctttctccattttgataaaccaaagagagaaaatgacttaatgggtttggtttttacccgaatctcgccctctgctttgtcttcggtgttgtcgtcctttgcctcggtacttatgttggtgatagcgttttcagtgttgttgttgttgtttgtgggctggtcgggtaatatatctttgacggggagggtaaatccgtcattatacgagcctgtggaagttcggggagagacagggaggtgagagaggagatggagaggaagaaggtggccgtggaagaagatttcatcggcgggggataagtcgacggcgaaaggatcggtttgttgataagacgatgtcgttttggatgggcttctaagagtaggactgatgtgttttgaggaagaagagagaggctggagagagatagtgaaagagaagtcatgagaaggagaagaacaagtggatgatattggtgaaggtgaagcttcttgtttagggttttgcttttcagaaaaagtttgagaactgttcttcacctgttgtagattagtttccatgatgattgatgaggaagaaaaaaagtagaaaaaccaaaaaagggaaaagggatttttgtgttgatcaaaggatatgatggtataataatattattattaggttcggtcttgaaactttcatgaagtggggttctatgttttttttatgcctttatttatttatgattattagtatttttccggtttttgtgtaaaggtagaagaatatgacaaaatcttacttgtggagaagataaggaagccgtggagagagacggacggacaaccaacggaggagagaggaaaatatagaatggtcaatacaaatgtagtagacgaattgtgtcgtggaaaaaagaatgtaatgccaaaaacacatgttagtgtggatgtgaaagcgcattggttcgatttgggatggccggatgggcatattgcctctaatgtttggttggattcgatatccgttttgatttgtcttgagtttgtagttacctagaggtttttatatggatgcattgcgggtatgaataggagaacgatcgatatagtttttgagtagggtattcgttcgaaatatatcatgtcaagtcctatatcaacttaacatttttccatttgctactaaaacataatctacttctgcttcatgttgatactattttatttgtttgaacaacttaagaacttacgcctcctcaactttcccaacctgaactcatctagtttatatatgaaagtataacttagtctgttaaaaagatatgataaaataatgtttttaatatattagaagaatattatacggatataagatttaattatggatcaagcttcacaatccagatttcttgtatatccaaatttacacaagggattaaaatagatttcgaattccggttaataatccccctagctgagatgtgtgaattagtgtgttcctcattctcagatgaaccaaaattcacgtggatgaaatgtagctgcgagagaaagattcatattggtacaaaggacaaatagaaagttaccaaatattttgtggaaccattcattcgataagattcgtcatggggaattgagtgagaagaacattatgtcgttttgtcattcattcgtacatgaaacgacttatgtccaaaagccaatctctgtcaacatggatagatacttctttctcttcctctcaaatgacatcaactgtaatttaaagcgggattttgttatgtcccactatacatatttttatttcttttggtgaagtcatagatctgctatggctatgcatataaaggtgatgttatatgtaccatgctgccgatctagaaatctgtttaaccgttggcaaaaacaagtttatatttaaagacttgatacctattgtatacaaaaactagtttaaatttcccattgaactagtttgtttgtaccttattcaggtacggtcaagaattagtgaatcatggatatacatattatatagaccatgcatggaatatctcatccatgtcttaattggttctaatatctcatacattaatagtagatcggagaagagagagtttataaacggaaagataacaaacttttcttaaacctcaaaatgttgttacaaagctcaaatgaattaaaccacatacttaagcttatatacttaacactaaatgtaaactaagatatggttcactcataacggaagataaccggtccatgttatatactcaatatacatattagtgaatcatggacaaaacaaggtagattcatgttcactaagagcttattgaaagcgatatatacaggtgaaaatccagtagctcattggaactttattaaatgaaaataaagtaaaggaagatgaaagtctttagtttgtcaccaagaggaaatgattctatattttattttcctaagatgaagaactcttaaagttacaatcaaagttctcattacatgactatataagaacctagttacatgaaacatttcatgggcttttttagacttatcatgagattcgattttgggtttcatatggatccactaataggatatatatatatatatatatatatatatatatatatatatatatatataaatcctcaattttaactatcgggtaatctttacgcaaatatttctatttactcaatagttataacctctacgatgagattaggtggcttaagacatgtttcacgaagtgtcacctaaactaacacttagctaatccacaaaggacaaatacattaagatctatctcattcaaattctcatttttgacttgcctctgctctctataacttttaatccctccaaactcaaaccaaatcaagtctagaatcgtgggggccaatctcataggctaggtactgtttacaatcttctagagagatatttcggatttcgacagagaataattgattaaaaaaaatatttgttttaatgttaagcttaatggtgaatgtgtggtactttagtttgtgcattaatggtatttgtaacgtctgtatcccggaaaattagaagatttgagtttatgtcggaaattggaggggaatctgtttaattccagttggtttagtaagcttattattaaaccaaagaggaaattgtttaattttggtaatcctaattcctgtttaatttaagttgactgaaaagaaacttaagcctatttataccctataaatcaaagaagccctagtgatttctcataatggccaccttcaaggagagaaagagagaggctgatttttggttaaaagaaggaaaatagcttcctcaaaaagggatttctagacagattagacacgccattctagagcagatgtttggtctatataatcgccttgtttggtaagaaaatttattgacttgtagcttagactcatacctatatattgatatgagtcaatattctaagagttatctgtggtttagtgagctattctgttttactcgtgatgtggaccagcgtgtatttaaaggaagaacgcgagtgaacttacggttggatcgtcatgaaactttggggacaacttcaggaaatctaggaaaacaatttcaacggtgcgatttgaaagtggacttttaaatctcgttgcgtgatctcatctttcaggctgaggattctgttagttttctagaatattctagtttatgttaaatgttgtttttgtggttggctatatggtgagttgatctactgttggtgagtgggaagttactgctgattgtggaattgttgtttttggtacaaaaaacatcctcatttcaaggtgtgtgcgcgatcatgtgtgacttatttgttgttaagattgtgtgacttgtttgttgttatatataggctggattttttatggatccataatggatccctgcgattgttttgtcaatagatgttttggtttgtttaatgatttatgtgtttattgtgatcttggttttgcttgtgtgtatagatcgtagatgagagaatcgtctcaataagtatttatgcatctctttttttatggtgcatgtaaagataaagtgtgaatcacaaacaaataaagagatgcataaatttgatcaaaaatacttaggcgatcatcccatctacgtgttatacacacaaacaaaccaatattacaatcaacacaaaaatcatgaaacaaaccaaactaatgaacaattatctattgacacaaccatctcagggattcaattttggatgcatcaaaaatccatcctacacatcaaaacaaacaagtcaaacaatcttaacagtttagataatcttatggtcacacacaccttgaaccaaatatgatttttgaacaaaaacagcaatcccacaactagcagtgactttccacttgcctaggtggactggtttgttttataattatccaatttaagatgtacttttctcaattcttatacaaaaatattttgtttgaccacaaacatgcgtattgcttgggtttattttcctaaagaacttgataaattgaacatcatgatgttgaatcctgaaatgaaatagcaaacaaatttaaaacttctcaccaatgtcttaagacaaaataatcgtacgattgataatgaaacgttttaaaagaactaaacttgtggactgaaagtagaattggttgtttttcagttaatcttagtgtcatcatgaccgtgagacatatttgttattaataaacaataattgtggtagcagaaaatttgaccaaaattttggttgcaacttgcaaccatcgttactagtctaatgcttactggcaaaaaaattcatagtaaagaaatgtaaactagtttttttcaggtgattgtcaaaaaaaaataaaaaaaaaaaggtttttcaggcagaaaattaaagcatgtgaataagtttattgtcggaattatgaactataaacctatctacttcattcttgaaaatttaattgtattttaattaacttttgtcatacattaatattttgtaacgtataaatatttaaaaaaatggtttctttttccaaaaatttaaacaaattgatatcatttttttgtgtgaatgaaataaaaagcaaacaacaataaaacttctcaccaatttcctactttggacaaaataatcgtacgagtgataaagaaacgttttaaaagaactagaaaaactagtggacactcgagctctagatttagttggtcaaaatcattaagtaattggaatagtggaaggggttaaaagaagcaactagagagtggagccactcgttgctctcttaagaggaaagaaaaaagccagtggttacgcaatgaagaacgtatgcttttgcttctaagcctttggttttttatgtgtggttctcttttcttatctctatgaaccaacaccaaacattttccaacattccttcattatatatcagaacaaaacattattcgttcatgagagaaacaatgtctgaaatagaaaagcaaaagccggaagaagaagaatcatccacgacatggccggatatcgaagaagaactcgtgcttcccgatgtgttacgtagtgaaggcgtgaagaaactgcatatgagtattcaaagtgagtgggattaccttcagaagtctgcttgtcaaacagctgcaggaagagctttgtggaaacatgttattcatgatccgcttgctcatttgtttgctggagagacacatttgagaaacctacacacaaagattcagactgaccgtctcaacaatgctcgagaggtttctggtgtgatcctagccgttcgaactctctggtttgacacaaggattcaagctgctctggagtctttccacggcgatgcagcacaggttgttctacttggtgcaggtttgttttcccctgtttagacattttaacttatgtgtgtatatatatatgtggagcatgagtttaagataagtagccaacatagaatgatgtaattgaatttcaggaatggatgcaagatcatacagactaaactgcttgaacaaaagtgacgtattcgaagtggattttcaagatgttttggaaaccaaagcgagcctagttcaagctgcagtaaactctagagatgagcttaggatgacagcgaaatcactagtcagagtagcaattgatatcagagacaacgattggtttgaacagcttaaaaaatcaggttttttgccagagattaacacggtatgggttctcgaaggtattctctattacctgtctcacacagaggcaatgcaagtactaaacctcatagctgagaagtgtggactaaccagcacagttctcttggcggatttcatgaacaaaccatcagctacacttccaaactctgtgttccacttttacagtgactggcctgatcagctcttaccaactttgggattctctcatgtcaagctttcacaaataggtgatccagatgcgaatttcggtctgctccacgatccacggaatctcttcaacaaacttctccgcctgccaaggactgcacaaatccatccagatgatggaaaaccatgctgccgtttgtatttggtcgaagcttccggttcaccgcctcaagataaccaagcgagcttgtaagctccttccggacgtgcatttggcactgcacgcttttgcagaacagatatatatgtgagtctttcacactagagaaattgtgtaggaggttaatgtaatttgatgtataaacgattgatatgaacaattcattatattctaaactctaaagttctatatttctatctgcttgaaaattacaacgaagaaagaacgcttgtcatgcctttcgataactagcatgatcgtccttccttactgtaactcaaacgatgaatgaagctcagcatcaagcataagagtatattcatatagaacgagatatcgtctctcacttagacagttgtaaaaaaagttggtacacctattcagccataatgatttcacaagaagaaaaggaagagagaactagacttcatctcaaatctcaagacagtctttgacacccttctcaaatttgtcaagataagagatagtctctgtaaccccatctgcaactttttttctgcaaaacaagttaaaacattgtactgctttagtgacatgagagataccaaatcatcatacaaatatagtttcgagtaacagagaacacatagaagaaacggatccctttaatcatttcaatcactaacctatcagaaggaagattcatatcaaccccattcgtcaacacgataagggaaccgaaagacctgcgatataaagtaagtgcaaaatcaacaaacaagaaccataaatcacagcatttgcatcacatttctataattcaacaaccaatttcattacacatttcaatagagagtcacactagcacatacctaacaagatcatcaagtatattctctgcttctaatttaactggatccttatcatcaagtaatgaagcagcattcttcacaacaagcttaaatgtacaaacctaatcaacaacatcatcatcatcatcataaaaatcaaaactttaatgtcattcataactaaaacccaaaactttaagatcaatttaagattctagaaacctcaactccggatttagattgaaaatcaacaagagagcttctttctttaggaacacaatctcttgcagaagacttaaacagattctgcagattctccaaatctttctctgtataatcagattcactagttaacgaaagataagcagattgaagagcttgacgagttgcatcaatgggagcaagtaagaatcttgaagacttcttcttctgatctttaagccactctttaggtcctgctgtgtgagaaaattagtttttttttcaaaattcacaaatttggagataagatcaataaaatgaagagtgagtgagaagtgtgttgtgtacagattcctaaggagaaggcgaaagcgggattggtgggggagagagtgaggagaagagaagtggcggaggagagaagaacggtggcgtctcggcgagagataatctgtggcaggtggtcggagatttgtgcggcggcgattggtggtggtggtggaggtttagtgtttgaagagaagaaaggttgagaaattgggataagacgagccatggcttaacattaacgagctaagttatgtgtacccgctcatgtggtatttaccaatggtttcctttttgaacagatttttgtcttgtttttaaacacaaaacgacgtcggtttgtgaacataataaaaatgtaaatgttgacttatctttgctaaattggtccgtcagctaaggatgtaccttatttagcaaaattaacgaaaattaacgatttaattgaaaatcaactaaagtttaaaattaaagtcatcctactcaaaattggtgctttgtttcaccacttttgataaactggtgatggtttttatgacattttttccagtaataaaaggggtagttatgcaatttagtagaagttaaagggtttctaaacaaacttaaaaaccaaatttttctttattgctttgctcgagagtgcctgcaactgcaacagttgagattttgagcgtgtcaaggattctgattgataacgatattcaagttcagcaatctcattgcagtagaaaatggaatcgaatcatcctcacttcaaggtccgcttcttttcaataggtttctagttcgattcatgaactgtttctgcagtcaatttcgaacttgtgaaatctccataacttgtgctttgaatgtatttgctaaagctataatcttgttgcgtttcaaaaaccatcctttggaaaaattggagtcttttggttgcttattgaaatttgtttgcagctaattttgggatcttcttcgattgctcgacgtaagatactaacagatatgggataccaattcactctcatggtaatttcttgttcctttgaaattattattcaaagactgcatttttgtatttgggcttctagttcaagtagaagtttactggtaattgttaatgtagagtgctgatattgatgagaaaagcatccgcaaggagaaacctgaagagttggttttggctttagctgaggcaaaggtaacttcattagtcatctgcaataaaatggttgcttttatggttcatgtttctttttgttaatcttgtcatcacaggctgatgctattgtgtcaaaactacaaattagtgaatgtgaagatgaggaacaaccgagagtcttgattgcatcggatacagtatgtagtttttggtttagctaattactagtaaagtctccatctactatcaccaagttccattttatgttcttgggaatgcatcatcatcttctttggaaatatacactcttacgtcgtaatagctctgatttgtcctgcaccagaagttgctttatgggttttatctctttagggtcctctatatcttactctgaagctagtatttgtcattctttaggtcttgatctactcttgtttattctgtgaaatttaagtctttatgctctgcctacatgatttgatatcgcatgttttgtagctccgcctacaattatcatttctgcttccaccagtgtttttattaactggagggacctgtttcatgcatatatcttttattaagccaaaggtgttttatatagcatttgctcttcatcagtctcattgataaaccggcataattttttcccaggctgaagcaatcatgcagcggatccctgatggtgaaaacatagaggaggataagtcgaccttacttattacttgtgaccaagtactgagctatatttaaactttctgtgtttgctcaaagctttactatgatattatcaactagctagctgtaatggacacccatgttaggttaggttagtgattaaatggagtctaaagagctaagattgtttaaacattcaggttgtttgtaatttataggagttgactaatgaaagatggggcattctaaggacagaaatggaatttggtgataatagatagtctatgagagacttgggtttaatgttttgaattgtatgaaggtggttgtctatgaagatgctgttagagagaaaccctcgagtgtcgaagaagcaagggagtacataagaggtaagctcacatgatttgttttgcttactataactcaaggcttaaggttaaagaactaaattcaaaacacaggctattccaaggggcatacagcaacagtgagttctgtggctgtgacaaatctcaaaacaggagtcagaaaaggaggcgtcgatagagtggaggtaacactataatcttgcgtttcattaaagttaggattgttacaatttgggaaatatatagcatcagctgatgatgtaaattcctaacagatctatttcaatgaaataccggaagagactatcgagaaactggtgagtggtgttttgtacaagtttaagacatatatttcaccatatcaatattgaagttaaggctgtgttgatgagcagattgaggaaggcatggtgcttaaggtggctggtgcactcctaatcgagcatccgctaatcttgccatgcgttaaggaagtggttggattccttaccttgtccattttaaaatatgaaccattatatgaatttacaaggatttaagtctatatagtctatcccttcttcttcatagatacacatgttgatcatacggtttcgttcctcttgttcttttaataccgttttggagcatgggatgttaaactaggttgtattgttgtatcaggttgggacaacagatagtgtgatgggtctgcccaaagaattgactgagaaactgataaaggaagtattggcaagcacataggtacattcgtcgcctctgaatgttggtgtattcatgttgtgaggattatagataagtttcggagtttaatttgggaaatgagcttaatgttacagtcaaactagtttattcagttgttttactacctcttgtttctgacttaacctttagactggaattggtaattgatagcgtgatattagagaggcttaccatcaaaaccacccaaaccgaagtaaaccaaaccggctgaacctaagtttaagtaaataaggtttgtgttggacttacggtctcttggtttggtttggtagcccctaaccaattggttacgtaatttatttccggttaaacacaagttttgttggaaaacggaaactgtgactggtcactagtcactatcaagcagcctaaaaagtatcgactcttctttatcaaaaaagtttacacaaacactttctctccactgaactcattttctctcttcttcttcatcatcatcatcaatggatgagataaaaccaaagaaagaagagaattccaaacgacgtcgtaacgtcaaacccatttgccgtgaaactggagaccacgtccattatcttccaacatgcaaaaccaagcccaaacccacgcgtactcatcacgcgccaccaccgatcctcgactcaatcttcaaagtcactcacaagccacactactacgaatgcaggaagaatcacgccgctgatatcggaaccaccgcttacgacggctgcggcgagtttgttagctccaccggtgaagaagattctttaaactgcgccgcatgtggctgtcaccgtaacttccaccgtgaagagttaatcccggagaacggcggcgttactgagacggttcttgaagttctcaagatttcatcgtgtcagtttcgtcggatcttttgctcaccttacggcggtggaaaaagcgaaggaaagaagaagaagaaggagaaggagagttatggaggggatccgataattaaagatcgattcggcggtgcggaggaggaggaggggatagtgaagaggttgaaaacgaagttcacggcggagcaaacggagaaaatgagggattatgcggagaagcttcggtggaaggtgagacctgagaggcaggaggaggttgaagagttttgtgtagagattggagtgaatcggaagaattttaggatttggatgaataatcacaaggataaaattataattgatgaatgattatttaccaaacttaattgtgttacttttcttttcattctactttgttttaatttgtgtttgatttagtgtaatgtataaataacaagctcattattggctaaaaccaattgtggagaaggatttgccacaaccttcgtaatcaatagttttaatgcaagaagtaagtaatatttcgtttggatttctgatctgctgtgctcattacttgtaagttggcccaacccaaaatgtgaatggtcaagaacatgaacatgacaaggttcttaaaacacaatattacaagaaagaacaccaactatgaaagcagaccccaactacacgtttcttataccaaaaaactgacttggccttcatttcctacataaatcttacttgttctttaagtcctgcactgagtgatagagccttgagagggtttacctagagaagcctacaatatggaatttggactccaagcttgtgcaaatttgaacgcttgctttaaacataaatatgttttgtctaaatgatttatctcgattttttgcactattatgcgaaaaagaccgttagttgcgttcctttttttttttttttctagatttaggtttataatagtagattgtttaatttcttaactcacttactattttaacttgcatgtgtttattcaaccatcttgtttttgttcgcaacacgtagtttagtttcagttatcttaagtactgtcattcatatttagtcttgagaatatcaacaaaaactaaacgattcttagcttagttcatatctcatatctttggtgtgtgacattcttaatatttaatcatcgaccttgttattacgaccaccttccttcactttactctttcgattaagtaataaaaattcggacacaacatctatagtggacttcatccagattagtcttgaagatttacacggccgcactagtaccagagcaaaattgatgaacatatcgctacaaccggaatagtaggcaacccttttaagctttaccgcttcatctaatcatcttccacctatgtagatgtcctcacattgagatgacaaagttgtatggagatatatactcttatacgaggacatcctctacaaagttgtatgaagaatacaccaaacaatcgaaagtttgttaagagtttatctaccgattctgtctttttctttcttcaccaactcttgattgtatgtgaatgttaaatgaattatagactaattattttttattctatttttctaactacaaaaatagaaatcataacgcaaaaagaaaaagtttcttaccattggcctttgccaaaaggatgcgaattttacatatgtacaagaagtcatcaagaactgctattccataattatgattaattaggtttcatagaataagtaaaaaatatatatctgagtcattatgaacacttacttgatcaaagaggacaatttagataatcgccgaaataaaaaaagaaagaaagaaagaaataattcctttaagatcatcgcaatctcatgggatgtgcccgtttagcgactaatccttcttgttgttttatccgcaaggaagatagtgaaggcataacatggttatcttcaggcgttggcgccattgacggctccatcatcaacttctcttcttctacgtgactaacaaactcttgtgccaaatgcatttcttctgaatatcccatcattcttcttggaccagagtccttgattttttgttctgaaaaccatataaaaaatattgaatatttgcaacacaatggtcactatagaacaaattaaactaaaacgttctttttttattaaccaaaacattttccgctgagcccgtagcctcctaaagaccgagaatatacccttattgggcgtatttcatcccttccaagcaggattgaattggcaatgaaaggttcaacttcctttgcaggaccgagtcaacgatgatattatcgactaatagatgaagtttgatgtaacaagattggtaagaggaataccttgatcattagagagtggtggaagatttttgagagattgagaccagctaacaagcattggggtgataatggtgagaagagcccagaagaagaagatcattacgtaggcccttcctttcatttctcaacaacaatttaattttcttctgaccaaaccatcgatctttgtttcatccttaataataaaccacaaaatacaaaaatggtttaagaagaagacaacttcttccaacaaataaacgttgagctggccatgtttgcataacattctcaacactttcttcgttgtttatcttattttattgtagggttttaataatcacgcatgaagtcaagcatttcaacaaattgttagattaattaacttatgtattgtggttaggatggtggttgttttggtatcactttcggtccggtctaatcccctccaattttttttgttttggcattggtgcgactatgattagacaaatggtagaccatattcgtttttgcgttcagaatgcaatatatattaatataatgtagtttgtgctatgtctagatgtaaccaaaataaaataaaataaaaataaatgagttttgactgtatttttttattaaattgcatgccaaattgtttatatttaatactcataattttatgtcaacatcgaaaatatttagtttggcgataatatcagttttatttttttggtaaaaaaaagtgttatttgcttcagactgcattatttatatttgtgaattatgtgaatttttacgttggaaaatatggaatagcattttagtacagaacttatataaaaattgccgataaaatcgtgaaattgcgtttttgctacaatttaaagttcctatgttcttgatagaaacggttgacaatgattatcgttcaaaccctgttgtaatgtaggataatcttacaacgagacacctgaacccgtaaaagatcttgtgttttccaattgccttaaacgatttgacgtagtttcgtatgtttaattcacaatgtcttttgacaccgaaaacatgactgttcgttgttaattcaattttatatgatccactagctcttagatgcaatgataaactcttgatcatttttttttcctttgatggttaatttggtgtatatacgagaacggatgctggataaagcaaatgattaagagagacggcaaagtcaatgggtctggtttacatggttcccattatccaaagtctttcgtagtcgtcaccatgtagggggccacttatgttttctattagactaaatgacgtcgagctaatgattttatcataatttacgatttaacattaaattctggagttctttgggttaacaaattttagattaaccttcgaaggaaacttgaggctggtcaatttttttgttaaaaccctctgcagggcaggcctaacaaggctggcttggcctgcttgacagccctagttagatgacactacacacttttttagcaaggaattgcagaaccaaagagataggaagtcgtgaacagatttcagatttaaaccaaaagaccagaatacgagaaagtcttgatggcagctattgagtttaaatgacgaaatggtttcaacttctcaagcatataatctaaacccgcagccattttgcaaagtaaaaatccaactaacatcgaaataaaatagttccagcgttacacacacaagccttacatttccattggagccacgtcttggtcacctgcaacaccaccacctcgttctgctggtgcagcctcggcagcttcggcctcaccctcaccagcctcgccttctccttcctcttcctctggcactttctcaaatgtgtcgatcactttctgtattgcttcctggtccaggaagtggaacggttcatcgactcctagaatagcgactgtgcagagagaactcttcagtgtttccccttgcaatgtctccctaacagccaaaatagcatctttgatcagatcttctctagaagaatccccaaagctctcaaacctgcgttccagataggtctttgctgcttgggaacgggatccaatagcaaaagcttggtactcgaagtagtttccgctgggacagttgtagtaaaggtgggctccagactcatccaatccacctaccagcaaaccaacaccatagggtcgtttccatgatcgttgggtacagacctgttcataaaggcaaacatacacataaatatttccttttccagatcaagaaatataacaaaaaaaacccttggtaaagacaagaaatatgacaataatgtaacttaagttggacctgtcaagtaaaatctctcctacaaaagagtaaaccaactaataaagtttgacaatgaggaaatacaagacccttccttttataaacacatataatatatgggagctcttcccaatggctttgaaaagtatttatgcagatgtggataaaacagctaacttaagaaaccattagataggtggaaaaacaaagtgagaagtagcacataattacagaaaagatgtcgaacaagcacctagcaggagtaattgactggtaagataagtgcatagtggtgagaacgatgcaaaacaaagagcggaattcacttcttagaggtactgaaaatcaataactccaaataaaaactgcagaaacaagcaaaagcaccagaagaaacacaaatctctttcttttagaatcctattgttaagctcttagttatggttaaacttttaaatacaagattatgcagcagtaacaacaaacatgcaaacaatttcactaaacaagattcaagtttctgctatgataaattaagaaaactcttatttaatgcaatttagaatcctaatcagctcagatcaaaccctaagcacaaagtcaagaagctaatggctaaatttgagctcagtgattcacagtgtaatcgaattccaaattcctcaaatttcaattaacaattacaacacacttatcaccgaatcacacaaaaccaagcgtaatcgattccaaattccaccaaatctcaatcaacaaactacaaaagcctaacctgagctttatcagcaagatgaacaacgagacgaccaacaggaagaggagactcataagtaaaagagtgattaatcgattccgatctcatataccgagacaatacacgaccgtcggctgtgagaccagcgattgcaacaccgatatggtcatcgactttaaagatcttcctctgatgcgaagaaagctccgattgagctttgttaacacaagcgagaacgacatgagaacgagatctgagtccaattgctgcagatccttgcttcactgcttccatggcgtattccacttggaataaacgacctgttggactccatgtcgtaacatctgtgtcgtattggtttctgaacatctttgcttcttcgtctcgctttcttcttcactcgtcgtcgaaagggtttatagagacgaaagttcagaaacaaaacttttcttttccttcaagccatggatgctctcgatctctctctcgatttaatgggcttctattaaattctgggctttgtattggctcggtatctagcttattgggctaagactttaggcatatgttttatacagactttaggcctatgtttttatacaggataatccttgtatattcttttttttttttttgatgaaatgtgaaattgtttaagaatctttaaatatgtacaaaagagtttggtcaatagttctcagtaaaaaaaaaaacattagacaaaacagagcacactagcttgaatattcttgtatattatttgaaactaaataaaaatgaattaattttataaatataaaactttgcgattttgttattagtaatcatataatttgaattgttacaaaaaaaaagtctctgtgattgatcctatttaaaattttagaacatttatcatttttaaaattgatatcttaaaattaatttattgtatatttctaaacttttatgacagctgaaaagtcatacatttttagttttgacgaatatagtgatgaagtagatcataacatgtgcttgtacaacactaatagaattttgatttttaaatatttatttaaatttgaattattatttgttttataatatagttttaatcattttatacataatatagaagtggattggtaacgattgttattttcgactattattatcaactgtatgataattaatcgttgagtctttaagaatatcgcgaaagttcatattgtctcatacaagaagattaacaaaagcatattcagtttagctcaagttccttaaactggaatcacagatgactaggggattgaattttgtagcatcgataaaaacttaactactcagatttttgttgtagccacaaaatcaatcacccaatgagatcaagttcctttacctccacaaacaaagctctacaactaagcttttgtattgttataacgtagtttctagtctatgtatgttagatcaagtaaataaattcagcacttttgtggttttatctccctaagatcagttactagttcatgacgctaactagctacatgcaataagaacaaacctagaacgaaaaacttctaaaaacaagctattttaaaatcgtcacttaccttattcaattatgaaatctcctttgatgaaacttttaaacccaactaacaaactagtaataataataaaaaattaatttaactattaaatctaatttgccactaaaagaaaattatgtatcggtttgagtttattagaaaaaatgagagtttagattttatgattaaacgaggttaaatatcggtttgggtttacaaaatacgattagggtttagattttatgattatacgatgttaaatattagtttgggcttataaacatatttagattttacaattaaactaggttaaatgtcggtttgggtttagaaaatacgattatggtttgttttttaacgattaaataagtctaaatggcggtttgggtttataaaggagaattagggcttagatttggtaattaaacgagattatatatcggtttggatttacaaaaaagtggggttttaatgatttattttaattattttattttgataatattaattgttttaagtttttttaatcaaataacatggcaaatattgatttgttattaaagagggggtgaataaattaggttcaccccctagaagtgaacccaagaattattctttatttgatatttgatgatttgttttcaaaattttaatttatttattatatagattagttaaagttagcatatactatgatttataacgtttttatatgttttcacttataattactttctagatttgttttcaattttgtaagttttcctgattcaagcatctaatgacaaaaaaagcatctaattaattactaactgatctttttgctctctttttttggtaaacacaaattcaagcattaattagttaattactaactgatttatttctattttttttttataattaatgatatttttgtaaatataaatgtatgcattcaattaatctatatatattgttctttgttcacaatacaattacatccattacttttattataattgtatcatcaaagatgactaaaaacacatctcttacaatttttatggttgttttggttattggtatgctctacacttcaatatttattaaatattccgtgtttcttcacatatttttatttgatggttttcttttcatcaccttaatatttttataacaaaaaataattgaaatgattagtatatattttaaatatgtattattaggaatggtgatggaggagacgcaaggatcgtacatgtcatgtttatattaaagcagaaaactgtgaaattgatcagtgtaactgggagtgtggtaccaagtataaaagagtaggagttcaaggattgtgtgtaccacctggattcgatccaatagatcaggcctgcctctgcagtttcaattgttaaaattgatatttatttgttttctacgaataatctccatatataatttaataaaataatgggttgcaaaaaaaaaaaatatattgcaatcttttctatttcttatgtgaatatgaattttgatttcaattatttgacatcatgaaatgaccaaatttattttatagtagtactttagtcaatcgatttatctattctaataaccaaaacttagatcgaaataatcaaacctcgacttggtttcaattcaggttcggttttttattccagcatatttgttaaaactcattgtcacaagaaattcacccactaaagtcaattaaaaatccaccaattcaattaatctaacatattgatcttacctaataaaacaatggtatcaaacgtataatcaacgatgaaggagaaagaagtaaagttgacctgaatgattgtgtaaacaaataacaaggaatttttgttttaaatgattttcttgcaaataccttttcaataacgatcaaatcatcataggttgttgtaacaaatataacttgcaaagttcggtcgattcaaagacagcactctttaaatacgtaaataggttaattcataccgttacaatcacacgcgatacaaaatcatttcatatcatttgccaatgataaattatgattaacataatgataaacccaaatcacacctccaatagtaaaacgatatgataatataacagttgaattttctaggcacacatctgttgtgctagcatgggagcatcggttctctcgccggttatccccgtttctgtcttgttacatggcttcataccatcggttaaaccatctccggttttgacgtcaatgttttcattcttagtcttgatctccgatatggattggtacgataatgaaaccgggagaaaacccttttgacgacatgtctcaatagattcaataaacatttcctcgagactatacttgaagttaaaccccatgtccgtcagcttcttggaactgaattcaatgctctttagattctcatcaacaccttcaaacctgttatatagagttttgtttaggacaaagagattatgggccaaaacattttggttgaacaaaaagttcaggcttaaacgggtatatcttacgttgaaggtacgttatattcggggtattttggcctgagaaatttggagatagtaagaatggttgcatcatgagaggaacaaatataacgtcccttggcggctgcttgttcgtataagaagatatgagcgttgcataagtcgtccaaatgcacatactgtccttgtcttatgatcgagtaatgcgcctcgttccctaaaacattataatatattcaacgttttagatttaacattttcacatttccaacaaaagaagaagcacacacacgtacgagtgataggagagagcgcggtgataaggctaggcggcatagacgttgtgatgaatggaccgaccaccaatgttggaataatactaatgaaatctaatcctttctcttcggcgaaatcccacgctgctttctccgctaacgtttttgacacgaaatacatctgccacacaaatatatatgaactttaaattacttcaaaaaaccgtaacttgagtttaattaatatgtatattcttacccatcctgtcatctttttggacatgataaactcaagatcactccaatcattttcatcatagacattcttctgatgttcttctacattaacggttccggcagatgaagtaaatacgaatcttcgtacggtctttgccttaacacatgctttcattatccccaacattccattcactgtcggctttatcacttcgttctgattcgcaaatacaaaagtcaagttaagctaggttgacgcaaaaaccaaaagaagtttcctaatatagagaaactcacctcaggatcttttgattcaaaatccatgggtgttgccacgtggaaaacaccgtcacatccgtttatggcatcatcgtagcttccttcctcagataaatcagccttccataaagtgagtagcgtcttggcgtttggcaaatcaagaagatgttgtactttcttcaaattaccttgacaatccaaaaaaacccgtaaataaacgttatattaatatacataatcttaggagaaatgagtttgtaagaacatatagatatgtaccgggatctcgaacggtggcacgaacaaagtaaccacgttctagtaatcgcatcactagccatgaaccgatgaaacccgaagcgccggttacacacacggtctctttctgactaaccatttttgtggttatatgatagattgtgctttgggaaagattcaactatgtatgttcggtacaaatctttgtgatgtgaagacattataaataagacactagagattatgaatcgttattgaagaaaacagataataagaacgagaagctgccggtcacgtgagtaccaaccggagaagcacgtggggaacgttggttgacgaaggactaaagagatgtgtggtacgtaacaatctggtaagttgattttattatttccttaggtgtgtattttgttgttgtaccggtgggtgaaatacgttgacttcgatttgtttggtgagacgtgtgggtgacttcagttcagtttgtttttgtttttgttccccacccacttttacgaaataaatcaaaatttgtctaaacaaattaacattttgatagaatatatacagaaatacattttacttaagtaatattttaattttaattgaaatctaaaaatcagacacctaaaataattataaatcttggaaaagcttaaatgaaaaatatgtttatattttagatttatgaattaggagtttcttattacaaaattgtaaaattataaaacatattaatttataaatatgacttctagatttattgcaatctaaatattataagcatttacataaaatacataaactaaaactttaaaagatgtaattatccaattgtgtcccatgtcagctttttcattattatttcacgaattattataaaaataattgatatgttaaaatattgttttcaaaaatttatttatttccagttttcgcaaagaaaataaaataaaattagaaggacagtgaatcacttaatctcataaagtaagaaataacacgtggtggttacctcgtccacgtggattctaaaacacagaatcaatataactcttgtattttcaatttgttgtatcgtaagacgtcagagaagaggtcagcttaattttgactctcctccaaacagagagacaaagtaagccaagcgtctttggtgtagtccaccaccacgtttgagctcgacgcagagagagaagaatacttcaaagctctccttcttcttcttcaaccactagaaatcttcgttctctattcaattgcattgcgttagcaaaattctggtgaattgatttgatcagatcttcgcttgatttcgattttaaaaatcgaagaattttgtatcgcatggagatgattttggaggagaaagatgcatcagattggatttacagaggcgaaggtggtgccaatctcgttcttgcttacgctggatcttctccactttttgttagtctcttcttcttcgatctctcttccttttgaatcctgtaaaagttaaagcaagtctgatgaactttgaaaaaaagtagttcagattctcgccgtcattgactttttagctttataaaagtttggtttagattctctagttagaaacttggatatagattcttttttagtggctctcttcttctatgaagaatcagaatcagaatcagtgttggtataattcttatcttctcagattgattagtgtctaaagagttaacacaatgttcaacagtaaaatgttttgtacagaattggatttggtttgtttaagtttgaccaatcttttacattatctctgaactttgattaggttgggaaagtgattcgtatacagaaggctcggaggaatgataaagcaatcaagaatgcgaatggtgttgtttcggttttaacaagcgatgagcaacatctatggagagaaaacaatgagctgatttcatcaccaaacaaggaagttcttgaacaaagatatgttaagaatgtgatcatcccactcttgggtcctaaacatgttgatgctggagtaagtaatattatcaaatggtctttgttggttttatttagatacttatggcttcttggtaagctgatgattagagtattgtaggtacgtgtttctgtgtccaaggagtttcttgagtgtgttgataagaaagtaactaagcagcgtccgctatggcgtgttaatgcagcaaatgttgatacgagtcatgattctgcccttatattgaatgatcattcacttttttctcaaggtaacctattattataagaaatcggacttttttcatgatcataaaaattagtcgtaactatatggtgttatctgtgtcaggtatttctagcggtggtgattgcattagtgttgaaataaaggtttgataaatcctctgggttgttttagttttctctttatcatgcttgacctaaactcactgtccttaattccatgaagtagcccaaatgcggatttcttccaacctcaaggttcataggtaaagaaaacatgctcaaaacaagcgtaagccgtttcaaaatgcatcaactcttaaagttggaatataacgaggtaaaagcaagtcattgttagtataaaatcttaatggtctatagattgtgatttgctgaaatgtctaataagtatgtcaccattctacagatatctgaagaaagcgagtacgatcctcttgatctcttctctggatcaaaagagagtgttttggaagctataaaagctttatattccactcctcaaaacaatttccgcgtattcttgaatggttctctcatattagggggttcaggtgaaagcaccgggagaaccagccccgaaatcgggtatgcctttgaggatgctctcaaaggcttcattcaatcagaagacggtcataggacagagtgctttctacaactagtatctgacgctgtctatggctcaggagttcttgatagacttcttgaaattcagaagctagacaaattagacattgaaggagcgattcattcgtattacgatttaatcaaccagccttgtcctatatgtaaagaaggtaagccactggaggcggaattgtctctacatgctttacctttagatgaaagcttgaagattgtgaaggagtatttgatagctgcaactgccaaagactgtagtattatgatcagttttcaatcaaggaatgcttgggattcagaaccctcgggtgattacgtctctctaaaaccgaccaatcaaacgtttgattacaaggtatgatccattttaacacattcttgtcttatatggtgaaagaactattaataatatttgctgagatcattggtacaattctctaaaaataaaatgtgggatccgcgaatcattataagaacagaaatttccttagaaaacgttgagttctcaggaaccatataatcggtttcttcattttgttatatttgtttgatatttgatttatgtaactgtaggtacatttcattgatctaagcctgaaaccacttaagagaatggagtcatactacaaattggataagaagataattagcttttacaatcggaagcagaaagccgaaaacacggcagaacaaatcggcaactcaaaaccttcccacagctaagtcatgtatcgtctcaataccactagctctcttttttttggttactgttgttgtagaacataataaagaaagccctaaaagatgaatgttcatttcttaaacttaaaatttgttggaactatatctccttcactctatatctctttctctccctggtcttctctcggcatggagccgttgcctggagatattttactgttccagaatgctctctgtcaagttttgccagaattgcttgtacatacaaagatggtggagcttagccactgttgttgctccttctatggaaaattttgtcagcggttttccgatatactgtctccccactctctcacaaaagatagtatctttggggtggcagacccatggaccgtccctcctctcccactgaatcacaaccatgagatctctttggcggcatactacaacacaacaaaaaggataagtcatataatcccatctacttaagttttagcaagtgattgaaccaattcctaacatcttttgcgacacatttacttaataaaacattgaaaatggtttcccgtagcatcatgaaccatgctctgataccacacttgtaaataataactttttgagttatcgagaacaaaatccattaaacatgaaaagtggacactaacaataataaaactgactagggcttggcattcgaatacacgctccgatacgcttcgggttttttgggtttaggctcatagcacccattcgggtatttataatatttgggttaatatttgggttgggttcggtttcttcattcaatccacccaaaaaaatcgtacaacatttatctctttccccgaacaatacaaagtgtttaaaccttataagaagacattgcaagggacaatcataaagaacaataaccaagggatcattaccacattaacttagaaaaactgaacccatcatttgcctcacgaactagtttctaaacaaaaattctacaaaatacagtaaacaccttacatcatctaaggagttcatgccactcatttttcaagttcaaaaaaagaacaccaaatgaatatccattacaagattttaccgatttttatgaagtaatcagcccaaacgatacccttaaactccctcatcacgttctcggttccattgctcaattctcgccctcctttcctcgcttccttctctcacatttcgtgggcttctgctccgtttcgggcttccatgtctcctccttccaccaccatcccgatcatgcctctctgatctatcactgctccttttcccatttccatgccggtcacggtccctaacgtcccctctctctcgctctcgcgaatgctctctcttacgtcgagggcttatactcctgcttcgacttctgcttccccgacggtatgaacgacgatacctcccaaacaatttcctcctaagctccctcgaaatctgcttcacatgcatgaaattacagtacccaccacggttacagctgttttcttcatactgcctacaagtagcttccctaaaatccgtcacaggagagaaatcagcaatgataggacgaccggaataaaatctcccctgcaaagcctgcaacgcagcagctgcgtgatcctcctccttaaacagaacatacacattcccaatcatatgatcagcaagattgtcacaaacattgagactctccacttcaccaaacttgttgagttcttcgaaaatatcttcgtagaaatcctcaaagtggtcttggatc

SEQ ID NO: 818 - DNA, 79976 bp, Arabidopsis thaliana
ttactcgggtctaacggctgtccctgaggatccacacctggagttatcatgtcaggtctctggtacatgttcgagaggagaagcgtcggcgagatggtgggacggttatgaagccgtgagcaccggtcaccgtgacgacaagcaccaatcttaaagtaaaacggacaattcactctatccttttcagtaccaaagattgaagctaaatgctctgccattctcacctaaacataacaaaaatcaaattcaactaaacacaaattgttcttctacgcttatatgataaatcaaatcactacaagaacgattcagaatcagagacgagaaccaaatctaagcttataaacgagagttaacacaaaatcaaagagaatcaaatcaatgaacgaatcagaatcatgaatcgttgtcaaatctaaaacagatcgagacgtttctagtcatcgagtggagatgagaatccgaaacggagagagagattgattagaggaagaagaataccgaagaggattttcttttagtggaagagaagctatcgccgacgaggaggtgccgttgccgatcacgatctagggtttaggtttatttgattagcgactcgtgtgagccggagagagagagagagtgtggtgaaaaaaagagaaagagatattaatatgggtttattttgcaaataaactattctacaaggaggaataataaaataaactatagaaagttacaatattggtcctcgtcaaaatcgtcataacataacgaggattttaagattgatccttttgttgctccggctcagaaccgaataaaccaaactaaactgaactggattggaaggaaacgaacagaactagataattaatatctgaatgatttttttaaaaaaatatgggaataaaaagagctaaagcttctctctctcttctctctcacaaaaccttcagagagggaaagctttttgtctccacctacaagaattttccgatgatagccgttccaaataatttgggcttttgcccggtatcttctagctcttttagtggagatgaccggttcccgtacggcaaatcctgctttcataagaggttttggccgcttgtatccttgctcgtagtcaatcagttttatgctgattgctttgatattttagttttgtttttcaataaatctcaacagatttgagatggtaattagttttaggtgctagttacttaagattaatttctgtcttgtgtctttagaaacttcgatttgcagaaatctatcaagcgattatgtcttcgggttgaaagattgaagaatattccgatgcttattatgattcctttttgctgtgtcttttaaatggagcaccgttcagttttatttcggtggttacaaggattcattgtgcgatgtttcggcgatgcattcctcaccggattcggtgttcatcggcggcgaaggttgatgtcggtacacttccgatgactcttcatcttgtgttgcagttgtaatatcacgtggacacgtgtattggatagagtccaaatgtcaaaacatctttatgccgtagatgttaatcttatgggctatgttgggcctaacttttctttctgcacatatcgttgtaagctttaatgctttgtttcctcttttggtggttaatataatacacttatgagaagaaaaaaaaaaaatatgggaataaaattaaaaataaattaaaaatctagtgaatgtcagacttatctgaaatacaattatatatctaaaatgttattcttaattatatttcaaataatcaagatagccaaatttataatttataatttaaagatattagttatgtttacactcaaaataaccaaactatctgaaataactgaaatatctgaatgtttttagaatacttgaaatatttaaccaaattatatttgtcaaattaaatacttgaatacaatctccaaataattgaatacttaaatacaattttcaaatgaggtttttttttatatgaaatgttaaatttatttgatcaatggtaaaatgaggttatttacaaaatgagtaaaataaaaaatggaaaatctatgaaattctgtttgaacaaaatagttagagagtcattaattttaacctccacatgttcaggatgccctctaacagcagctttcattggtaaagaaagtattgctcatttaaggttcttacgagtatgttgttaaacatttttgtttcgtacatatccctagacttaaatttaggtgatcaatctacttttaacattaaaaaacctagatgtaaaatcaaataagtatccgtggttaaatatatttacccgatcattccataagtttttatcgaacccttaaattcaataatgtaactagtgacacataccaaaaaacggtcacacaagatcttataaatttaagagatattattagaataagtaaaatttatacgaaaagtgaaaatagatatttaaaaattaaatcatatgagaactaatacgcaattgcaccattaaaccattcttcttaattttgaaagtcattttcctcgatgtatacttaactaagtgttttattttctccctcttagtatgtgtatatatatagtacggtgttgtcatcttcatcgatcaacttcaataataaattttagtacatccttagctaaaccagtactataccaaaattcaagagtcaatttttttgcttttttaaatagaagaaaattttatatatttctttgtttacatgaataatttctaacaatcccattaactttgactagtaagaattaatttgaataataatagtatatatacatatatatataaatatatatttgtttgtttacgtgaataatttctaacaatcccattaactttgactagtaagaattaatttgaaaaacaataatatatatatattaaaagttatactaaaacttttaatatttgtaggaatgccctacagatataaaacatttatgccctttatttgttttttgcataatcaaaaaattaatagtatataaaagttatactaaaactttatagatttttttttttgaactttataagcattttgtaagcaaaaaaataggaaaaaaaaacaaaattatattttttaaatatacctctatttagatttttacctccaaaaccattcatcaaattcacgtaatcgagtttttcaaacataattgtcttaatggatagcaaagccaactcatttatttgattaataaaaacaaagtttttattttgtaatcaaagttcaagcaccttacattagaaagtctttgactttttttttgtaatcaaaattttagagtttaaggttttatttttcttaaatctaaaattttactaaactaaattcattaataagacattttattaatttaaaaagatgaaaaaaagatagtaaatgaaaagtttaacaaatataaatatatagaaaaatgcttataattgattttttttataacataaaagtcttaaaacttttttataaaaatatgctcctctactataatgtcctaagccgtggcttcacttgattgtgtagaatgtcgaacctggctacgaagcacctaataatgttagacattttgacgtggtaggagttgtgaaacgtctgactttttcttcaggcattggtattcctaaaaattatacatgtggccgcaaaactgcacttgttccgcccagagtatacaacacttgctaaagatgtaagtgagtttagtttaaattaattttatatcgtgtgaactaagatatcttaaaaataattatttcagtgaattccatccttttttttaagaaatttatcgtgggtcaaaatatatgagctctttttacaagggagtaatagatgtgatggtttgtaagactagaatagcgaaaggggagtttgttgcgttcgtgaagttgccttgctcaaaagtggaatctctatatgtctcattagacattttgctaatccaagcgaaacgaaaggtgcgtggtggtcgtcgtcttactgatcccgacacaaagttagctacgcatacgcgtttgttaatagattttgtagcttttgctcctcctaaatagtcttttgctcaaatgttacccacgttgaggaaaattgtagggtttaacagaaaattctaacggaacgttaactctgtttacgaaaatttcacggcatgtccgaattggcccagtcaataaaacttgaccattttatcaaagaataaaaaaaatatgatttaaataacatttcgaaagttcatgtttttttcgtcccaaatttaaaaattagcgattttttcaatatttttcccgtaaatcaaattatccgaaaagttttgattttgactttgctaaaagagaaaatctattttattttacaaattgatcgtgtaggaaactaattcaagttcaaagaatttggaaatctccaaattcgaagtgctgagagacattcaaagagcacatgaataatttatcctttttcaactttttcaaagctacaaattctgatctcactacaccaaccagattcggaaaaacatattatatcctaactattgagcatctacgttgcttatgtttagttcaaattttgacatcatcctagttgttcatttgatttaaatttttgatacctaatacagtaatactaatgccgattataatagagaaatatattactttggcatgttttaacgtgttgaaatgtgaaagtattttatatttttaccttttagacatgatcaaatgtttatttctcgaaagtggtaaacgacgaatattaaaaaaaattgtattaaaataaaatcgtaaaaaaatcagaaatttactaagtttaatctctgagtatatatgtgtgattatttgtggaaacgtattcagctattgtgttccgtctattcaatcattttactattccattcatagtcaaatcccagtgtttcaatcctaatcaaatttggatctcgaaccaaccttccaatacgttattagtacttacaagaaaggtgtagtagaaatttgccagtcggataagatcatgtcattcattcgacaaattcattgaccaagaccaagaccataagaaaaaaataattccaccaactcttgtttttttttgtcaaaacgtgaaccaccaactctttacttggtcaaaaggttatttggactttttaaaaactccaaagtagtataggataaacgaaaatttccaggttcaccaacctagacgtttgtctcctctcctgtctatatattcactcatgcaaggccaccagacctcattcttccacaatggattcttcatcttcagtaaaaatcgtctcgaaaagcttcgtgaaacccaaaaccttaccagaagaatcaaagcaaccatactatttatctccatgggactacgcaatgctctctgttcagtacatccaaaaaggtcttctctttcacaagccaccacttgactccattgacactcttcttgagaagctaaaagattctctggccgtcacactagtccatttctaccctctcgcgggtcgcctctcatcgttaacaacggaaaaaccgaaatcttactctgttttcgttgattgtaacgatagccctggcgcggggtttatctacgcgacctcagatttatgtataaaagatattgtgggtgctaagtatgtcccttcaattgttcaatctttctttgaccatcacaaagctgtgaatcatgatggacacaccatgagcctcttatctgtccaggtttgttatttttccatttttggaggacttttaggtttatagacttatataaatttaccatatattgaaactaaatcaagtacttcggtcaatttctagacatacatttgcattatcgaacaattagtattttcaacgaagaagacattcagtcacttgtgtttgtgtaggtgacagaattggtagatggaattttcataggactgtctatgaaccatgcgatgggagacggtactgcgttctggaagttctttaccgcatggtccgaaatcttccaaggacaagagagcaaccaaaacgatgacttgtgtcttaagaatccacccgtgttgaagcgttacatccctgaaggatacggtcctctattcagccttccatatagtcatccagatgaatttatcagaacctacgaatctccaattctcaaggagagaatgttctgtttctcatcagaaaccataagaatgcttaaaacaagggtcaaccaaatatgcggaacaacctccatctcatctttccaatcgctaaccgcggttatatggagatgcataacaagggcgaggagattacctctcgatcgagaaacaagttgtagagttgctgctgacaacagaggaagaatgtatccaccgcttcacaaggattacttcggaaactgcctctctgctttgagaacggctgcaaaagctggtgaactattggagaatgatcttggatttgctgctttgaaagtgcatcaagcagtagctgaacatacgagcgaaaaggtatctcaaatgattgatcaatggctaaagtctccttatatttaccatattgatcggctatttgaaccgatgagcgttatgatgggaagctcgccgaggtttaataagtatggttgtgaatttgggttgggaaaaggagtgacgcttagaagtggctatgcgcataagttcgatggaaaggtatctgcttacccgggaagagaaggagggggaagtatagatttggaggtatgtcttgttccagagtttatggaagctttggaatcagatgaagagttcatgtcacttgtttctctttgaaaatttaccaatttcttccaagtttctcaacatttttattttgcacctgatttttcaaaaagaaaagttggaaggtaaagttacaaccctataatccatatatattatttcgactctgaaatctaaaagtcaaagaaatgttgcacctgatttttataaatttatataaaatacaagttttatattgtatctcaatattgttagtaagatgatataaatattttaaaagggttacaatttgttcccttttgataaactttaattacaaatactattttattttagatagtaattcacaacatctaatagattcttagtttacgatatatatcttaatcataatattgatattaatatattaattttatccacgctatgtgtggcactttttctagtttagtatatttgttggttatgttgacgactccacagattactcattagttcaaaactaaaatcagagtaggatgataccaatctcaacaaaatattataccatcactagaatcatatccaaaattcatacgttaaaatagttgaactatattctctttttatatctttctcctaatacagttaagtaataattagaaaaagagttagaactcacctgtaaaagaattcagatcgaacgggtcactaaccgaatattctaaaacttctctaactaccaaataattcatcaaaattcaatcgtccattataaaaatattttaatctgacctgtgaaatgttttattgcccgagcaatctaaatctgaaatcggttatcatacctgctataatcgtcttgctattaaatggtgacatgcgagtttggtcacggcaccgttgccattcaatacctcaataatcttagctatcataattttgttcccttcgatgatcaaatattatataatactagtatatagtatattttctgttatttaattaaaacttgtcttttgaaagttagaagagcaaagataagaaattaagaagtcaatgtactaacatgacaacaaaactggagtgggacaatcgatatattagcgttgaaattaaaacaacgtgcccactatttgtattactggtattaattactacagatttgtcgacgtcagtattaatttctatgataatataataacaaatggcattgatataactaagagtttacagaggaaatactatattgatcaattattacaagaaaccaatgtgctattacccaaacactaacttgcattctctccacctctgcaaacaatgagtttgtactttgaaggacacgagcatcacgtatcaatcattaaacatcgtgatggtttggaatgcgatgcttgcgatcggtcgtttggggatgtcatctcatgcggtgaatgcaagtttactgttcacaggaaatgtgtatttatgttcgacatacaagagatattcgaccacccttctcatgatggacattgtctcaagcttctcacgacaggagctcctgatgacaccgaccaaaaatgtcatctctgcggtaaaaagaccaagcgccttctttatcattgctctgattgtaaactcaatgtggatattgattgcataattgattacatatgtgctcgatcccctctgaaattgccatggcacgaccaccctctaatcaaggttgatctcggagctaatatgccttgcgacttttgtaatgaaagtggcatagactattgttgccctcgttgcaggttcatgattcatgagagatgtgcctctgtatttgactcaccagagattactcacccttctcatgtcagacaccctcttaagcttcgcagcaatggagctccagattacacaaacttaaattgtcatatatgtggagatgccactgggaacttactatatcattgtgatatttgtaagttcaacttgaatatgcgttgtgcgattcgagaacccacaccagttgctctttcaaatatgaaggtccatgagcatacactcacactcatgccaagattgatctcctttgtttgtgatgcttgtgggatgaaaggcgaccgtgctccctatgtatgtgttcaatgcgatttcatgatcttccatcaagagtgtgctaaattacctcgtgtcattcatgtcaaccaccatgaccaccgcgtttcgtacaagtatcctcttggtcccggagaatggagatgtggagtttgttgggaagaaattgattggtcatatggggcttattcatgctctctttgtcctaattatgctatgcattcactgtgtgcaacaaggaaagatgtatgggatggaagagagcttgatggagtacttgaagaaattgaagatattgagccatttaagaggaatgatgataacaccatcactcatttcactcatgaacataacttgagcaaagatggtattactttgaagaagagcatcttgtgtgtagcatgtgtttgtcccatcggtaccgacacattctacaactgttcagaatcatcttgcagtttcgttctccacgaaacgtgtgctaatatttcaaagaagaaacgacattttctgagcccagtacctctcgttctttgcctccaaaaccaacgcaacacagaaacttgcaatgcttgtcaacaagttttttgcaaaggatttatctactcttcatttccaaaaactgtatatcgggaaaagttctatgacttacaatgcagttcgattactgttccttttttccatggaagtcatgatcatcatttactcttccttaaacttggacgcggtaatgtgaagacttgcgagtgttgcggcatcgtccaaaaagagtatgctataggttgtaccaaatgcaattactttttggattttcgttgtgccactctaccattaacggtaaggcttccaaggtatgatgatcatccactcactctttgttatggtgatgaaaaagcaagcggaaaatgttggtgtgatatttgcgaaagagaaacaaatccaaagagttggttctacacttgtaaagattgcggggttacttttcatatattttgtgtagtttgggatatcagattctccaaacaaggagaaacaatcagagacggtgttgaattgctgccaaacaatacatcttcacggccactttgcaagaattgtcaatgccgttgcctaggtcccttctttgttaaggattatgacaacatatgctattgttcttactactgttatgcacggcttcattctctgaggtacatttggagtaaattcagatgccctccatggatatcagaacccagtacttgaagatgtggcaatggtcgagtttgaattttcatctattcgattattatttttggattttctttgttgttgttgttgtgagctggaatagattgttaatgtaataattttgctatattaaatttgtttgcatgtgtgataattgatgtagctagcgataattttcccatttgttttcctaaacttatgttccactacgagtgtcactttgtttcacgaattttttttttttttcttttattaattgtgaactggtataaaatataatgaaattgtaggttaacacatcagcagaaacaccaaagctctgcatgaggcaattgcattcttgtggtgaaccacgagtcatcaaaggacgcaatgcgagagttatctagtgaaagacagtcctgttagagacagaacaatatctgagtattgttcagtaagaagtaatgtacatctactctcttctgtttactgatcaagcccatagttacaccgtacataaaagccaccatcttccacaatttgccacatgagaaacacaattctttcaactcaaggctcttaggtttcaatcaaatctcgtagttttatcacaactataacttcaaaaccaaatataagtcgaaatctcgagtccagagtctagaattcagctaatatcaccgtaatttattagagaaataacactacattgagcacgaaatcgtaaagatcatcgaagaaacaaactttcctttaccattgtaaaggatttattggaaaacaattcacaactagaaatatatataagatatttgatcctcaatcccacgatagtccctgaaacatacaacaatatcaaatcaatgtttttaatgatcgatataacctaaaccccgagaacaaacttaccgagaaatcgatatcgatcaaatcaagtggatggtgcaagaaggggaagaatcaagtgaggaaggtgagcttgatgatcttcaagacgtcctttaacagagtcaccatcccaacgaacaagagttggtactccggttagtttaaaccgagaatcaactctccaaggatgcgccggagtccgccacgtcggtctgtctccggcgtaagcacgaattagcttcacctcctctggaaattcctctagagtcttgtaaatcacaggttcagctctaacacagtctgatttaccaatcaaaaagatagattcgatcacgaaagatggaatcgattgagaattttgaaaaatccctaagagagaaagagagagtgacctggacaccagctttgaccggtggtgggatcattgtcggcgaggaagagtatgaaattgatcttgctacggcttgtttcgtctgatttcagttcttgtaaactcgattccaaggttgatggattcgcgtccaccttcttcaacgtcatctttcttcttcttcttctccgacgaattctgatttcgttaccgagtttacctttttctgattagaccagacctgctctaatcaaggccttttcttattggaccgagctactcagattaaggcccaatttattttgaaataaattgtattctttccctttaaaagttaaaaacaaatggttgttttaatattttaacttattttaaaaattgtaatccctttttaggacaattatcacaaatagcataattagcaaataagagctctgaggtcggaattatgaacataattttggagatcagaataaccgaaaacttttcaatcaaaaatcataaagaattctcatcgaaatggtgattagatatttcgaaatttttattttgatttaagaaaattgtagttactattaattttttataaataatgaataagtgtaaactagttattgtataaatttactaattaatattaattttaaaaatttgcaaaatgtgtgctactataaggtatttctccattaaataagaatttgatactttgcgtgaaaaaacatattaaaaaaagaaaacaaaatgtgaatcttctcgtttactgtgtatcattaacaaaatctctcaaaccaattacgtaaattaaatttatgaaacccactgatgatgattcttctgctttggggtaggccacacgcaataccttgtaacatgtatagggccataggcgcactacccaatacgagaccgtccgcactctcatgtgtatttttttcttcttttaaatagatgtgacagtgcagttattcgtgatgggaatatgtttactgagtttcttgtgttcgaaattaatcaagcacacgattctcttgtaaaacttaggttgaactaacttccccaacacgtaagctcgagatctaacggtgaagtttagcctcatcggtactggagcaggaggcgctggtggttcgacgataacgataggtcctttcttcttcttgggttttggaattggtgcaggaggtggtggtgggactaatgttgagccacttccatagagtggaatcttgtctccaagtacattcaccaccactgttctttggcttttccttgactgataaaacttcttaatctacaaaagtaaaaagaataacgatcaaattaaattggaagtgggtcatcaaaactatattgtaaaaccaaatgttaagaaaatgtctatgtcaaataaagcaaaattgaatttagtaacaaccacactagatcaaacttttaaaaatatatatccattatataccacttccaataaaattctatttttttgtcggttacacatattttaaacacaaaattttaaaactaaacaccaaaatgtgcactcctgatcaaccccatgtgataatagccaccgacaacattgatcaaagactaaccaaaaactaaaccgaaccgaacttttttccaaactaaaccgaaaaaggttcggttatacatttttcataaaaaaaaaaagaaacaaagagaatctggtgatagcaacatgacaacaacattgatgaagatgaattagacacattttaaagaagtttcagattttagaacttacagagccagagccaatagtgatctgcgagaagctaagatcaatcggagaagaagtgacatgaacaccaaagaaagtaccagtgttacggtacaacattctcagtgtcgcgttcatagtgatcatatcagttcctatacctccagcatcttgtccagcttgaaccttaagttgctcaaacgttatactctgcaaaattcaattctacaaacgtaagcacgactctagatctgaaatctgatctcgatctactaagtcaactctcacaaaccttaacagagatcttaggtttctgaggtttagcagctgcataaagaatcaaagagaagaaagcaaagagtagagagaatccaacaatgaaagctaaaacataacatcgacgaggcaaagcttcttgttctctatctccatcatcaagaagaccttcttcttcaatcatagcgaactgtttttctccagcgtggcccttacgttttgagccgttgatcttggagaagcggcttgaggaagagtgagaatgtggtggagatcccatcgggctggtgagtaccggtgttgagtggaatgatgttgctgttttctccccatcgtgggagtcacgtgatggagattggacgaagtaggctggtcgacggggagatctagtcggcgatgaagctgagaggcttgtcacctcggagtcggtcttcgcgtgcatcttgagattggaatggaagatgaacaagtagaagatgagaggttatgtgatgtttgtatttatgtattgaattatttagtcaatgagtggatttgagggccatttgcccattgctttgtatattaccgtaacgcattatagcatcatgatcgcttttttttttttttttttaatacgattggtaatcaaaatttaagtcacctagtatatagttgttgaaataggcaaaaagatatttgtagtaactttttgactttttttttgtttgtgttctctactaataaattgttttgacatcatgatcgttttttttctttttgtgcattgtatttctagttttatgtattgcattgtgtgtttgaactcatatgcttgttgagggaaaaagacatggaaaattaaaatctcttgtgataattatctaatctatttctgacttctgagtgagacaagttacttggttttcgtcgccaaaagcaaaccattactacaaacttaccaaccaccggcttgtctggagattctgcgctcaaatattcgcttgcaacattttatgtgttgcaattgggatcggaacaacaattaacttatatgtgtccatctatgattatgattctcttaaatttcgaaatgttttaatgaacagtgtccaacatttttttaatatatatatacaagtatataactgggcatacatcgtaacctgtgatatgaaatcagtgtgacaaaaaaaaaaagaacctcgtgtccaagaaatgaaaaaaaaaactacaccagaccaccaatttgttatctctatcaactaatctgcattttcttgaagacaaatcatcatctttatcatcatcatgatcatcagcatcacataagcgatggaggaggcagtttccagaaattccatgtgttaaagtcctcctgtttataaaacttcatcagaatccgcaacttcttttaatgaaatagacaaagtacaatgtttgatatatataccggttctgaagaggatgtagctgggaacattctgttaacaagagtatgaagatttgtgtatgatcttgtatcaattctacgattcacagctacttctccctgcaattctcacaaacaatgtttcagttgtttctaataccataattgcacttgcatacacatgagatttgttcttttgcatattgaaagaccgaatgtcaaatacgaaatacaaacttactatataactcataggttcctttcaaaaacaaacacagatgcaaatgcaaacaaacagttgagtcctttaagcctgagagcatagtttgttccacaaaatgttgctaattcgtctctttttatgctaatggattttcaattttaagaatgtgtacctttgggttaataatgaagatctttcctcgggggattccgactttaaggtagcttatctcatctgtgtctctgtttccaaaaccagcatagaatgggttgtgttcgggaggaaacaagccccgtatctcctgtatattttggaaaaaccgagttaaacgtagttcagaggacatgagagttcaacagacataaaaaaacccgcataaaactaacctctaagcaagcaatcttgaattcatgaggtgctcttctaattactggagagaaacacacaatttagaattcgaagcaaatcattcaagatcaacaaatcatgagatctgtttgatatgttgcagaggaaacagaataccttcccgaaacaacgaaggaaagagaccatcaggagagataacaacaggcccatccggcaatgcttttccgtcctggaatttgctagacaagattaacaaagtacggtagattttcgatttctaatgttcgggaatgcgttgcagctaattacctgcttgagattaactagaaattgtcttgtgactgaggcttgagaaatcgcgcgtgcacttaaaaatatcaactgatatccattttcctgtacaaatgtaagggagaaaatgaatctttgctttttgtcaagttgttttgatgctagtatcattcataatgatacgaattacgaacaagtaaagcacagataacagacctttacagccgaaaacaaatgtgtaacacctgtttgtgaccaatctataccaaccaaaggcataaactggcctaatacatccgatctacgacaaacaataatataaagcaaagtaagtaaggaaaatcagaaacagaaacaggttttggacttggcttaaaatataaaaacataatataaaaccaaatgtgtttttctttaccttgtgatggtaccatctacatctgacacaactatgcgcgaattccatttccataagtaaatccttgcgtctacctgttgcattaaagtttgtgaacactaagtggaaactcttgacagttatatgacaaacatgtcgtagtaaatgaaatgacctgttgtgtacccacaatattggtggagaacgtaaaagtcacggaattcattccatctttcagatctagcgaagccaattgttcagaagttggagttagtgccctgacagtctttttcattggtcttggggacgacttctcttgtttctcttcaggttcagctgtgtccccagaaggagaagcttcagcttcttttgttgatcttcgcagagagaaaggccaaagtttccagcttccactgccttgagctaatacatcaccaggtttctcattccggtcaacagctatcatgcccttgggttcaaatacttgggcagtcccaaatgaaaccactcctaagataataggagctgctgcatcccatggaaaatagcagccaccaatcttcacgacaagcttatcgttctccaggatcgatgggcccaaagaagcaaacttttccatatccagtttttcggaattgaaagcctgagaagccgcttctgctcccattccttcacttaataagtgcttgcagagagagagctcgactgagagtggagatagaaagttagactatagcatcaaaattcataacaaccaaacaattcagtaaaattttatccttcaccatatctacagagagaaaataaaaaggttaacaagttatatttccttacccacttcaggattagctataacatgtttaaatgcctttaattttgggctactctcagcaacgctttctgcatctaaaccccccgagctcgactcatcttctctcaaatccaactttgaagtattgaaacatgggtcaaatgactggctcaagggctgagaaggactggcatccatatcatcgttgttttgaagccgcataatcggtaatgatcctaccaaccgctccatctcatctgtgaagatatccttttttctctctatgttaatcggctctgacaaggccattgtgttctccacgcctttttcaggactagttttagtttcatcataactctctttcccatcaacttttacagtgtcagaagaacttgaccctacagaactattaccaccaggtttacattcatcaagatcgctaaaggaaaattgttcttcttctatctctggttgcaggatgctttctccacttgctgactgggacttctcaaaatctcctgccgagatatgcatatcttttatggtgattttattttcatcttgaactggagagccagtgctgcttccttcttgagaagtgccaatgctccccatatccgcttggtcagctgaacccaatgttgcaatttccacagattcaggagcccttaacagttcttgcttggaatccagatcgcttccacttacagcatcctagtggagatacaatttatacaagacatcagtaccatacatttataaccttcttattctacctttgaagctattaatcaagcattcccaagaatatgaaattgattagatgtagtaactaacctctgctagtgcctcggttcttggttcgacaaagatctctacgtttccactcccttcactagtaacagagaacaccatactcgatgcttcacataaaccattttcaacaacaactccactcgatccatcctcttcacaataatcttccacattagtgctttcacgaaaatcctgctctttctcatcaagaaaccgcaatgtaggagatgcaacaagaggagtctccaatatcgaatcgctatcaactagcatctcagagctaccctcaacacaagattttccactagtactagtactctcaccatagtctttaccatccaaagactcagaagacataccttttccacgcttacgcgtatcgatattagtagaccacttaacctccaataaatcagcagcaatctcagctctctccacaccacaatcttgactctctctaacagacctcccaccaaacacataccctaaaatcccaggcttaccaacaatcttcccattaccagtacgaggactaggagaatcatagttacaactcctagacttcaaaggaatcttaaccttatcaacaacatcatccctactagtagtctcagcttcatcaccagaagacaaagtataaacttcaccactctcagattcaccaacaacatcttcaacttctctaagaaaataagcttgtccagtatgagctaaatacatattgaaaccagaatcaacaccattaacatcaattctgatcaaattcctaccattcttcaaaaccccttgaaatttcccaaatctaacataccaaggagacgatttaaacgttccatcaggttgttcaacaacgataatgtctatcgcaccaccaaatggatgaaacggacctgaaaccgtacctacaccacggtagatatagcttccgatcctaccgacggcattcatatttcgatcggaaaagtcaacgaaagttacgatctttgagataaattaggaaactttatgatgtggatcgatcaatcatggtttgttaataaaaatcgaaactttgaataacccagaaacggagaagaggagaaatggattagaggaagaagcaaaaaggtatattctgtaagaaagatccagagaaggaagaggagacagagacgaagatcatcattaattcttgccgccggacattatttgtttcggtggggttcgtttcgtagtgatccaattcaacacccttcttctcttcttactctatttttttttatttttttttgaataatttattgtcattaattaatgtttcgactaatgttttttaaaaatgtgaatctgcaaagagatcaatgtatttgcctatttggattaaattgttttctttattgtcattagtcaataattaatgtttcgacgaaggttcagataaaaatcgtataattttttgatatatagctttaaaattacaatctaaaagagtggatataggtgttcgaatatctaaatcactatattaatctcattaaactgaataagaatcaactaatgcagtggattaagttatgcaatgtgatttgatataagatattgcaaagttttcaatgcgaatgcggttgaaaaacacacaagcctcattttcttagtaagatgagtaaggtatatataggtttgagataacttcgaaacaaaggttcaaaataaagacatgaagtatggtcttaattactactagttataggaaagtgagtatttcaatcccaacaatttgcctagtgtttttctttttctacttgcacaacaagttcaatgcttttcctctccaaacccttaaaattcaaaaagtataaaataactcttcaatttgttcgtaaatcaaagttgtttataacggatgtttgtgacccattactccattagagaggatgacttatcattacccttactcaaatgggagctttgaagcgaacctttctaaacttatttttctctcaaaagcgttaaagaaagaagtggaagttaattttttttttttttttttttttttttttttttgtgaacgtgaaggttaattttcaatatatagacttttatttatttcatttgtaaaactttgacctcaattttgagagagtgagctggaaagattccgtctttccggtgaaattcaagagaactaatttcggtcttagctcatctaagaaaggacggaactgtcgagtaaggattgaccgaagtctttagccaaaaaaatagacaaataaaagcgtaatctaagcagacagagctaaataatacatgtagggtaaacgaggactattgtcagatttaagttgtcgagtaacgggcctttgaaatttcgagaaaagaggggaagtactctatacagtgtgttctattattgtctgtaaacgattggctagatatctattttttcagatcaaaacccgaatattgatatccgcagataatagatataaaacttaggcctagtctcaaacatccacaactttttctcataactctgattgcaatgaactttgccactcgactgtgtctacctcgacatgtaatacctataaacatgccattttaccccataaatacatgtttgtaaagaattaaatatgtcaaaccccgacttttcaaagaatgaacccaaaaaaaaatgaaggagaaggagagatataggcgcgtacgtttcacgctcattattattggccgttcgttaatctttctattttccaatgctcgacgggtcacatcgcaagctgattgtttctcttgtttgtttccttcaaaatatttccattctaatgatgtagctatctcctacaacctcataatcagacatcaatttgtatctcctttgtcagatttaaggtatgttgtccgaaaaaactcattctcacattgactaatccaattcttggtttcattaatcatccttttgaaacaagaaatgcgatgaatttgaattttgaccatgtaaacaggaacaacacatgaccagtttctgagttcataatcatcacaatgttgggcgatgataaagattcagacgaccttaatttatttctcaacgccattggtgaagctggtgatgaagaaggtccaacgtctttcaatgacatcgacttcttgacattcgacgatgaagatttacataatccatttcaagattgtgagacaagtcctatcaacgaacctcctaaggtttatgttgcaccaagggtgatgataagtcatcaagattcgttttctgaagattcaagaaccgatgttatcgaagatgctaggattttgcctgcttctcctcgtcttagagttcctgcttctcctcgagcatttgtgtatccgagatctgtcgaatcacctcgttttggttctccgagatctgtcgaatcgccttgtttcgggtctccgattggtgttatcgatacagcttcacctttcgaatcggttagagaagcagtttctaagtttggtgggatcacagattggaaagctcataagattcagactatagaggttgtagttaagcttttgtttcttcacatgatttgtgtttatttgagatcttggttttgacgaaaatgtgtgtttcagagacggaagatggtagatgaagagcttgagaagatacaagaagcaatgcctgagtacaagagagaagctgagttagctgaagaagcgaaatacgatgcgttggaggagttagagaacacaaagggactcatcgaggagctgaaactagaattggagaaagcggaaaaggaagagcaacaagcgaaacaggattcagagctggcgcagatgcgtgttgaggagatggagaaaggtgtagctaatgaggcaagtgttgctgttaaaacacagctcgaggtagctaaagcgaggcaagtctcggctacttctgagttacggtctgttagagaagagattgaaatggttagtaatgaatataaagatatgttgagggaaaaagaattagctgcagagagagctgatattgctgttttggaagctaaagagattgagagaacgatggatggtttgagtatagagctgattgccaccaaggagttgttggaatctgtgcacacggctcatctcgaagcggaagagaagagattcagtgtagcaatggctagggaccaagatgtttataattgggaaaaggaattgaagatggtcgaaaatgatattgagaggcttaaccaagaggttcgtgcggctgatgatgtgaaagctaagctagagactgcttctgctcttcagcatgatttgaagaccgaattagcggctttcacggatatatcaagcggtaatctgttgttggaaaagaatgacattcatgctgcggttgagtctgcgaggagagaactcgaagaagtaaaagccaacatagagaaagcagcttcagaggtgaaaaaattgaagataatagctggttcattacagtctgagcttggaagagagagacaggatctagaagaaactaagcaaaaagaaagtacgggtttggcccggacaaacgataaagacgcaggagaggagttggttgaaacagccaagaagttggagcaggcgacgaaagaggcagaggatgcaaaggcattggctacagcttctagagacgagcttagaatggcgaaggaattgtctgagcaagcgaaaagaggaatgtctacgatagagagtcggttagtagaggcgaaaaaggaaatggaggctgctcgggcgtcagagaagttagccttggctgctataaaagctctgcaagagactgaatcttctcagagattcgaggagattaataattcaccaagaagcattataatctctgtagaggaatactacgagctaagcaagcaggcactcgagtctgaggaggaggcaaacacaagactatcagagattgtctctcaaatagaggtggcgaaagaggaagagtcaagaatcttggagaaactagaggaagtgaatagagaaatgagtgtaagaaaagcagagcttaaagaggctaatggaaaagccgaaaaggctagagatgggaagttgggaatggagcaagagctgagaaaatggaggtcggaaaatgggaagaggagaacagacgaaggcagagagcctgagaaaagtccgacgaggtcaagcaccgaggggagaaacaaggagaatggattcgggcagtcgaaatcgtttgcatttggtgaacaaggaagcagcagcaacaacactggaggaagtactactactaataataataatctgactcctgaaacaaagaagaagaagaagaagctttctttgtttccaaaagttttcatgttcttgtcaagaaagaagtctcacagtcacaagtgaataatgtttcatacctttttcttttttcttcaaaacatttggtttgttttttcttttcttacaccaacaaacaatgcagactccttaagtttggacaattattttacaatgtatgattatgttaatttcactcataggaaataaaggtaatgaattgatacacacttgccaacagtaagatgttcaaagagaagattcatattattaaaacccaataccaatatttttgttccaaagataaaagagaatacaaagatactttgaagagaactttatttctgactagttgtactaaaaagccaacccctttgaagacataaattgagcttgagtttagggtttgctgcataccactctttttggtgttcacaactttgaaggtttagggaagatgtcaggggtgaatttctgcgcagcactgagactacccttgatcttcatcgcacccctgcatcaacattcaacaacaaacaacaggattcaaagatcaacttctaaagattgtcgttaagactcaagataaaacagctaaatatacttgtaatgctgagtaaatgacatatgaaaggattcagagatcaacttctaaagattgtcgttaagaccaaatccaaatcactgattttgttggttcagacataagaaaaaactgctaaacatagttttagattttgttggttcagacataagataaaactgctaaacatatttctgtaatgcaaaggaagtgacatatttcaggattcagagattaacatcttggaccaaatccaagtcacacaaaagcttataatggtaaattgtggttcacacataagataaaactttggagaaagattgagtttgttgtcgggaatgatggatgtagtggttctgacacaggataaaactgctaaacatagttctagatcttgttggttcagacataagataaaactgctacacatagttctgtaatgcagagtaagtgacatatttcaggattcagagatcaacttcttggaccaaatccaagtcacacaaaagcttataagcggtagatgtggttcagacacaagatagaactttggagaaagattatgtttgttgtcgggaatggtggatgtagtggtttagacacaggacaaaactgctgaaacatactagtgtaatgcaattatgcaaagtaaatgtatgaaacaaacctaatgaaagccatctgaggattcatctttccagtggcaactttgacaaaatcatcatccttgaaggagaacgtagcatccactttccctccttcatatttccctaatttccaaagatcaaaataatcaacggaaagtcaataactaaaagcaaaatttcagattctcttcatttcaattcccaattgccataaccaacaagaaaaacctaacctttgatgcaaaatcaaatttcaggattctctcttttctaaattcccaattactcttcacttttgtctccaatcaaatttccagattcccaattgcaataatcccaaaatcaaaactttcagattttaccataatcaaaacaaaaaaagctaacctttggtgacttcgcctttcttcagatcaacgatgtaagtaacctcttcaaaccctaatttctgaaattccaaatctatcacaatcaaacataaaacaaaacagagtaataaaagaaatgattctataaagaaaggaccaacctttggagcaatgttgatctgataaacaagaccgatcttctctgtgacctctttcccggcgtcggtggaaagatgttccttcatcatgtccatgattgcatcggatttgagttgggtattcgccatttttttattgcgcagtgtagtgaaatctcggagaagaaaggtgaaagattggatttttaaggatggagttaggtaatagagacaaaggaggtgacgtgatcgataagtatggaaagattgagatttttgttagagactggcacgcttccctatttgcttattcttacctcatgattactgtttttctatctgtttctattttggggagatttagcagactaattatgttgaccagaaaccaaacaacagtaattttttttttcatcttctgcaaattgcgattttgtcctaatatttgttagttcccctaattataaaaccaactttttcaatgaagattgaataactatgtatgtattgtatttaaaaagcaaatgttacttatctagttatttggtgtgatttgctttgacatcaattagaaagctttgggacagtacttaaaaggactagtaaaaaaaaacgaagaagaaaagattagtttcaggaggattgttgttctgtttgttcgttctcgcaggtttgtgtttgatttcatgcttttgggcttttggccgtatgggccttttgccttgtaatgttgtatttttagtggaaaaggtgtttgcgttcattgatttattatgtgaaaccgattatacttttatttcctaaatgttgtagttttatggagtttcagctctatttgaatttataaaacgactaattaaagacctaattaaaacatttctgagacgttaaactaagataattcagatcacaatttcacatttcatttcttataaataagcaaagatttaattgttgtttatcaataaaaacaaacagaacatgcattaagcatatatttggttatactaaggttttttattcaatttctcgttatgtctatcaaaaatgtgctttcacttcttgcggttttatgcatcattgtttctgtaaatgctcaattgccacagattcctggtccgtttccttttccatttccgttccaaccgattcctggtatgccaggattacttgacataacaaaatgtttgtcatccgtgatggatattcccagatgcattacagaaatttctcaatctattttcattggaaaattcggtaatttaggtccggcttgttgcaaagcatttttggatgctgaagccaattgtatgcccaaaattccattcattccgctttttcctccaatgctaaaggaacaatgttcaagaattgctggtgcaactcctccgacaccaaaatagagctttaatatattttaaaaatatttgtttttttctttttaatttattttttaaacttttagcttactttacatgttatactcaaaaaaaaaaaaaaacatgatgatacattaataaaagagtcatatttgtattcaaaatttactcattctttaaatctgatgaataacaatttgaaacattgagtccatacttaatttagccttgcaatgttcagaacttaaaattgttttcataaatcttttaaatatgtcgtaacacaaaatctatgaacgattattaaattgactagttaatgtccgataaataggaggtgtgaaaaataaataaattttctttttctgatacttagattctaaataataatctatatattttaaaaaatcaaatttcaattttatacattcgaaaccaaatttttacttatgttttgaatatattaacttttttggtaaaattactttaatagtttactatattaaaataaaaatttgaatatataaacaacctatatattttatttttccgatatggttaaaaaatgttttctatttttggtgttaaatataacaaacccaactttgtataataataagaaaaaaatataactttatcatcaaagtcaacccactaacatagtgggctgattcaacttaatggcccaaagcactcttctccctcactctcgcgatcgactcttctgagacaccttcttcttctcttcttctctttttttttttttttttttttttgatcctcttcactttcttttctcattcctagattcttcttcgaaattaatcaaggtttgattccaacacatacacaacccttagccaattagctttatccaaacaacaccgtttgtataataaccggctcaattattttttattatcttttacctttattcgaccaccatttttattgtatgggcaacataaaagaaaattaaggaacttgaaattttatactatagtggtaacaagacaacactaaaccatcaaatactaatttgacgtctttctaagggttttacagtacaaatgaatccactcacatgagcatataaatatatttatagttagggatatatgatgaagaaacttgtaactaaggatagtaaatttgacttataagttatgcaaatatatatacattacaaaattctctcctcatataaagcttcaccatctgacctctcaagaaacagacttcaaatttacgtcatgttgcaagagtttattgagtggaacaacctatgccaaggaaacattttggatcaataactcaccacattcactaatatgatcaaactaatagtggaggaagaagttacctgatcggtactcgacgattcactcatcatcaccgtcttcatcttcttcgagcttccgttttcgccttttattccttcgttaacaaagttctgatccgatacctctgctttaaaacatcacaagacaaatttagaatagaaacaacatatctaaacagaggaaagaaacacatttttgataaactaataccttctccaacgctgatttggtcgtggtcacgcgaatgagagcttagctgcttgagactagaggctgagccagagctgcatattcccttcttcccattagagctgctaacaacttgattttcgggctcatccgttaccgggatttgtgtctttactaaaggtttataatgcttaatccatggactcctaagaaactcatgagaattaccaccgtgccttccgttaatccgatgttcaggttgtttcacattaatcttctgccagaaaccatcatgaagaaccttgaactgataccataaacatacatttcaatgatcccaaaatcttcttaacactataacatcatcatcatctattaaaaaaaaagtgtcatacctgttcttgagacggttttctaccgctaccgaacctcgttgattcggatacattctcgttcttcccgagagctccgagcgagttatataactgatctacgaatgaagcttccatagatttaagatataaactatgcttctcattagtccattctgtttccatatactctttccccgcagagtactacaccaaagttcacaaaaatgattttgttacaaagttgtcattacacagctcagaatccttatgtagatatcaaatctataaacatctaattatctcttcaatcgcaaagaagcaaccaaattcatcaacaagacaaatatcgaacaatttatgttcattagtgtaaataaactctttcgtttacttcacaataatcaacaataaacgcactaattccatcaaaaacgttaaatcgccgtaaaaattcagatctgagcagcgaacacgacggagattccgattccggcgaggaaaaacagacatgcaaaaatatcaatgaaaaagaaagaaaacatggaatatgtataaataccatggaagaagtggtctctccctccacggaagaagcatcgtcggaagaatcgtcagagtcatcggagaaacgacggctactaaagcgtcctctgtaatcaccaaccattgttggcttatctttgtggagagagagagagaagaagaagaaaatgaaaaatatcagagagaaagagagaaacaaaatatcaaaagaaacgatacagttgtagacgcttttacacgtgggtaaagttgccacgtcatcaccagtcaatttggcggaatgaagagatgaaactttttggttttagatatttcaaacacaaaaaatatcaaagatattttcttcaactgcaaaatatcttccaccgtcctcttctcctctctcttgattattctttctttttttcttttttgttgcttttggtttaacttctctgactttttttttttgtttatgatattttctctttttaatcaatggaaagtagacaactcattcttagatatttataaataattttatagattgccttttttaagacggcattttaggattatttattgggacgattcacttttcttattagaataattgtaccacatgcaatgaggattaacgatgattatgaaaatagaaataaattgactattacatgtctcttttggaagagtgttttttttttcccgagacattttttgttttatgaactgatttatatgattttatttttatcatttagctagttagggtggaattaatatgtgattatttcatgtattatgtgaatttctaatttatcaaattattcttcttttcatcatatgtaaatatattatttatagtgttatattatatttaccatgtcaaaatattcattcacgtgaatattaaataatgagattgtaaacgtaaagtttaataaacttttgcgctaaattctacctaaaaataaattttgaatacttataaataggtatattcaatttttctgtttaagagaaatggtaaaatattaaagtggagacataatcttagggaattgaaaagtaaaaaaaaagcttacagtttagttttaagatagatctatgattttcaagaaaggttatacaaatgatcagtttggatcaatatactctaccatgtaagattctatgaattataaattacccatttaaccattttaacttatccaaataataaaaaatacttaaatactcagtaatcttaagaaacaggaaaactccttcaattttagtttaagatagatatacatcttttcaagaaaggttacaccaatgatgagtttgaataaaaataatttactctaccttgtaagagaagggtgagtaattatgtgaatatacaaattaataaattgtaaatatgtcttctatcgtagtgcttattgattgttgtaactctttgcaaaatatttatttaagacttttaattatatgaaataatttaaattttagaaaattgtatttcttttttataaatttttatctatacattttcagttaaggttttgtttttctccttaagttttacttttgctctaattttcctatcacaactcttcgttatagatggttgtgtacaaattacaattaagtattttaagaatgcgtatctttatcttaactcttcttaaataaatttttattttataatattttaaaaattgtatatatttattattaattttttgttcgatattttttttataaaattatgtccagtctttttttggtaagtgaccgggagacaattgcctcccgtgatttattaagaaactaaagaaaagttacaaacgaactcgccttagttgagtagacccaagagtatcctccttcaacaaagatgacatcgcatcgggaacaaaatcaaaagaatgaaagcctaaagataacaaaattgtatagtttgctaatccgtccgcaagacaattagcttctctatacacgtaaacaattcggaccaaccagtctttctgtagaaagttgtggcacaaccgcaccaggaatgacagcggatgagagtcactaatccctgttttgaggaaacccactatcgcctctgaatccacctccaactccactcgaggcaccttcttctcccatgcgaaatacaatccgtaatacactccccatagctctgcatgttgagctgagcatcggcctatatttagagaaaagccaccacaccaagctccttcacaatcccgtagtactccgcctgcagaagccagccccggatttccacgagacgccccatctgtgtttactttcacccaacccacacatggaagcacccaaccaatcagccgttcaactctaggttgcgtacttccaaccaaagcgttacccaaatgtgctctatacacttccacaacccactctttaacaaatttcacacggtccctgcatttcgtgttctccccaaatatattactgcatctccacttccacccccaccatattatcaccgcaaaaatggtggaccacggtatatcctcacagctactcctatcacacaagttatcatagagccattcaaacagagatttcgaaaagaacccctgctgcctccttcgcggcacaaatctgacccaaatccccaattgagctggacagtctctaaacacgtgaagcacagattcaactccacctatataaacctgagacacattcgaggcgctaagatgtcttcgatgccgttcctcatctgtcataactatgtccagtttggttatatatactttctgtttatacttatatttatatatatttttcctaaatataactattacttttgattatttgttaaacatgtccatggatttaactcaatctcaataaatgcttcttagtcttgtgtctctttatcataatttgttgttgaataaattttttatttaccattgtaaaaaaaaaactgaaaatttgcgtaaaatcattgtaactcttcttttcttttctttttgactttttgtcaaacgttttcttaatcattataactcttcattcgatatgttttcaattaggatcacatctttcactatgatgttgttctactgctaatatagtctcgttaaatgcttttgagggttacgtccatttaccatattcttcgtaaatgtatcttatattagttatggttaaaaacatattttcaaggttgtctcaatctattagagtcatgtctctgtgtcataaactttgatttcacctttagcagataattttaatcttatgtttttatattttttcatagtattttataatatacatcattttgagttcaaattctttagtaaattttataaaaatttaaaatattttatcgtgcaacaccacctataaaaaacctatagtccaccctttttatcttcttttccttagttattgtatcattaacaaaaactccaaaaaaaaaaacaagaaaatatgtaaaccaaaagccaaacatcagttaaagttacaaattaaagccattcatggtctaaatttctaaaaagagaaccacccgctaacctattatcaagtcaaaaggatagttttccatgaattcatttgtgtggtgcgattttgattcagtagattaattaccatgaaatacatcatatcaatttactaattttataaatattatctttggatagttaccgacgttcaaatctacataatgcaataatgcatgttgtttacaacagcattgtgtaatttttattaataatctaatcattttaaaattttattatttaattaaattaatttaaatataaataaatacttatgaaaaatatctatacaaaaatgtaaaaaaatatatttaaaattatcaactcatctagatctttcttatatttaaaaagttaactttcaattactagatagatacactaagtgagaaaggtaaaataaattatttgctccttatatagtgttttttatttatacaaattgttgttttattagatcccttttattctagatttttcttacttcatttggataatgtgcttaactcagcttagatttattattttattttattttgggttaattgccatacattagttttcttatatattcaattactcttttggttcactgaaacttatgagaaacttttaatccaaaaaaaaaaaaaacttatgagaaacaaaatgaatatttttcttgatcatttctctctccctctgttttaaaatttctcctttcctctgttttgcatgatttttaacctcaaaagctcttacatttcaacaactgttttctaaggccactaatcactcggatttgtgtcaggtgaaatggatagttactggagacttaaaaacttggtgaatgatttgccagttagtacttctttaagccgacaaggatcaatatactcatggacagtagatcagtttcagaccagcttagggttagattgtggatcaatgaacatggatgagttggttaagcatatatcaagtgctgaagaaacacaagaggggtcgcagaggcaaggctcaactactctgcctccaacacttagcaaacaaaatgttggtgaagtttggaaatctatcacagaggaaaaacacaccaataacaatggaggagtaacaaacattactcatcttcagggacaacaaaccttaggggaaatcactcttgaagagtttttcatccgtgctggagcaagaggaggtaataccaatggtggctccattcatgactcatcgtcatcgatttccggtaatccacacactagtttgggtgttcagattcagccaaaagccatggtttctgattttatgaacaatatggttccaaggagtcatgattcttatttgcatcaaaatgtgaatggatctatgtcaacatatcaaccacaacaatctatcatgtctatgccaaatggttattcttatggaaaacaaatccgattctcaaatggttccttgggatctggtaaccaaagtctccaagatacgaagagaagcttggtcccaagtgttgcgacaattccaagtgaagccataacatgttcaccggttaccccatttccaacattaaatgggaaacaaaagattaacggtgagtcttcattactctcaccatctccatacattagtaatggtagtactagtacaagaggtgggaagattaatagtgaaattaccgcggaaaaacaattcgttgacaaaaagcttaggagaaagattaagaaccgagaatccgcagcgagatcacgggctcgaaagcaagtaagaaaatgttatatatatatatatatattatctatccatcttgattgattgtgttttataagtaccaaactgctcatttttgctctctaggctcaaactatggaggttgaagttgaacttgaaaacttaaagaaagattatgaagagctactaaaacaacatgtagagttgcggaaaagacaaatggaaccagtaatctatttattccaatcttatttcctcaaccgtacatcaattaaaaacttgagaaccttgttctaactttttgtatatctaaataatacgtgaagggaatgattagccttcatgaacgaccggagagaaagctgaggagaacgaaatcggacatcaagtgaatcaatgaaacccgagttggaggatgatgatgagtttattttgttcatcatgttttgttttcgtatatttttgaccaaataagctatttattagacatcttattcttaaacccatttgataatgtcctaaagatcgaattctcatggtctaggggaaaatccaaaacttatttttattggagccagaaaatactactattaaatattattattttggctttagaaaacaatgtcatactaatctcaaccataaaactataaaattatattataggctcaataattgctgctaaattttttcactattgattcatttgcaatatacaaaaataactcctataataaatcaaaaaaattcagtgttgattcatttgcaacaaaacacgaaaaatttcactgtcttttgtggttggctttgttcttcctgggacatgggagtgaatttagcaaatcgtggttcctcttaggtcttcgttcatgcctttgattttgctttgtctttttgatatgtaaaaatttacgtttgacagttttcctgtaatttagggattcgcttccttcttttggattaagtttttgggatgtatttattttccgcccgctcttgtaattcaaacttgcatatttccttggtaattgtacttaaataagatgacaaaaaaactaaaagttaaagtaaatcaaactatataatcacttgaaagttataaactaatatccaatttgatttggttttgttttcttcactacctccaattgcaggaacaacatttgtcaatgattgcagtagcaacctgtaataacggttgtctacgagttgattcctttttttttctccaaaacctgtgacgagccctttttcacttttctagtttccaagctacccgctaggctttaatgcttaaatcgagaccaaaacagagcaggctaaaacggattggacttgaaacattgccaggtttaaaacagaccaggtcctcacccaacaagtaggctgtttcaataacggtttatacgataaaaaaatgttacatgcaaaaacttttgcttgtaccaccagagaaagataatatagagaagtgagtggcgatgtaatctctagcatggataacccgatgcacatcctctgcccttccatgagatcattttccggtgatctctgcctctgaatgatctcacaagaagcttaccgtcaacaggcttgcacaaaccgacatcaaccacagttgtggctgttcctcttttggaatctggagatgggtcatccacgtaatagtcgaacaacattgctaagcatctgatttgatgagataggagatagttttcttgatctgaaggaataatcttcaacatatgaaggttcacctgataccgccacgaaaaggttacaaaggcgttatctttggtgtcatcgagtaaagattagtatatgttactgggtttgacacttacttctgcttccattgctcgaagttcattgtaatggtcactttcatttgtcccattttcatttcctgatgaagaagatgcgtggagagacagagaaaacaaaggaggtcgaagaggatactccatgctaatttgtacctgccaatacaactcgatttaacacttaagaaagaaaaagatatagggaagataccgtattagaagatagtgttttagaagttaccattgcttctaacttccacaactttccgccatctgttttcctggagaacacaagcgcaaactctctcgaaccataatccacccatgaattatcagctttctcagggcataactcttccacatgcgcctcagttcttccggttggctcatctatttcactatcatcgtccagaacaagatccaaatcatcttcgtatttcttgaaacttggggactttcctttgctaatcggagaatctagattctttgtcatcaaggccaactgccttgaccgtgcttgattagatactttcgatggggtatgattggaactggttaacgaagcagccgccgtgaccaaagagggaagttctccatcttcccgtatactttcaaaatcttcttttccagaaatagatcttccatctacatcgatttccataggttctggaacttgttccacactgttcagagtcagagagcatgacttactagctgaagattgtatatgtaaccaggaatccaaagcacagagaaccttatgcagtgcccaaggagcatcttcgcagttcaccactggtaactcatgtttcataagcaaatcaagctgttccctgtagccagtagaagtttccaaagtattcagcaaaaataaacatatcaacagaaataattacctatagaagctcttatcacgaagttgacaatgctacagagggattaaattgaccgccaagttattgacaaacccaaactattaaatgtacaaaccatatgctgattatcatggtggtctactaattttctggaattctttgcatcgtgttctttaattaagacggaaaacatacagagtggtgaactcacgcaagagccagatgcgcttttttccgcaagcgtattcttcgcagaactgtttgcactctatgctgctggcgatacaatgaaagatcaggcacaaacgtatcacttttagctgggtcagtgttatgagcttcttggcctaataaaaccggtgaaatatcaattcccgccaaatgttgtacccatttataaggccttgaagttctgttctcatcaaacgtctgaccatcaccaaggatgagcttggttgactgcatggaaaaccggccatataaagagaattgagtatgcatttttaaaagtaaagccatcaaaagtcacatgtagaagaaaactgaaacacagaaacaaaaagttacctgatgaggaggctcaagtccagcgtcatctggaaacaagttacaaaatatgtttttttctggtccatcctgagagccttcagcgccaacacatacaacattcaacttcagcaagtactcaaacttgagaatgacaagtttcaaggattttgtatctggtatctcatcatcatatatgtgaaggacaattttgagagggtggacttgatataatcctgccttgtcagaaccttctttgctagtaagtttcttgggtcgttttcttctcctttgtccatcatcatcgtcatcaggtccatcatcctccaacctagaactctctgtattactcgacatacctgaaaaaccaataccaaattagcattcttttcgttttagtattagaaaacacagtaaattttcaaaacaacttacctgagtcctttctggattgttgtctagcataagcttgagcatccttaagactcccaactacctccaattcaatactctcctcaaaagcttccttttgtgccaagagctgtgagtatagaacataaagcggaggaggaagcagctcagctaaattatgctgcttcagtttctttgtgtgctgtatacccaagtggttctgtactggaagcgatgctttcttcagagacttaaggtgtagaggaagactcgacaaaaacttcttacgctccgcaatggtttctaataaactcttcttctgttgctccaatctcgctcgatgcttacacaattctttcctctgaatcaaaaaacataaaaaggtaatgaaacattatatcacgttgaatgaatttcagagatggtgatgattaaccaacctgatgaagctcaaaattgagtctcttaggcatcaaaacatgagaactatcacttgaaagcgattgatctttgatagcttcaggagcatgacgaaagaagtcttgttcaggaacaaggtcaatatcaggatacttagatttgaaatctctacaagccttgatagctttaacgtaatggctcttctcatacataagattatgcaattgcaatgtcgtgaaatcaacaggtgcctttgctctttccgtctccgctttcactttatcttcctcagtcaaaatcgcccgattcgcctgcgaaaaaaaccctaataagtatcgtatagcgaaagaggtggagggagaagattggtaagtacctgacgaagattgacgaagttgaggaacatttgagtgaggagttctcgaatctcagatttgtggtttccttgttttttcatggagagcatcttcgcgacgatttcttctacggaggttttgctctctcgaagtagctcgagtggagattttcctggctctcggggaggttgtatagtctctatggtagttacttccggcgtcgggaattcgtcggcagttaccattccttcctctatttcgccgtcctccattctcgatttctccagtcaggctcgctccggtacttctgacaggatttatgatttttctcttcttctttttttttgttctttgtttttttgtcaaactatttatgatttttatgtaaactatattttgttacaaatattatatctactccatgatgggatgataattgcgtaaaagagattatgtaacattttttttcagaaaattctgtataaagacaagaaaaaatttggtttgatatcaaaaatattatgtaaaaaacaccaaaaaggaaactacttgataattttggtgaaggaagagagagacatatcagatatgtcgtggtagaacagaggtttgatcaatcaaatagccttctatggtacggaaattttattgagttgtagctaagccttataactagatttaccactttgcggatttggatttgagttaatattctaaaagttatctgtgttttcgtaaagtcctctgtttcagacgtgatttagaccagagtgtattaaacaaattatctcgagtgcacctgcggtcagatcatcactaaactttgaggttagcttcaggacatcttgagggttgagtttcaacggtggagatttgaattggacggttagattgcgattcgtgactcaatatttgagaccaattgtttgggttattttcagattttttccaatttaggttaaaggttggtttgctgttgtagttggatgtatggtgagttgagatattgttggtgagtaggaagttactgctcgttgtgggattgttgtttttggtttcaaaatcattcttgtttcgaggtgggtatgtgaccatgagattatctaagcaattgagattgtgtgatttatttgttgtatgtataggcagtatttttggtaccattattcaatcccccgagatggttgtgtcaatggatgattgttcattggtttgatttatttcatgatttatttgttgattgttatattggtttgcttgtgtgtataactcgcaggtaagagaatcgtttcactaagtatttattgaaatatttatgcatttcttttcttgatgcagataaagataaagtgagacgtagaatcattgcgagaaagaaaggatgatctaaggccaaaataagaaaataacacctacatcaccgaaacgagaccctagaaaagctaaacacatcaacttttcaaaagaatttatgacttcgtcaaaatttaatcaagatgcgagtcaggtaagtcacctaaaagagtaacattgatgtactcattagggaagtgagcaggtaatccaggaatcaacaatgcaacaaccctaaaacaccttaagaaccatccttctctgaactctccacctttccaataaggcatgacgaaactacgtatcaactcccacagtgcattcattatctttggtaaaacccatacgagattaaagtagtttttgtttggttcctcttcctctacctgaacataatacaaattaaacaacaacaatgtagatagatatcatcagtagggtaagtgcgtaagcgacattagacggatgagtgattaaagcaaagaaacaagattgtcatatatatgcaaccaacctttcctttatagaaactgtcatagtaaaggcatgccccaaagtgtttaaacatgagtgttttgtcgtcgaaaggcaacctaggaaccatgtcgttgcaataaacatatctttcatacttcacgtcaaacttctttagtgaatctttcatgaaatttccaaactcctcgtcgcctacgcgtggctgtccaaatgtgtaaactccttctagtctctctagcatttgctcctcatcatgcatcaccaaaacagccgtgaataggatcgctaaagccccacctaggctatgtccggtcaatataaatttagatgtcgggttttggtcgaggatttcttttaagtgacgcctaacagtgtagtatgcatatagagttgttgcgttttgggtttcgtcaaggtttacttctttaggccatccttctttttgaaggcccaaagctttcatgaacccgccatgaatctttcccacattcttaacctcgtacctattttggaaatcaatactagttttattaggggggctaaaggatgaacttaaagagtataaaaacaaaaacctagactgtttgtgtgtggaaataaattataacaaaagaaactaaaattaccaagagagatccaggtctgtacaccaatcatcggcatcgaaaggatcagtgcctctgaaactaacgatgatgaggtttggatctgtacttgtgtcctttataacaatcacctccgttgatctttgtttctggtaacctaaaaaccaaggaagaaaaaataaattaattttttttgtttatataatataaatagaaaaatgaatttgatcttaaaactgtatatgaaaaaaatgaaaaaaaaaactgtatatgaagtattttaggaaaatttaaattctagagaatttgaggttattgtctctaaaaattttaaatattttagcacacatagacaactatttaaaagatacaaacataaaatttctagtcgtaattttatgtttaatttagaggcaaaaaggtaagagaatttaatctttttataaattgatttttaggaaagacaatatataaattgaactaaatataaagttttttggtctatcattgatttgagtattattattggaatcaaattctttttagttaagaaaaataatatattgcacatttcagacagtgttttcacgtggtatttgccttcttcggacccattaagttaattattcatcaataatataaaaaaaaaagggaattagtctcaccattccaacagctgtagaaacctaataagtccatctgtgccacatttaataaaaacatagagattataagtccaacacaattatttcatgatttaataatcaatggaaatcatgcatgatcatgctattagataagttaaataattggacgatggcagctaaatgagattatatatgcattagttgtcgtgtctttatatgtaactaactttaagcgaggaaaatcttctctttttttactttacaaaggaaaacaaaataacaataaaaaaaatgttatttagaaaagaaaaagactctagaattattattttttaatcccaaaattgattgttatcatctatagacattatatatagaagatgatatgtaagttttgctagtacatattattaatttcttaaattccaaattcaaatccgtgtattgtatattattgacaacaaaaagtaaaataatttttcaaacaaaaaagaatcatttttcatttactaggcaaacgaaattatattgactgtgactagtgtgtatagcatagtaaaagtatggagaaaaactagaaattcaatttaacagaagttattttcttcaatatgttacgggaaaggaaaatttctcttttttttcttccagcggatatagagtactgtgttttatatatatgattggtgaagttataataaaatgtcgaagaaattcagtttcttaatctatttttattaccagtcatattcaacaaatttgatccaaaaatgcattttaatgatagaacgtgaatttaaatgagcaaaacaaaactactatcgttttctagcaacatgtaaaagttgtaaacaacaaggaaaagattaaagaataaaaccttccaatggttgtgaagaacggagctgacaaagtttatattctcgtaagacagcttagaagccataattgacaacattgctttgtatcttttacttcctctctctactttcgggtttaactctacccgccggtctaggtttccgtttagtgatgcaaacgtcgctgatgctttttccggccaaataatgtttcctaaaatagttacaaaataatatatttgttaaaagttagggtctacctcacgatattcatacagcggatttcgcacaaaaaaggttataaaattaaggtaatcgcattggtgtcaccaattgagttttattgtaggtcatctctcaaatttggtttcaaaattcaattaattaaaagattatgataaagcagagaaccccatttggagtaacttacaaccttaatgttttgtctagtataattcatagtaaccatcaattatttgtatattatcttcgttgttcccatttgggatttcaaaattaatgaagaaattctaatgtttcgacgttgaattttacctttagtgtaattaaccgaacgtatacccattagctcgaacttgtatacaaaagaaaaaaaatatcttaaaagacaatcttacctttgaaaagatttgggagtatcatcaagaaaccaccattggaagaaagaaggttgagccaacaagcaagagaaaatccaacaaaatagagaggtttcttaaagagaattatgagtttttgaataacgatggatacaaagataatccaccgtcgccggaatctggaaagatcatcctcaatcctctcttccgaagaatggatgaactttctatctccgagatccgatgagaagagaagatgtataagatccgagacggtggcttctctcggatccaacacaaagtagtttttggttctagacatttttgttttttgggttgtggtttaatcgtcaacgttaattaagcttcaaaacgtggaagagttgttttgcaaggtaagtcacgttagctttgtgtacttataatgttaagagtaatataattaatttcatattaagccacgagtctatgcttttgatttgtttattgtataaataaattatgattacgatggtcgtatcaagaaggttggtgtatatccacaagtcaatattattcacacatgcgttgtatggtaggcttgagagttgagacgaatatggtttgacaaatcttcaaggtattaagaacccatattgtcttaattttaattaaaaatttaaaactcgatagagtcgagacatttcactctatatactttcttttttggtttggaatatatatcacgtaaaatccatcaatttaaagcaggttttcaaaattttattattactacagtaaaacacataaaacttcaacctaaataattagaagacacttttataaaaaaaaaaaaaaagtagaacacttgcactttagtaagctatatttaattgtgcggcataactttggcaccaaattttgtaaactccgtttatgaccattatagaagtttgaccacgtgctaaaacgcaaactgatttactaaactccattttaattagtttatgaactttgtcttaattctccacctgtttaatatatacaacaaatgaaatcaaaagaggaaatttgggtttgcgagtaggattatagtgttccgagaaagagtgaaatcgaattcaacttgaagaattatagtatgtgtttatgattttggatgaggtaaaacaaaaaagaaaaacaaaatcaatacaaattctgaaattttagccattgataaaggttgatctatattcacaagccaaacttattctcatcacgagggttatatgattcgaaggatctggtactaaaaacatatattgcctcgatgactagtagtagtacttgggtcgaaatatttcaatacaccttatttcttgaaaaatgttgaaaataccatactttcaccagatattcacggtaaaaggcattcggaatctactacaaactttattcatctttagtttcagacgtgcgtacaaccgcgaagagtcatgaacatgatactttttcttgtgtaacactcaacaaacattagtatataaaatctaaacgataagtaacttagcataatggaatcatcaataaatacatgcatccacatgcaatttcgtttcaaatttggtaacaccgcataatcgcctaatgacataagtcgcagaatgaaaactcgcaaatgaaataagcaactgtcacagctctagagaagattgagattcgtatatcctccaggaccgtttacttaagtcaacatgtgccgtcgataagaatgggacgtcatcaacatttctcttaatgatttgaagactagcctcagtttctttagttttctgcatttgactttggacatgattgagatccgtaaatcctctaggatttgttggttgttgcattggcaaattccaatatgttggtcattgctttggtaatttcggctcttcttagccttgttgtatattggagggctactatttctaggaagactttcaaatagagtttgatttttgatttgttctccttagtatatatgcaaaacatttctaatttagagtaacaaaattgagaaaaatattgtagtccggaatggttgtgatggttaggacagacaaatccatttgtttgaagagattttcgtttaccattcataaactataatccgttactgttttagtccgctttgcccatatctaccattcaaagcgtacgtgtaatcctttgcattcctctacagttctactatttaccataaaatctcttttcttaaagtcccatcatacgagcataacaagttaaacaacacacaacttatttctctcaatctattcattttattcttccaactaaatttttactcaacttgttcaccttattactctgcctcttaagggacaaccatttgcacatatccaacttgattttgtttctccaaaattgcaacatttttgcatcctaaaacttttgtaaccaattagagcaaactaggtaactcaaaacaacatatgggctttcaaagtaagtattctctcaaaatcggctgattcaacttcctgcttctttcaaaggattcataaacttaattgacaatgggtaaaattaaattatccaaacaaatccataaaagaaaaaaacaacatttccctaccaccctttatcttttcccttcaatccaaatctttccatctttcatactcagattataaatacgaacaaattctatcttttttttaaaaaaaattggggacaaacttgcctggctctgcaatggtgtgggggcttgagggtaccttctgtttctttcatttttgattataaaattgaatagttaagaaaaaaaaaaagctctttcgagaaatcatcatgctatcctccgcttcttcgcggtgttcaagcctgtagtcttgcagattgggcaaagattcttctgtttcagccattctttaatgcattggctatggaattcatgcccacattctagtgtccccatgtcttctccttcggtgtattcctcctgcaccaagttttcaccattcatactcggacgaaaaacaatcttataccttttaaatgctatttcagtaactagtatatttttacctgacaaacacagcatggctctgcatcttgtggagattttgtgttgcttttgtattttcgttgctttaaccggtttgatatggtttcctcgtttacaccggtacaaacatctccaatccgctcttctagtgccaacaattcctacagtttatgaaccaaaaggagttagatttagtgatttaacgtgactcagacaaagatttatggttcactatggtttttaatttacctcatatgacatgttgtccacatcaagtcgcatgtctctataccggtcatgaccagtagccccatcaaatagtactgagtgatttagaagcataacgtcctggaaaacaagcatccagattatttatgttccagttattaggctagttcatctagaaatcaacagagacagacacaagacaagttcgaatttagataacttcgctacaatcaggaaaaactaacctcaagccgcaagttgttattattagcatccctacgcatgacatccaagacattctgcatctgtcggaaagagaaacgtattgttagttctatttgagtgactgctgaagaacaaacaaatggtatttatgcgcaactgaatgagccaaagttaacaaattccatccacgttaaaggctacatgccaatagaatttgtatcgactgacctgggacaccataagtctgcttcttcctctgcttgcagctgccaaggcccgcaaaggatgaggaataccaaccacactatccccttgcctatcaaacaacggacctgctctcgagtaagcccgattatgcatctgactattatcaccaccaggctgaagcacaagcccatccgaagaggcaggaggggccaacgaacgaagtgttggatgatcaccagatctctggtttgtagcatctgctgcaagggaagaaagcaaggacctacgtgcaagttcagacctttcagtccttcttctttgataatgtggtgaattctggtaagaagtccacgctagattagaagatggtggtggtggtggtggaacacttgttgttgagcctgtcctggacactgatgatgcactattcaggtttccatttgttacatttctgctactctgactacgggcaaaatttcctacctcaggagctgcaaacatgggaatctcaagagtattcccgggtatgcttcttgacctggtttcatctagatgaagatttctctcaacgggcgcagtagagttcgatgttccacccactagtgagctcccagtccaccgaaatggtggtagcatagtccttgaaccaggtggtatgctcacaggagtagaatttgggttacgagaaacgacaaaagactgtccaggtctcaagtccaatgaatgctgatctgctggtaagtgtcttgacaagttcaactgggatggagggacaggccgcctgacaacagttcccgcagcaaaggtagatgggtttacagtttcttgatgatctgagggattactcctgacgcatatatttctactggagctctctgcaatggcagaaacaggaaaatttggtgcagaaacaggaaaatttggtacagtaccggagaccattcctcttggtccattgtcaagggagccagatatgtttaaaccatttcctggcctaaaaaccgtagaacctggggtccacgaactgctttctccacgctggaaatcatgataacctcctgaagaagattgactaatactgccttcaagagcttttcttttgcaggatgcacgacgtccctctacagaagaacctgttccaacaccgttctcttcaaaagatctgccaggttgtgagaccctggtccctggtccattagcttctatgaagccagaccgacctctatatggattaatatcctcgtgaatttctatatactctgcattcagattgacattctgaacaggttgatttgtgcctgatggctgcgcaaacactgggtctaaatcaattatttcatttcctcgtccgtcaaagcatcttgtttccattcgttgctcattgtgactggaagcttcatccttcgtgccactagagctagcctcaccaaggctaaatctgcgtaaaccctgttgctcgtgataaactgagtttgcaagcgaagtatttgattcagaatttgcaatcatgtaatcctgcaagtcattatcaccaagactgtgaatattctcccaatgatctatcacaccattacttgaagaagaaccatgctcaaagttcaaggcctctgataaatagccaagactggccctctccccctgcatcttggctaagcttttaaccacagttacactcaggagaagagaactcacgagactaccctgccctcaacaatgtgcctaatggggagactgcaaaacaacaaagacagtagatctttcagtaacaaagacaaggaaaaggcttctacacgatgtcaactgtaataagaaacatataaacacactcaatcaaaacatagctcctacaattgtaataataaatggcaccctgagattgcatatacagtcatataatctgcttcacctagaagagcacaaggtgcaaaagtcactcaaagcaagaccgctgcaactactactaaatgcaacttacttctagatgcgacgcctaactaaaacacaaatgattcagtaggaaactaatgacacatgagttattaacaagcttaaaaaataagaggacagatgcgatagaaaattcatatgatcaaccattctaaacacaaaagaacttcaagtctaaattatcaaattgacacctaactgccaacttcgaaacaaagcgtcaatgaaaatgaggtacaaacaaaatccaggaccacgtaacaagcatgccaattttgaaacaaggaaaagagtgaaaaacattttactcaactaccaccacaatggcaattcagaaaaacaagagaaatatcaaaataagcactgcctcatcaatgacatatcaactacccatagatgcaacagcgtatgaagtttcacaaatcctcaataccaagcaaagatgtattgaaacagcaaggtaaaagcaaagacaaaagaaacccacagcttgaagataaagcatcatcacaataaaaaacaattcaaaaacctcaaagaatcaaactttctcataaaacaagctcatagaagtaaagatccgattcaaacatctaaaacccaataacaaaaaataatttttttaccttctgatgaataataaattcaccacaacaacaattctacagaatttgacacaaaatttcaaaaaaaaaactatttttcaaaaaacccaccaaccgattcttatctatttcgatcgagctttgaaaacccaatagaacccagaaaagacacaaaaatcaaaatcaaaaccaaaaccaaacagatacagaacataaatcgatctaagaacaataaaaatcaaaactttatgaagattcttaatgaaaacgaaagagactcaccgattgttgaagagagaaacctaccgctttgtggtggaggagaaggaagaaggagaagaagagagaatgaggaaaaaggaaggaagcaaagcacaacaacacaaatgggaacagaaaagaggattattaggacgagacggcaatgtgtaatttaccatataacccaaaataaaaactaatattttaaggaaattgaatcaaaaagttaaaaagggtcagtcataagaacagtttccaaagactgaattgaattgctaaatgcctaaatcaacgaataaacaaaaactaataattcaatgtgtaaagatttttaattaattacagttacacgtaatgtgtaatgttgaagaagaaagcaagttggcttaagaagaaagagttaataggatttttcttttgggtcattcattagtcattacttaagcaaattgtcccaaccaaaagtttctcagcctttgcctcttccatacacacgtccctcgtttgttttacttttatttgttcatactgaactaaaccggaacttaaccgagcagaacaaatccggtttcttttcgaactttttgtttcctagttgtcatgtaactttggtctactttctccttctgtttatcttttttatttttattgtttattttcttccattagcttagattccccatttaaatatatgtacaaaaaaaaagagtatacgtgtggatcagaatcactagttacctaaatttggtactggcaagatttatcaatttatgaatggtctttctttatcctatatacaaaagaaagaaaaaatctaaaaatattttttatttgagtgcatcatgttaaaaaatatttttattaataatatttacttctagttaattggtcaatattggttttattgtttgcaatcaatgcgtgaactgtaataaaaaagagagtatatgtgtgcagatttattaacttatgaatggttttatcctatcctatatatataaaagaaaggaaaaaaacgaaaaaggtttttttagggttaacaaaaagtctatgtgtaatatttacttctaaattttggtcaatattttattattagcaatcaatttctttattattttctgaactgtaaataataaggttcatccccttaaataaattttatcttcttgaaacgtttttttaagaagaaatttcattctattcatacataatatttttatattttaagaaaaatcattttaaatttaatgttttgtttaaattttataaaatccaaatatggttgcacattttaactttgatatatggaaattaaagtaatttcatatacccctgaaagcataatttaattttaatttttgaaaagtatttgaatattaaaatttgttttgggatgtgaaatgtttttgaaggcatatgttgatttcattgtgaaaatcaaagtgtctttgtttaattagtgaaaccacacacatgattataaccatcttactttgagagattcgaagaagagagaatttctatataatgttgtaattgatcatgatttaaatgagtttttatatacattttaaaatgatttggtttagagggttacttctctaatttttagagagagaattgaattactcaatatggtagagaaaattttggtcaagagtgaaatttttatatctaagttcgaccatctttggaaaaaaaacacatttgtctgaaaagtgtgttagttgggttttggctaaattctaactggtttacatggtagttagaaatgcaggcggtctgattatccatgaaattcggaaaacactccaaacttgggacaaactttatggtggtctttcggagagaagtctactataaaacaggtgcaattctaccgaccagatcagctgatagggtttatcaaaaaaaaaattaattttaaaactttataaaagctacttgtctacaattcttgataaaagatgaagcattggataagctgctaatcaaagctcaccagtaaaaaatgatcatagacaaaaaaaagtggatggaacatctgaagcacatgcactagaagtagcaaatgaatctttcggattatgcgcatgagcttattctttggatctagctattatatagctcattggatatcaatggccataacgaaatagtaaatcacattggtggtccaatagtagcaagttaaagttcaaaaagaaggaggacggaaaaattttcacaaacctgcatggaaaatttattgatcttctcctctttgttaacaatggaacccatgttacgactcatatgccatgattctttggatctggttgtggtagagcttatcattgtatatttcatctgtggtttcagaatatggttggtagttgaattagatgttaacgaaccacatgcattttaccttgacggaatttgataaatcactttctcataggggctaacatttttatatctgagtcaatcatatggcataagttggcttgcacaacaaggtgtattagttactccaagtaatatactatgaccaaaccacgccaacaaacctcgtcctccgccaaactagagccacaaatacatcgatgggaaccataccgccgtcgacggaggggagtacctactcactcatgaaacttctttaagaaatcttgacatgcgatgaaaatcaaagagaaccaaagaaactagacctaaaaaacttcttcaagcgagagaaaaaactcaaaatttgatctaatgattgtctccaccataatactgtttaagcctttaaattttaagctttaatattctttgaccgtttatcatcaattataactaataagtaataactaatgctcatacaatcgttgtaagtcaatcacattctctcttatcgcttccaagcttaacctttgacataattctatgaaacagaggtattagctctcaaattttgaggctcattttatgtagatttgttagtgttttttttttaatgaattttctaggctctataattaaccaaagttttcataattagtaaaatagaccccaaattaacaaaatatccaaaattagccaaaaaaaacataattagcaaaaagtcccaaaattaagaaaaaacagtaaataaaaattatgaatctcccataattaacaaaataattaataaaagtaaagtttacttttaaaaaaggcccaatttttttttcctattcagcctggattttataagaccggctacgatcgcttctattcaccttcattgtaaaccgataaaacaatcatatatatatatatatatatataattttggcacaacaatcatatattaaaccgatagttttttttttggtgtgtttgagatgggtatcaattgttatcttaaaaggaacctagaagtaaatttcgtgacctttacacaccacacatgttgacgtagatacgcccaaacgcatgtggtgttgtatcaagacacaaagtcacaaactgtctaaaaagtcaaaacccaatccaaaaccatcatcatgttttcggcttctttaaaatcccggtttagggttctttcgtagcaacatagagtagacggtcctgactcgtgctctgcctctttaatttccggtttagtactctttcgtagtaagtagaaactctatccatatagacccaaagaagggccactcttctattctcaaaggactcggtaaaaaaacaaatgcgaacgagacaacaaaaacaagtaagaacactctacgcgctccctccaatgcgcgtaaaccccacgtgagactgatatccaaagacaagtgagttaaacgctctgtttaagcgcgtgcgttcagacacaaagtggataatcatggggaaactgtctaaccctaaagaaaaaaaagagaaagatttctaattttttttaatagctaaccaaaagagatggagaatgctaaaatacgctagatatgaaatagtagcttaacctacgccgtattttagtcgttcctctcttttaaacctacgttcctcgtcaccgtaatcgctctcgctctctctcttcttcgtcgcttcatctttctctctctctttgtaacttcgaaaccgatcaaatccatggctaactcttccgctggctccgccgcagaccaccgcaacaaacacctctccgtcaatccaccgcaccagatcttcaaaggtattttaatcgcttcttttttcttcttcctcttctctcccgatgatttaggattgtgttttgagtctctctcattacagagactcgaacacaatcctaatttttcagtgtgattgtagctcatctctttcccggtgcttaatcggagattgaattagcgttaacagaatttatattataagtctctaattagggtttttggtgtctttagatcgttttcgataacattaccagttttcagctcttggggttttgattttggtactgaatttgttatttttaatatttggtattgttaaagcattgatttttaatggttccatgagctatgtgtgttatcaatttgtttgttgtttagtgttgttgtagatccattagatgtgtattgtttaaatctttgatgtgagacgtattggtacttcattgtatcccttgtagagacctaaagctgattcttttactgtgtatttgctaaaggattagagtgacattttggccttgtgtgtgcagatatccaaggttctgacaatgcgattcctctttcaccacagtggcttctctccaaaccaggggagaacaagactgggatgggaactggggtatgtttctattgtttgtgtatgcgtgcagtttgtttttgatttcttaacatgtgagctggtttaatgttttacaggatcctaatcagtatggaaaccattcggatgttgtgagaacaacagggaatggggaggagacactggataatctgaagaaaaaagatgttttccggccatccttgcttgatgcagaaagtggtcgtcgtgatcgttggcgtgatgaggaaagggacaccttgtcctcagtccgaaatgaccgctggcggaatggcgacaaagactctggtgataataagaaggttgaccggtgggataatgtggctcctaaatttggggaacaacgacgtggtccgaatgaccggtggactgattcaggaaacaaggatgctgcgccagagcagaggcgtgagagcaagtggaactctcgctggggtcctgatgacaaggaagctgagattccgcgtaataagtgggatgaacctggtaaggacggtgaaatcattcgtgagaagggtccatctcttcctactagcgatggagaccattaccggccctggagaccctctcaaggtcgaggaagaggagaagctcttcacaaccaatcaacaccaaacaaacaggttacttccttctcccacagcagggggcgtggagagaacactgctatcttttcagctggacgtggaaggatgagtcctggtggaagcatttttactagcgcaccaaaccagtctcatccccctggatctgcctctgacaagggggaaagtggtcctggagaacctccccatctgagatatagcagaatgaaactgttggatgtgtacaggatggctgacacagagtgttatgaaaagtttccggatgggtttattgaggtgccttccctaacgtctgaggagccaacggatcctctggctctttgtgctccaagttccgatgaagtggtttgtagtcataatttagttgatgtttttctttttcctctggtatctcagttctgatccttatacccacttttactcacagaatgttctggatgcgattgagaaaggaaaaatagtgagcagtggtgcccctcagacgtccaaggatggccctactggacgaaatccggtcgagttttcacaacctagacggatcaggcctggtaagaattctgtaaaagacatccaggcttctagtcttttgtgtttatgaaataaatggtaaattttgtgaataccttgttgcagctggaagcagagaagatatgacattcggtgctgaggagtctaaagatgaaagtggagaaacaaggaactatccagatgataagtttaggcctgaaggtatgtgttgacagattgtggccttcatgcagctttgttgactcatgttggtgctgttaggaatagctgatattggaaccaagtgcatgtccatttctatggttaacgaaattaactcatatcagttaatatctttgagcagtgttgtcaaagctgaaaatgctaagatttgttctgagtgatatgcgagttctttctgtccctatttgcctctcacaatatggtttctgtcattttacagcttctcatgaaggttatgcaccttttaggagaggcaatgaggcacctgtcagagaactgaaagaacccagtatgcagggaaatgctcatgttcaatctgcctctccatggcgtcagtcttctgggggagaaaggtcgaataggaactcacatgattggaatgacccttcagctgatagcaggctgaaatcttctgacagtgtttggtcgcatcctaaagattcaataaatcatttaggtggcaataatatgatgttgccgcagtcgaaaggtgaatcaagatggcaaatcagtgaagatccttcacttagaaggcagccatctctggtgttcgacagggagcaggaagttagaaagcttctcccatcttcgcctgaagaactttcactctattataaagatcctcagggtctaattcaaggccctttttctggatctgatatcattggatggtttgaggctgggtattttggcatagatttgctagttcgtcttgcaagtgcaccaaatgattctcctttttcattacttggtgatgtaatgccacatttacgggctaagtcgggtccaccacctggttttactggtgccaagcaaaacgaatttgttgatgcagctggtacatcagccttccctggtgtggggaaagttcattctgggatgggtgagactgatatgttgcaaaatgatatgaggtataagcatgttgcaggaactgtagcggagaaccggtttattgaatcattgatgtctgggggtctgaccaattcagctcaaggtagtcctagcgttagccatttggtgtgtgtgttgtaagaatatctattgttatcctcactttctctgtttttttgttgtgtctgcaggtgttcaaggatatggagtaaatagttctggtgggttgtctttaccagttactgatggtggggctgatatgtatctcctggccaagaaattggaacttgagcggcagagatcaatacctagtccgtattcatattggcctggtcgggaatctgcaaacctgatgccaggatcagagaatgtgtcagaaaatgctcaacaacctacccgttctccaagttctgatttgttgtccatcctccaaggtgtaacggataggtcttctcctgctgttagtggtcctcttcctgcttggtctcaacccattcaaaaggaaagtgatttgcaccatgctaaaactttccaaacgcaaattccctttggggtccaacagcagagactgccagagcagaatttacctttgtcaggtttacttggtcaacctatggaaaataatccaggtggcatgttatctcctgatatgatgctcgctgctggactctctcaagagcatcaatcgctcaatctgttgcagcagcaacagctcttgttgcagttgaatgctcagacaccactttctgcccaacatcagcgtctattggtggaaaagatgctcttgcttaaacaccaacataaacaagaagagcagcagcaattgttacgacagcaacagcagctgtattctcaggtttttgctgatcaacagcgttctcagcaacggtttggagacccatcttatggtcagttgcaggcgtctcttgatgcgcttaggctgcaaccatcaaaagatatgtcacaagtcaatcagcaggtgcaggttcctgtttcccatgaggagcgaggcatcaacttagctgatttgctcccagtaacccatgccactaatcagactgttgcttctttcgaaaccccctctctgcacctgcaaaaccagctatttggtaatgttgaccctaggatggttctgcctgatcaaattgatgatacccataaaaaagagtcgaaatcagaatatgaaagaacagtttctgcagactatgtgaacagcttgtactcagaaaagcctgtcctttcccctggctatcatgctacacataatgtggaagaacctgtgagctatccaaacaatgaaagctccactgctactatgacagctcccgaaatagttgaaagtaagttgctggaggagcagtctaaggacatgtatgctggaaagggagaggtcagtattgagttatctggggagactcctgcaactgaagttaaaaacaatgacgtttctgtagcacggaagacttctgagaagaagtccaggaagcagcgggctaagcaggctgctgacctggctaagtcaacttctagagctcctctgcaggagacaaagaaacctcaaccaggaagtgctgatgattctgagataaagggtaaaactaaaaagtcggctgacactttgatagacaatgatactcacctcattaaaagctccacagccacagcttcaaacacttcccaaatgagttctgaagtagattcagtcaggggagaagagtcttcactgcaaaacacacgaacacaaccaggacgagcttggaagcctgctcctggctttaagccgaagtcattactggaaattcaaatggaagaacagagggtagcgcaagcagaagctttagctccaaagatttcttctaccgtgaattcagtgggttcggcggctccttgggctggaattgttaccaattcagattctaacatactaagggagactcatggagagtcagctattactcaaaccggtgttgtaaagcctgaaagtgttcctactcttaaggctaagaaaagccacttgcatgacttgctggctgatgatgtttttgccaaatccagtgacaaagagagggaagtaatggaaatcatctctaacaatgatgcatttatgcaagtcacgaccactaatgcagagtctttcgacgatgataactttattgacgctagggaaacaaaaaagagccgtaagaaatctgcgagggcaaaaacttctggtgcaaaaattgctgcacatgttcctgctgtagatacatccctccaaacaaactctgttgagaagggaaaaagttctcgtattctgcagcagcaggagaaggaagttttgccggctattccttctgggccttctctgggagattttgttctctggaaaggagagtctgtaaacaatcctccaccggctgctgcatggtcttctggtcccaaaaaatctacaaaacctagctcgcttagggacatcgtgaaggagcaggagaagatgacgacctcatctcatccaccccctagtccagtacctaccacccagaaagctattccacctcaggctcatcagggcggtgcttcctggtcgcgttctgcatcttcaccatcgcaggctgtttctcaatcttcctctcagtcaaaatccaaaggagatgatgaccttttctggggtccagttgagcaatcaacccaggacacaaaacagtatgaacccatctcttgttcctcgagtttgcattttatggtcgccttatattttttgaaagaatcgactaactgagagttcttttgagcaggggagactttccacatcttacaagtcaaaacagttggggaaccaaaaacactcctggaaaagttaatgcaggaacttcactgaatcgacagaaatcagtttcaatgggatctgcggatcgggttttgtcttcacctgttgtcactcaggcgtcacacaaagggaaaaaagaggcagtaacaaaactcacaggtttgctttttactgaagatcgctctgtctgtccgaaactattggcttgattttctcatgtgtctgtggttttccagaggcgaatggcttcagagattggtgcaaaagcgaatgtctcagacttcttggttccgaaggtaaaaagttcatattacactgtagttttcatattaaaaagtttatctcattttcaatgagctctaggtggctaccctaagcactctatttaattttcttataacctagttaggacagattgaagaacatacaggacgagaacatcctctttcatttcgttcaaacattttattatgtttttgatatctatcatgtgtatctattttgccagatacaagtgtcttggaattttgtctgaagctatcccgatcagaagctgaaactcttctgatagaaaatctggggtctcgtgaccctgaccacaagttcatcgacaaatttctcaactacaaagacctgttaccatcagaagtagttgagattgcatttcaatcaaagggctcgggagtcgggacccgaaacaacacaggtgaagactattactataacactacagctgcaaatgacgggttctcgaaagttggaggaaagaaaaaggcgaagaaagggaagaaggttagcttgagcgcatcggttctgggatttaatgtggttagtaaccggatcatgatgggagagattcagacaattgaggactgagaggaagaagttggatacgtttatacacttttgggcttcagttttcattgtacatttggtttttaggacaaatcttggtcttcttaattttatgggatggaacttgttttatctcactaggaagttttgttagactactttcaagcgagatgaggttttttcatgttcctcttcccttttagtcgaaacccaaaagagatgttggatcatgtttgttgttttatgtattagacacttttttgttcacccaaatattccattttggttttctttttccttctctttcttttaatgaaattgggattcggtttaaggtcaatcgtagcaatttagaaatccctatttgaacagcaaactgtagtttcgtattgtttcaatttaacgatgagaaccacacagatgacaacgtgatacatggtttgtataatgggattttgattcgacataccctcatacggtgtagcgtttaaagaattaaccataccgtcacactgtttgggctatagcagttcaaaccgacatgaatgaatacatggcgggtgtggtaggaggcaagtgggtgtccaatcttgtgttccaataattaaaaggaagatcctgcccctaagcgaattgatcatattctatttaacgaacagtgggatagtcttcccggatgcttactcggaatttggggagcttgcccagtctgatcatactcgtttgttcacggttccaaatatggacttgcggtcaacgaacagtttaaattgtactaaagtgaaaatatatgagtttgtgtgaagaaaacagtaataacagaaaatatcaattttttggctcaaaaatcaaaatagtaaaagcattccatatttgaagcacttttggaaattgagacacaatgtttccacaagtcatcactcttcttcaagtattctgtttcgtgggcaattaacatgggtttatctgcaatatatttaataagcgtatcgtgacacacttttccttctttgacgagatccttgcaacaaggatcaggcatggttccattttcaaagacagcagcgattatatccaaagcacacttaggagtgattttaacaagacaagtattccataataatgttgcttcagcttcttcgactgagaaagccggaacaaacgcacacaccaaagctaaaacaatgaacaatgtagtaatctgagtgttaaatttagacatatctacttatggttgaaatatacaagaaatattcttattttactaaagaaatcgtaagaaagaatgattagtatttgttatttaaaaaatgacgtaatctaacttttatataggaaatcaaaatcacaacgtaacttctcaaaaaaaaacaaaaaaagttgacgttatatttaatggcaattaaattttccacaaataaatatactaccaaacttaaacttaatagtttctatcaacgtttcaaaattaaaccaaaaaaactttaatacatgtaacaatatccaattcaatataagaaaccaatggttaatttttttttattttgatatctaacaccaaatagtttttttttgttaaagggtttctaacaccaaatagtcaatgggtataaggttcaaattgacatattttatggtattcagccaaataaattgaaattccaaactatttttaagtatgaaataaatttattttttaaaatataagaagcctaactcacattgtatctaaaacatattatttatttttaaaaaatctttttttttctaacaataatcttaattaaaaagactaataaatgttagtaaaaatgtattggacatacaactaattgaaaggatttcaaagtttctctagactaatatgaggttcacaagagcaaatagataaatttagaatatcaagtatagttttgctataagatttatgttaaagatacaactatcacacctagacaaaatttaaaagcatatcatttgaaattgcatatgagctaaaacttatagtaaatatataccgatcaatagaattaaagaaaaaatgctttaaatttatatattaacgaaggattcaagttgtttacgtaaaaaaagaagaaggattcaagttaaatggtaaagacacatatagatatctaactagttttatcactaatcattagatatgatttgatactaactaagatacgtgtgaactaactgatccataagaaaatacaatttttgctaaatttttaaaattagaggatttaatagatattatctttaaatttgtctcacccttcaatttttcaattttgcattgaaattcgaattaaaattttgtaaatatgcttgcttatttgtgtgagctattggtctaaggtcattaaattatagtataatgataaagattgtaaattaatctttcctgaatttttaaaatgaagatctataaatgctttgaaaaaaagttaaactttgttgaattatgaacaacatactactctaattagaaagcaaatacaaaaaataaattccctaaaaataatatttagagctcctcttaataattaagtattgaaatattctttcactattcataagaaactatgttttaagttcaaatagaaaatcacaaatttatgttatattttttgagaacaaaattcgttttggatgaaattgtagtaaagtgaaaatatataagtttgtgtgaagaaatcagtaataacagaaaatatcaatttattggctcaaaatagtaaaagcattccatatttgaagcacttttggaaattgagacacaatgtttccacaagtcatcactcttcttcaagtattctctttcgtgggcaattaacatgggtttatctgcaatatatttaataagcgtatcgtgacacatttttccttctttgacgagatccttgcaacaagggtcaggcatggttccattttcaaacacagcagcgattatatccaaagcacacttaggagtgattttaacaaaacaagtattccataataatgttgcttcagcttcttcgactgagaaagccggaacaaacgcacacaccaaagctaaaacaatgaacaatgtagtaatctgagtgttaaatttagacatatctacttatggttgaaatatacaagaaatattcttattttactaaagaaatcgtaagaaagaatgattagtatttgttatttaaaaaatggggtaatctaacttttatataggaaatcaaaatcacaacgtaacttctaaaaaaaccaaaaaagattaacgttatatttaatggcaattaaaattttgacaaataaatatactaccaaacttaaatttaatagtttctattaacgttgcaaaattaaacaaaaaaaaaccctaaatacatgtaacaatatccaattcaatagatagaagaaagcaatggttaacttttttatattttgatatctaacaccaaatagttaatgggtataaggttcaaattgacatattttatggtattcagccaaataaattttaatttcaaactattttaagtataaaataaatttatttttaaaaatataagaaacataactcacattgtatctaaaacgtattatttatttttaaaaactttttttctaataataattttaatcgaaagactaataaatgttagtaaaaatgtattcgagatttaacttattgaaaggatttcaaagtttctctagactaaatttaaaaatattaagtataaggttcacaagagcaaataaataaatttaaaatattaaatatagttttgctataaatctgttgagaatataactatcaaataacatattatttgaacttgcacatgagctcaaacttatagcaaatatataccgatcaatagaattaagatcaaatctttgatgaaaagatcgaacttttgatgattccatcaggactccaattcgcaaaagtgctacttcgcacacgtgccaactcgcacaagtgccacttcacacacgtgccaactcgcacatgcgaacgaagaacacgcaacggagaataataaacaccgtcagcttttatcgtcatttttcgccgctctcaccgaacctctgctttctctctctctctctctctctctctctctctctctctctctctctctctctatctctactgtgcgaaaatggcgatgaaggcttctatcaaaggcaagtacgatactgacaaaaccagtggaatcggttcacttgctttcaacgccggcgatattaagctacgcgccaccatgaccgatgctactctcgtcgccggtcctactttgaccggtctcgctctcgctgtagagaagcctggttccttcatcgtcgagtacaacgtccctaaaaaggtcagaacaactcttttgatttgagtcaaagcaaacaaatcttagaaatttttcaattcccatggaaatgagattgattgcttacgattaaacctaggattcaagtcaaagcaaacaaacctagaaattacgcagctaatgcttgaattgaagtaggatttaggattctggagtttagggtttttagattctccacaagtttaaagagatttgcaggcagacatttaagaatctatgtgcttaactatgttggtgattttggtttacaggatgttaggtttcagttcatgaacacagtaagaattgcagagaagcctttgaatttgacttacattcatagcagagctgataacagaacaattgtcgatgggagccttgtgattgattctgcaaacaaactctctgctaaccacatggttgggacaaacaactgtaagattaagtatacctatgctcatggagggttagctacgttcgagccgtgttatgacttggcgaaaaatacatgggattttgcggtttctcgaagattttatagtggtgataatgtgagggcaacttatcagacgtctagtaagttgttgggtatggaatggtcaaggaacaacaaagcaagtggattcaaggtaagaaagaacattttcagtcgaaagttcatatcgtttactatattttgatgacaatcttagttctttaaagttaaacggtgatatcagtgacttaaacctggtagaaatagaattgatttgatagatgaaactgctacctacatgggatgcatagcttcttgacaataaggcatcatctttgggttaggatagttcatgtattctttgctgcatcataatcagtaattttagattgttctgtgtattggcaatcatatttagacattggatttgctttcttttgagcaacaactatgtcgtgaagaagctttaccgctttacgaactttagaaattccatgtgttttggtcgttgatgggctttattttcttgtttcaacaggtatgtgcgtctgtgaatcttgcggatgaactgaaaacgccgaaattgaccgcagaaactacatggaaccttgaaatgtagtctcttctttacactacttagctaagtttcacttcaattgtttggtgttgcaacacattttactagtcggttcttgcgaatcttccgaaattttgttgcaacagtttctcattattattactagcagtttcgtctgttatcattgatcatttcttaaattcgcataagttttgatcgttcaagaataaaaattaaacaacgaatgggaaaatgttatatgtaactactagtttcatctgagaaatcatgaggggaaaatgttgtggctgggacttcgtgcaatcccgagagttcagacagtgttggaagtggaacttgaagctatgagatgggcagctctttcaatgtcaagatttaactataagaaagtcatctttgaatcagattcccaacatctagtgtctctgttaggggatgatactgattatccaaatttggccccaagaattcaggacattagacatatattccaacaatttgaggaggtgaaggtgatgcatataaagcgtgaaggaaacagtgtggcagatagaattgctagggaatctctttctttattgaattatgatcctaaaatgtattctaaaggtgccggcttggataaaagattgtgtgtattcagactctgtgtaatcaccgtttggtaaatgagaagttgttgttgagccaaaaaaaaaaaaaaaactactagtttcatcattctcttgcacaagaaaggttcatctatgcataaaataatttgttctgaggtaaaaatgtaccctgaacctcttttcaactttcttaaaaatcctcattcaatgcctaatcttttcctctctgaatcaattaacctaaagacatagacatgaatttgcaagaaagtaaataaggtgaaaatgactgtccccaaaacacagcaatttggcaaaaactttggcatgagactcgatccgttgctcggctaatacaaattaatcatcatgaggcgatctcacggcttgggagtcaatcagacaggaacagacatgcctttcttggccatcccatccagaatgtcattgagagcttggcataatcccgatatctgcacagattccacttttcagtcatattccacgccaataaaacaaacaatcatatatagttgctctaaagagacaaagagtgggagggagagatagaaaacctgttgatcccattgttgtagttcctccacgtcatcctcaaaatgaatcacagcctcctcctgaacagtaacataaaatattaaaacacgtctaggaacctccttctagaaaatcaacactaacgagaattctcttcagggctcttacatagctcaaccaacaaagtattttttattgcttacctgatctatggaacccctcattcggtcttgcccaatcatattagctgctatcttctccgcttttcttggatcaatcgccaacagagttcccaattcatcaaacctaggatataaaatagttgagaaaatcaaacaagtctagacacacaaagaagatactaattcgacatctcataccttatgtttgtgtagagtttgcttgcactaagaaggttatgctcaatcatagcacggtcaagaacagtggatttgtcaggcaaagatgctttctgttgaaatcaacagtgtaataacttgttatgaacctacttaccaactcagatgttatccaaaaactacatctaaatcttaattcacagtccatacctgatgtggccttagttcttctgaaaaggcatcaatctctggtctccttaaaatcctttccagatacacctataaagttgcattaaaaaacaaaaagttaccatgcatttctaaccaagcctctataagctatggtgaacttgtttgatttgataatgaatcaaatctaataaacatcatgccggcttaaacaagagtaatatgtgagttcaaacaatactatatgtccaatagcatgaaaatgtatgtttgtctactagaggaaacagttgtaggtaataagagatagaaccttctgcaggataggataaatcttcagcttggagcaacgctcatcctgttaatagaaagatattgagaaataaaaaacaataaataagcaagcaggaaagtattctatttgtaatccaaaagggaattactttgtataaagttgcaagaacacgagaacgctgaggaccagctccagctaatatggtacatgtgacagcagctgatagggcctgctctaaagcattctcatcaatctctctgaaaagattagaaaacacattataaccgtttcagaatatgagatatcacaaaggtattggagagagaaaagaggaacactattcaatcacagagaggggaaaagtaggaaactagctttaaatacagagtctccaaagatggatagaagattaattaatcattattccatccgaacaagaaaccaacagaggagaatttgaagaaaagatgtagcagaaagataagtcagttcacttactcatcccctatttggcgttgctcaatctgagatatgccgtaataccgaagtgcagcctctaaaaactttcttttcatgtccaaaattctagcatagcagacctgaaacagaaatatattaaaacttgaaaacgaatgctccttaatcacccagcacataaattcttagtttactttaaggtggtccaaccttgtactgcaaattcaaaacttcattctgactattgctcactaagaaagaagctttatttataaaagcctctgcatttacagcatcatcatcctgaaaatttcaaaacacaaaagtattagagaacaataaaaatttaactaaatgtatttatacaactctgctagcctcaatttactctcacaagcaataaataaaaaagtgatgtagtgaagcagaataatgctcttaacagtcgatattcctaatttcatgacacttagatttggtcaagagacttaactttaaataaaatctctctagaaaaatgtccaaatatttgaagattgaatcaacattcaacaacgggtttcttttgtgcttttaagatctaacttctgtaactgattgacacgcacccacagaaggaaacaagacaaactagctataaatcattactgcgatgcgtaaattcatctcataaacagagataaccgatttacatgcttaaaaattaatgaaaaggacacagaatctattgtgcatatgtacatgaaagggaaagacaaacctcgagatacaaacgagcaatttggatacactttgaaagcttgaagttgtcgtcaacggccctaataaagaattccgcaaatccaaaataagcaacacaaaagaacatagagaggaaactaaaacaaaattctgctcaatgccacacacctcattccagaatccagatcaattccactcaacatctgtgctgcttttgaccattcctgctctgattcatacaaacccgcaagtttttctctgataacaagtgcctgcaaatacaccacaaacagtttcatctcttagaataaagagattgaaaaacaacacaacgtacattgtctcagttatcccaaaatacagcatccttagtaaacaaatatctcaaattagctttcagtgtagatttcacataccaaagcggtacaatagcaaagcgactctacatacctctcaacttatgttaagtaggtaaactaattagggtttaaaaagtacacgattgctgctaaacagtaaggtatcacgaagagaaaacaaacctgttcctcaaaggaaacaactctaggctgaatctgggtaagagtaaattgagcaatctccttctgcgtctccggttctaatctcccaagctcttgtgcgaaagactgcaaaagctgcctcgaaaccaccaacgggacatcatcggaaagaactggaaaaattgtgaggaagcaaaaatcaaaatcaaaccagaaattctgatataaaccgaattccataagaacaaaaagcagttgtcgaatctcttatgaagttgaaaccatgagaaagaagggagatgcgaaattactgtgatcgatgaatctctgagcttggagaagatcgttggaagagagaacagaggagaggatgagtttgtactgttcgattttctggcgttggtcaccgattgcagaagcgttcgtcaaagcttcatccatggcttctcttctgagattttctctcccgcttcgattgaaaccctaagaaaccttacaaggttttgatttctctctcgctttttttttttttttttttggagtttgctctctttttatattaaaaaaataaacggggactagattctgtgccggtgatcggagaggcgctttacaaaatttacttaatatggtcacaactcatatgagattagtacccaaaataaattaaaatatatatatatatatattaagcataaatactatatttttttttgttagttcataaattttataattaatttgtgatggtaagtttaccaaattgattgtagattaaaaaaaaaaatcaacaaataatatattgtttagaaatatttttatatgtgagcctaaattactacagtaaatcttttacacaaataaaaaaacacgtcgtgatttggaaaacacgatgatgaggtattttatgatgacaataccacgtttaatattatgataccagatcggaaaaagatgatatgttatgtgttttagagcttagggagcaatttaagatggaaacgtaaataattatttgttgagaaagaatcgactagaagcaatcgaaaaattgatcgaatggtcaagatatgaccgagaagtcatcggaaaagttgtgagcccaaatcttgagagcaatgacatgcaaaatgttttgaaagtgctctcatgaattaaaagtgaaaaaagaaccactctctcgttacatagagggtagtatataaagaaatttacctatctcagactaggaaaccaagtctcgcattggaatacgactttggtttaaacatgtgagctgactgacaaatcgattttatgtgctttacaacttagatataactgaacatattggtattggatgaggttggacgatagactcatagacacaatcgttgtctcgaaaaatcacgagtttctctcgcttaaaggattttttttgatgaagtttatggtgatcccgttcgagaacatcacaattgtttttgaatcaactttacagatccatattgtaactaatgattatagactacatagtttaccaaaattacatttactcaaaagaacagatgcggttgttgatggcaaaacttttttggaatggtagacatcccattgaaagaaaacaaattgccatggtatggaattcatgataatgatttaactcgttatagtctggacaaattgtcatggtagggtttcattgctctttctttgggtagttacctcaagatatctctttgttcttccttgtgatagttccaccttgatatgtacaaccccacattaatctgctcatttcaacattaattttctctattgtttttaaattgtgtgtataagattatttcactaactaggaaaacaatccatttctttgacacatgggctttacttaaacaaaagcccaataacttgtgtttagaagtcacatgatcaaatctcaagacctattataaattaacaaatttcatattgataaattttaaaagatttcctattacaatatttaaagttgctacaaattatagattcttttgatcttttctgatattgtttctcaaataaaatataggaataccaaattacaatatgaaagttgcttcaaattatagattcttttctgattttgtttctcaaataaaatataggactgaactaccaaaggcaataatattcaatgtgaccaacaaaaaaaaaataaaaaataaaaagaaatactcaaatctcataacctttttgactaaatatatcaatttcttctattttcaatgagcataaattacacgcgtcctcagaagctgaatccgatttgcaattcttcaatctcaaccgttagatcaacaaatccggcatcgaattcctccgcgtggtttggtccatttttttaatttgagtattaattcttttcctatttgacaacatgttttattaattattattattattccatttgcattaaaatataataaaaagatgtaagattctctccgcctccttctctctataagaaccgacacagagacgaagaagaataatcactcgaaaactcatcaaatcaaaaatcaaacacagagaagagaaaatggccgcagaaggagaagttatcgcttgccacaccgttgaagattggaccgagaagctcaaagccgccaacgaatccaagaaactggtaaaaactctcgatctaaggttttaaatgtttctttctgattgatttcgctgctttatcgtttctgatcttggtccttttgattagaatatgacggattcagaattaggtttgaattgtccccaatcgaatttttgagctccttaatgtcaaatttatgaaccctaatagtttaattgattgtttaggaacccagaatctcagaaattgaaaccctaagaacttgatagaagcatcattggataaaaacatgttatgtgaatctctcaactatgcatattcaattttatgaatcatctgctagagatcacatgaaaattgtctttagtgaacccattttgtatctatgtttgtattattatccatgttctgtgaagcacatgaaatgcatacatttgttatcttaatgatgaaccgatgtcgtatctattgtttgaattatcgatcggtgtagcttgttttcttaaatatggttgtgtggaaatgacacagattgtgatagacttcactgcaacatggtgcccaccttgccgtttcattgcacccgtctttgctgacttagccaagaagcacctcgacgtagtcttcttcaaggtcgatgttgacgaattgaacgtgagtttccttcatcaatcttacactatcccaatatccaaacttagggatttttgacttctctgagcctttatcttgcttgttatgttgttgtgcagactgttgctgaggagtttaaagttcaggcaatgccaacgtttatcttcatgaaagaaggagagatcaaggagactgtggttggtgctgctaaagaagaaatcattgccaatctcgagaagcacaagacagttgttgctgctgcttgatttgcttttctctcttacctattttgctaaaatatgtttggtgttttaataaatcctttgttcgcccgagtcttttcaccttaaatgtgctcttatgtgtggtggtgaataaatgttgttgcaaacttgattactcgcagctatgctaattgttcgttcatggttatgtttactctttggggattctattgttatgttagtttttcaattttcaattacattacaccaactagttatcaatccaattacattgccaaatacaatttcgttttgcctaaactctccatggtttttcacttcagaaaggacaaaagcacaaggtgttaattcagacactgaaacatttcagatgtcatttatacataatgatccgttacagaaaaaaaagtgggaggccatgaggaatttcaattagtattatcagtcttgggaaattatataaacctcttttgtaactgaaaggagagacatcttacggtcgtcatcattaaaccttgtcgtcatggaaccaccaccttgtctctttaggagacctcccgttcttgcagttcttcacatatcgatcgttatcagtcgggcgttgctgatattgtcatcgacaataagacatagtaagagttgtgtggcagggtcaaaaagtttgaatttgtgacaacaatacaaagtgtgagagatcaaatgtagaaaccttttcgggggaacttgatagcattgagaggatgctgatgcagactgaactcactgtcattgctggagaccatgagtcatacagaatatctacaaaaaggaattagagagtgtgttatattaagcgcataatcctaatggactttctcctaaaatgaggccgggtataatcgtgattatgtattgtaacaaatggttcagttccaccacgatttcattagaccggatttagatgcattgagaacagatttaagaaatttacataaaactttcatgttcttattgtttagtgaaaacagcaaaactaaaatgtgttatttgattttaactcaaatgggagtttcaagttatttgatcaacattccaaagggagtttcaatataactagaaattgagaggctgttataatcatggatcagattctgattttgctaaagaattcaccatagagtccaaaagggacggtattggttttctttatggcgttgataacacattcacacctaatttcatgtcatgcgacgctagtattaggaactctttaagaatgagacagactgagaaaaaggttaagactggtaacaatgttgatataatatattaggactcttaagggtattgttactaacattgcttctcttttcgctacattacattccgtgaacaagaacaacctatatatgtaagtatcaaacagataaactaatttgattgacacacacatgacttgagctagcatttcagagaaaccaaaaagtaagagcaaatgcaaagagtaagtagtgtagaaacaatgagtaaaattacctaaacaaatatgtccattgctgtaaatatgaggatgtaacggtgctggtggaacaaaaatcacctgatcaaaaaccaaacacatgaaaatcagaacacagcacaaaaccaagtagagaaaatgtcactatatctcaaactaattctctgacctaaaacatgcaatacaaccataaaaacactctggtttcagttaattaatccacaattaagaaatttgaaataaacccttaatcaaaaacaacaaatttttcagaacaaaaccaacacaatgaaaaacttgcctgaggagcttccataggataatgttgaggaaactcaacctgaagattataagtttcattagcgtaaagcgtaccaggtgctcctgttacctcaattacccatctttaaatcacacaaaaacaaaaaaaacaatcaaaaatcgaaatgataaataatcaaaaaaaggaaagattttgaaatgaaaattacttttgaagattatcagtaactctgtgcttaaacccagtcggtggatttacttgccactctgataactccttttgtaacctattacacgcgatcttgcttaacgcctacacaaatctcaaaaattcaaaaaatcacaatcggagaatcaaaaaacacataagaagacaagagtgagagaatctaagaaccttgcgtgaaggagatgaagagcttgtcatggcggagacaaagagagagagagagagagacgaagacagagaggtcttgcttaagcttttgtctggatctttcttcttctactcgaatattattattattgaaaatgaaatcaaaaagtgtaaacaaaaggaaataaaaatatttttcggggtgaggaaagggcacacgtgaaagagtcaaaattacaaaattaaccattttcatcggacggctattaatcttccttcgtgttcacacgtgtcgtttatccttcactgactccacgggacattgaagagtcgattttatttatagatttttttttgtaacaaagattctcttacattgtagctaccaaagtcgtacgatcataagtacataagtttttaagacaaagtacattacattaaacatacgtctccatctatataatgtttcagctttcattctatagtaggcttctaatagtttatgggtcatcatttggcccaacatgaatagccacttcttgctctagctcaataccatctagtgggtcttgaagaggctcaacgtgaactaccgtttcttgttgtaggtcaataccatctaatggacattgatgaggtgcaataatacaatcttgtgactcttgatctagcacaatatcatcttgaaggttttggtcttttccatctgatgggtcattaagagccccgatacagttttgtgactcttggtccggtccaagaacccgattggtttcttgtgggacgagttcttgctctagctcaataccatctagtggctcttgaagaggctcaacatgaacaaccattccttgttcaagctcaataccatttaatggaccattaagaggctcaatagaatttccagactcttgatccggtccaagaactcgataggcttcttgtgggacgagttcgagtccggctgcgaaaagcgggagcaagactagataatgtttatgagaaacgtaagagatcgtggaaccgatgacgtggacaatgcataacatcaaaagatatgcgtttaatgtgtgccaatagaggctcccatcgtttgtgtaaagccaaaacactcggccgcatctttgtattttcacttcttcctcgatcaaactttggataagatcgagcaaagtgaagattaatgtgtcgcaagcacatacgataccgaatattttggctagatctttctccttgtcgagtaattctaagacgaagcaaagaaactcaacgaggaatgcaatagcagaatgtggtcgtagactttgcctaaaaacaacgagtttaatgacgggagttaggatcgccattttcaaaattattactatgtgattagaaagctcaaaatatactatggtatgaggagctttgagtgaagaacttcgtacggggtgctttttataaagacatgaagtggttattaatgaatgattagggagacaaaagtcaaaagttaagcttggaaaattccgtgctaatcataaagatcttcacttttcattgcatagggaatcaaataaacgttttaatatttttatgtttgagatcattgcaagtaaactctagagtaatagatcaactctctaatcattttaagtgtatgatacaacgaatcctagctgtttgatgatttacgacgttcatgatttcggcatgttaattttctttttgaaaaagttgtcctagctaatttaatcctaatcttatttttatttttttacggtaattctattcttattgcgctagaaaaaaatcgaaaatatcattacttaattaattttatgtttttataataaaggtacatcatgagtgagacaattttttttcctaaagttagtatatataaaagtttgcaaattgtttttatttataaaatatttatattttatagtttacaattgttattaagtaagataccgtcaaacacgtcccactcaaaaattattttattaatgttgatcttatttatgatatgattttgaatcatcccctaaacatgttagcttttttttttctttttcttgtcatcagatttaaacattttagcttaaatccatatatttttcgtttatcaattaatatatgtccgttttcaaaatttcgaatcacaatatatgtagaaaaaaaagttttttcttaactttatatactatatgatggtttaaaacagttaaaacaaaatcaaacaaaaatgataagagattcaaagttttaaatcttaaccaaatcttatgaatatttatattgttaaatacagaagtatccagtgtaaaagtccgattttatttgaactgatccaagtaagatttaatgaacaaaatatattaacgtgtactatagagatgtttaagaaatttttgtttgtttcatactatttgactgaaataattggttcagttgatgtttgcaattcttttgatttggactaattgatgttaatcagggtccagaagcaacaatatttaagccacagtaccaacgagaaaagaggtaaatgcttgtttgaagcactaaattactgaaacgtagtaactaagcacacacttcacaacaagctttgcttttgaaagagttaaaaaaacaagtttcacattgctaataaagaatacgagacagtcattgcaatgtcctttcttcatccctaaagcacaagaaagagtgtgtactctctcactcttttccaaaatcagcgttatagtgcgaactggactccagtttcttggcctcactcagctttctcaccgcctgcaaaaagttggttcatttccatatcacaaccaagattacaacatgatttaacctattctcatgcataatatatatgcataccttcatgaaatcttcatggatcacataatcccgctctgctcggattgcaaacattccagcttccgtgcatatgttacgcagatcagcaccattgaatccctttttttggaccaaggaaacatttggtgagaaacttacatatgaaaagcaacattcactatctcagcaatgtaaggaaaaactaacctctgcaagtttgacaatagcctcgtaatcgatttcaccatgtttggcgataccagctgcatggatcttaagaatatccattcttgactgctcgtttggcaaagggatctcaatctttctatctaaccttcccggacggagaagcgcaggatcaagcacatcaggcctgtttgtggccattatcattttcacctatacattttcccaaactagtatcaaacacatttattcacgctcatttacaattaatagcatcaaaaatttagtgtataaccaattttaggaagagatacaattcgatcaagatatccaacagatttcaagacaacgatttacaacatcacaccaaaatctcacgcatatgtacaccaggtttgatatagattataagttcagaattcagatttagagagcagtacctttccgaggttgtcaaacccatcaagctggttgagtaactccataagcgttctttgaatttcacgatcagcactagttccctcactaaaacgacgcccaccaatagcatcgatttcatccatgaatatgatacaaggctaatcggagggaaaagatttataataagtcaagaatgtgatacaagccttacagaaaataaaataggaaagcatatatgacctatagagagtaagacttacctgatgttcacgggcatagttaaacatctcccgaatcagcctagcactttctccaatgtacttgtctatgattgcactggatacaacctagcaagaggaaatatatttgattaaaacctcaggatatgtcataacgtaaagttccaaaacagcgtagtacaaaactaaaccttcaagaagttagcatcgatgttgctggcaatagccctggctagtagagtttttccagtacctggaggtccatacagaaggacaccctgcattgacatgtagaaaaattcaaatccgagaaattaatatgctaaaatcatactgacaatcaccaacatgatggaaactacataagcacagcctgaaatctcttgaggtaaataaagatatgttcaagggagaataaacacaataattacctttggaggtttgatccctactctgaggaaaagctcaggattcatgagagggagctcaatagattccctgagttctctgatctgatcacctaaccctccgacagcggagtagctaatgttgccagggtcttcatgaagcatgttataaacaacaggatcaacctaccatcaacataaaaaaccacattattatcaagagaaatacactacaagagtataactataacagaaccgaacacatgtccaaatcgaacttacttctcggggaagggctcgcataattgttagtgttgtcatatcgagaacaactcgagttccggaggttagcttttccttatccactttgcttcggcaacccaccacataacgtggaccactgctcgctttcacaatcactaaaacacaaaacatttaaaatttaaccaagggtccaatgagcaaaaatctcaaaagataaaaaagaagggtattaggtcgaggaaaaatgattacatctttcattatccaggggtcgaagcacttctccaataatctgcccaacactttgaagagacttgagatcatcctcggttttgttgaattcctttttagctcctcttaagttctccctagctacagtaacacaacaaaactcagtgttctaatcacaagtcgagtcatatgctcatatgaaactccatcacagtgaaaaatcaaaacttcaccaatcgatttcactaattcgagagaccactcttcttctctaagaaaaagcgaacactttaagcaattgagagaaaaccctagaatcgattcacacaaaaacagctaaatttacgaaatccacatagaaaaaaaggagccctagattcaagtcattcaaagccattcgaactaagtaaagatgaggcactggcaacattgatgcaattgaatctttgaaagaggaatcgaacctgttcgaacacgggattcgagttccttatgttggaggagctttttccggtactcggaaacggcggctgtacggcgtctaacggattcatcgacgtcggtcatcgtttctgaattctgtatctgcttcttctacagatagatc

SEQ ID NO: 819 - DNA, 79046 bp, Arabidopsis thaliana
gatcatctgccctaacaacatataaattcttgctttccaactcatgtgtacacgtaatcatttcggcaacatcactatcaccacacaaatccttacgattctgacctacttctccagatgggaagtaagaaaacttactcatattttctgtataaccagcactcaaaaccatatttgtcaacattgctaaactagggtcttcaaaatcaagctgtaaacatcttgtctcaccgccatggtatgaaccatctgctgcccaatatcctccgacatgcaatcgaaagaaaaacgtcctgacaaatacaattatcaaaaactctctaaaaatctgatcaatctcctaagtttttaatattgtatcatgtaatgcaaggaataagatatacgtctcaaaaccaatttaaaaaattgaaagaacaagaatattttccaacaaaattcaaaagatataagaagtgggcacgagtatacatgtagcatctctaagcatgaacgccatcacataaactcaaagacgtggctctatagtgcaccaaagaaattaactctccaaggtgagtttaaaagtcagagtatggatcgaagcaaaaaaaaagtttttagagtacgtgaaaaggaaaactaaaaccaataagaatgtcttgtaacagttaccttaacatcttgcaagctccagccgcattcagtctacaaaatttcgcgattcaatgtcgtcgatttaagagctaaagtggatttaggggtttataataaggtataagaacttcgtgttgttttttgtttatttcgtgttgttttaagcaaaaaaacatgtcatttttttatatttaaaacacatcgttttattttgacggtactgtagacggcgggtggttttcacaaataattttaaacttcaggtgttttttcattaaataaataattgaagggttttttcataatatatctttagttggggggtttaattactaaaaatccatttttttaatactgtttttactttttagttcttttattcagaacctgaaaaatggaatctaacagatgaacttaaccgaattcagaatcgataaaacactctctgtttatacaatgctagctcacaattatgagcaaaatctcatatggaaacttgtaccagactctctagccatattgtaaaaggtctgagtttgattaattttttagtttacgagtttttatgatttgaagaagatatgaatacctagtagtaaaacggggtaaggattaaggaaccgtggcactaatctaaaactgccactgttacataaaagttttaagattagtgagagacatgaagagagatttagttaagaaaaaataaaatgactgtccttaattaattaagagctttcagaattagcagaatccataacaagttcacactcttccatcacagccgcttctttaatctcttgcaacattttcaacacttgccacatcgtcggtctctgttccggcgatgctaagctacaagctaccgcaacttcagtcaacattccgaatttatccctatcttctctccaattcccattcttcttctcaccttcctctctcactttcctcacccattcgatcatctcatccaaaggcaaaaccggaatcttcgaaggttgcttccctgtcaaaagctccaagagaagaatcccaaaggagtatacatcagccttaaccgattgataatttagactcttgtgtcgagcttcagggggtttataggctgctgcatccgcgtcttcttgaccgtcattggatgttagaggagggtttgttgcaagagcaacgagacagtaatcagcaatacaagcttcaaagtcttgtccaagaaggacattagaggatttgagattgccgtgaactagctgccatgcttggtggatgtaagagagaccctgagcgacgtcttctgctatcttcaaacaagatgtccaatgcaatggcgttgccctcgacgattttgtacctaaacaaataccataccaacttgtaacataagcttttgagacctcaaaaaaaaaaaaccatatagtaaagttaactgtatagaaattccatctgaccactagagctaactgtacagtaaagttttaaaaaattgagtaaaaaccctcgtaagtcgtaactagtaaatttattacaagcattaatcacgcaaaccaaacaaatgcttgatgtcttcaatgataaatctacgaatcatgtaataaaattcaatgctcaaaaagaataaaaattatataatcgcatgagatatggtttacgaagcttaccgtggacaagagacgagagactgccatttggcaaataatcataaatcaataacctctcttccttggcctgaaaataagctctgagtggaaccaaattcggatgccctaaagcaccaactgattccatgtgatgctcaaatttgtctctccctacacccgctaatctaatggcatctaatctcttcaccgtgacgatcaaacggctatcaagcaacgctttataagtggtccccactgttcctcgacctaataactcagctgatgctgtcattagttggtccatcgtataaacgtgtgcctcacccgcacagaatactaaactcccactttttgtcgcttgtagcttcttcactttctcttctatctcactctcttgttctatcgccgccgctacttccgccgtctccgccgcgtcaaatgtcacaaccgccgttgattctttccccttttgtttctcggttttgcttcttcgtctcttcactgcgccgataaggcacgcgacggagatgaagaggataaaagcgccggagataaaaccgagaatcacaaaaaatcgtgaatgtttgttttgacttggccgggataatcttgcgccgcctatttgcgctatttgaccgagaaccatcttcggtgacggcgccgccgttaccggagtgaagaatttggctctcggattgcattctttgtgaacaatctcaccgcagagattagggtttttgagaaatgaagaaataccgaatcgtaacagaacggttgtcaccggtacagcaccggttaagttgttaaccgaaacattgaatgtatgaagcgtggattggtttaaaggcgggacgggaccgttgaaccgattcgaatcaagtcggagataaatcaaccggtcggagagaactaaaccggatgggattggaccggtgaggttattgaaggagaaatcgagagttcttaaccggtgaaaagcgagaaccgagagaggaaacgaaccggaaaaagagttgtgatcgaggaataatgatttgagattaaccaaaccggagaaatctggtaacggtccggttaaggaagtgttcttgagactcagaactcgaagctggtcgagtttattaactgagtcaggaatgagtcgccctccaagataaagatcttcaataaccaaacgaacaactctgtttccataacacgtaacaccccaccattgacaaaaatgagagctcgtgtttatcttgttccataaatcagctttggatttaaaacgtaacaaagcagaaacgtcacggtgagaatgaaacacgcgctttgtgtggttggaggaagaagaagaagaagcaacaatggtaaagaggaaacagaagagaagaaacccagaaatgggtaagttacatcgaagaagcatagcttgtaagacgaatgtgttaaagaagcatgtaaatgtctgtctgattattattacatatcaagagagaggtgaagagagcaggaggtacgtgacaaaaggatgtaagaaacaatagagaagtagctgtcggggactggaaagttttcagagtcacgtgaagactgataaagtaaagaagttgtgtaattattttagtgtatttatgatacttgttgaactgttgaacgaagtaaaaggatagtatggatcagattcaaatatattaacgccgattttgtaggaagagatctaactcttgttttctttctatcagaaacggatctaactactgtaatgaagaaaaaatattattatgatttaggttagatataagatctaattaaggaccatatggtggttgacacttaaaagctagttagttaacaatgtgacaaagattatttttcaactaatagcattttgtttcttaattgttttggaaagtttgtttttttttgcttccagttgaagtttcaactatgaactttactattgagaattaaacatgatttggatgtcggcgaaaataaaagacatggtttgaatttggatagtgacgtatacatgtgttttaattctttttgttgtagcgggaagatatcatcaacaagaaatttttggaacaattacatacctgttggttaaggtgaatttagataataaaccgtaaagtaaagatagcccaaagctggttatagtttttggcttgaagttggctaacaattctgttttaaagtgtatggagggtgtgactggaggggagttggaataaaacataaaaaaaagaataaggaaaaaaataggaaaaagaaaaaggaataatgatgcagcatttcaagtttggctcgcaggccgtgcttgattcacttggatcattattttcaactaagaaatctatgtaaaatataaatttctttttaaaaaatcgtttataccaattgtaaaaagctatttttttttttactataatttaatattatatttaaaaaagaaaaaaaaaaagaaattcagaagaaaattaattacatattaatatgtttaccttaatatgtgtgtttttcctaaacaatcaaataaaaaagaaaatagggagtactatttatataaatgtaattaaagccctaatttaaagtttatttgataaaattctctaatggtagtacaaatttttagaaaacacaaaaaaaaactcaataaaattaaatttcaagaatcatcatgaaaaaagttagacaaatgcaaatcaggctcagtgaagtcatacatattagaccaatacaagccagaatcgagttttggactctttttaatacacattaaagaacaaaagtaaacatccttgctcttgtagacgataagatcattgatacgagacgaacaagtgtaacaatgtggccgagaagcactatagttggaaagaacttccaatacaaatcgtttcaaatggaaggtggatccaaccctcatatatggctccattccaagtacgcaatcaatatgaagagtggtacaacacaagtcacacgtatagaaccacttttgtggatctagaatcttctcgcatatgtcacaccaataatcacccttggccatctcaccgaattgtaaggacaaaggatgaacatcgtatttgtgcattgccagttcagggatagtagcacacttgtagcacataaataaatcatcctgcccagtcaaactccacatatgctcaccaccttttccgcaaatcgagcatgtgctccaattatcgggaactacaagcattgaatgtggttgacttttatggacatacccatcgtaaattgaaacacatcgtacatcaatcttcaagccgtcacgacgctcactgtcttccacgtatgcgaagccgctgcagcgttgattacatacgaaacatatgaaaggacccttcctcataagtgaatttacgtaatactcatcatacagagtcaatctccgactctcagacggatgccttttcttcttggagaggttagcacatgtttcatgtagtacgaaatcacaaagcgtgcatatgtagcatgaattaaaaaagattggaaggacgcacccatagcattgcttgcttatatcatgaaggatatcatcctcattgacgagtcttagattgtgttcgtgagtaaaatgtttgatcagcccctcttctaccacatagaatggcaaaagatttgccgggtcttcttcaggcaccccttccaattctatcccatcccaaacattactccttattgcacatcttgaatgaacaacgaaagtgcaggtcaagcatgaataagccccatacatgccgttgacctccttacgacacaccccgcaactccaatttcctgagcctagacgaggaacatgcgagatgcggtgatcatgacggttaacacatatgactcgcggtaagtagacacagtccatgtggatggtgaaacgacatgggatacatagacaaagacatgaattagcatcgttcactccacacgcatcacaaggaaaagagaaagaccctttaagaaagatgaggagtggatgctcgtgtgccttttccgggtcaagaataaagggcttcctcacacattgtttacaaacagggagaccagaaaaggaacaataatacatatatctgtgaaatacccagtgacatatggtacatttgatataatcgtcaaatctgtcggttaaggatagaggatgtgcgggactggaagggttgatgatttcaaggcaacccttatggacgttgatctcatggcaaatatggcaagcgtgttttccagctgtctcttcaccacacccaacgcacggagtcgacgaatcgtctgttgggtataaaggatggttgtgaaacggagatagaattccaccatcagcaatctcttcctccattaattgtagatctgaaaaactttgggggtgaggatgaggatatgtattgatttgccacaaccattataaagaataaaggccagtcatgtggtgattcagtcacgttcaattttttaaatttattcatatactatatttcttaattaacggaagttttgtatatatttgttatatttaacgactatactatcgtgctgtcatatgataaaaaaaaaaaaaaagaaaagaaaaatactatcgtgctgtcacctaaatcaaatgtcaacgaaaatttaagtatattaattttaaacagtagtatataaatgggtgaaagttgtaattatgtccctaaacattgagtatagggttggattgttgacataaagttatacataattttgataaatagtttgtgcgatttttttttcaaagttgctaattcttataattttatcctccactttcatgcagaataatcttacaaaatgaacaattatatgcaacattgtctttttttgttattgtcagagtttttaaaatttgataaataatatatcaaagcgaaaccctcaaaacgagaaattcaactctatctttaaaatttataaaaccaaatatatgtgatcgtgaaaacgtttacaatatatatacaaaagctatatattatgttttattattttaacctcatagaattattttgcttttttggagatataaagtatagtcgcaaaaatgcagagttggatccaattggtattgaactaggttagcatcccataatacatgcatcctccgataaattatgagcatacttcctttggcaaacagtcatttcttttgatgatcttgctatctccaaaccaagaaagaatcttgttgaatcaaggtctttaatcttgaattctgaacacaataagaacttcagttgctctaatgttgcatcattgttacttgctatcataatgtcctccacatagaccaacacaacaataaaagaacttgaatcctctccgtttcttgatacgagaattctggtcatgggagtggttttgctttcctaacaattagactttttggaaatgttggcataagctcagatgtattcatcttctttcgggttagaagtgttgcttgaatatcccctcctcaagcaaatctttcacaaggttaactaataacggtgacgatcaagagtagtgagtagagtactatcggaagatgatccaaataactgattcttataatttttgtacaatgttttaaatgcgccagagtttaaagttgacaaggcccaattcaagttggctttcttcgattcttctcatcttcttcccttgttcaattagaaaaatccagactctgaaaaacagcttcaagccctggctcttcttctcgcttccattaattcctcccaagcaatcttcttcgatctccctagtgttggtggtaattcattttcatatggctgtattgatttcatagtatagatacttcaagagttgttcgcaattacctaatttctaagtcaatttctccgtttttcttatacatttatgattgtgtgaaatttctttatatgttttttcaagtcttttttcttaaagaagtataaataggatttaaactagctcatgtttgattccattggagattaataaaaattgcgttgaattattcatatattatcttaagtagtttcagatttgagttacaatttgttgcagcaaccagtgatgacattgttgaatttttctgttgcatttagagaaaaggtttgttggatattgttttcaggatggcacattctttgagtttcatctccaccaacttgaacagtttagtccatcttaaccatcatcagtgccagaatttcggaacatttgtgtcgtcaccgtctaaatgtaagaggagatttgcaagaagcattagagctttgcaagagactgaaggtccaacgccaagaagattgatagacattataagatcagttgctagatttcgtttccaagcggtttgataaaaatcagacgatgcaatcaaaagatcacatatgtttatcggtttttagaatctttttaacgattcttgagtcgttttggtaaaaacaagatagtttcggtggttttctttttttaaaaaggtttttaatcatgttggagtaaaaaaagttttggagtggaaatagaacgaaacaatgtcaagtaaaaaaatgatcgaagacaactaccgatcggaacaaaaaacgaagacgaagaataccgaccggtacattgctgtaaccgatcagttaacgttttggaaaacttctattttcttagattttagggtctctctctttggatataaatacttattctcttccagtcgtagacataactttttgccgtatttttttctcaattaaaggttgttcttagttttaaggatttgtaaatatgttttcttaattttttttgattttatatgagttattattctacgtttatcatgtcttctctagttcatgtgtgagtagtttatcttttaagtttttggagtttccgtaaaagaaaacttaatgaatcttgggtaaatatataaaacgtcatttaaatcactagtttaccattttcgttggtttaaaccataaactttagatctattgatttaaatttttaaatttatgttgattttcaatttaatcacgaattttcgttgactaacttaattgattatagttcctccgtttaaaattagttatcgtttaacgtttcttcacgaatattaagaaaatatttcattattccgttttaactttaattaatgtattgtttatttgatatcataaataagaaagattaaataatataaataaaattagaaagtctatcaaacatctgcattgaaaatcgagaacgacaactaatttaaaacaaaatttaacttctacaacgacagctaatgcgaaatagaggaaaaattaattaggaaaaaaagtatttaattattttattaatttatgagaaaacaatcttaaagggatactaaatggatgggataaattaaaattctttaatgatattacaaatattcagaaagcacaaactcagtgaaattaatttttaagaaacatcgagaaattagttagacaaaaacctatcagaatcatgagactcacattcatcagactcatcagcctcagactcatcagacgtatcagcctcagactcatcatcctcatcagacgcatcagcctcagactcatcagatccatcagcttcggacttgtaagattcatcagattccgactcatcagattcatctggctcgtcttggattcttttcgatacacgttaaagaacaaaaataaacatcttcactcttgtagacgacaatatcttcgatacgagacgaacaagtatcacaacgtggcctagaagcatagtcgttggagagcacttccaatacaaatcgtcccaatttgaaggtggatccaaccctcaaatatggctcggctccaagtacgcaatcaatatgaagggtggtagaacacatgtcacacgtatagaaccatttatgtggatctacaatcttctcgcatatgtcacaccaataatcacctatggcattctcgctgaatcgtaaggacagaagatgcacatcgtatttgtgcattgctagttcagggatagtagcacacttgtagcacataaataaatcttcccgcccagtcaaacaccatacatcattacctccttttccgcatcttgagcatttatttctgtcagatacgctccaatcatcagaaattacgagcattgaatgtggttgactattatggacaaatccagcgtaaatggaaacacatcgtacgtcaatagtgaagccaggacggccaccattgtcttccacgtatgcgaaaccactgcaacgttgactacatacgaaacaactgaaagggccgtcccaagaaaatgaatccattccgtagtagtgcttagcatatagagtcaattgccgacttactgacggatgtcttttcttcttggagaggttagcacatgtttcatgtaatatgaaatcacaatgtgtgcagatgtagcatgcattaaaaaagattggaaggacgcacccatgacattgcttgcttttatcataaaggatatcatcctcattgatgagtcttagattgtgttcgtgagtaaaatgtttgatcagcccctctcctaccaccttgaaaggcaaattctttgccgggtcttcttcaggcactccttccaattctatcccatcccacacattactccttattgcacatcttgaatgaaccgcgaaagtgcaggtcaagcatgaaaaagccccatgcatcccgttgacctctttacgacaaaccccacaactccaatttccggagcctagccgaggaacatgagagatgcggtgatcgtgacggttaatacatatgacccgcggtaagtagacgcatttcctgtgaatggtgaaacgacatgggatacatagacagagacatgatttagcatcattcactccacacgcatcacaaggaaaagagaaagaccctttgagaaagacgaggagtggatgctcatgagccctacccggatcaatagtaaacggcttcctcgcacacttttcacaaacagggagaccagaaaaggaacaaagatagatatatctgtatgatatagatgtacatatggaacatcgaaacaatttaccatatctatcagttaaggatagatgatatgtgggattggaagggttgatgatctcaaggcaatccttatgcacgtagatctcgcaaatatggcaactgcattttccagctgtctcgtcaccatcacacccaacgcacggagtcgacgaatcttttgttgggtataaaggatgctcgtgaaacggagacagaactccaccatcagcactctcatgtgtttcacctatctcttccattaatggtagatatcaaaaaactttgggggtgaggatatgtattgatttgccacaaccattgtgcttatatatataaagataaaggcaaagtcatgtggtgattcattaatactcaatttccttcagcttttaaaatttaggccaacgaaaatttaggccaacgaaaatttaagtcaacgaaaatttaagagtctattaattttgaacaagtatataaatgggtgaaagctgtaaccatgtccctaaacactagtataattttaaaagtatctattgaagaatatattttacagttggtcatcatatttaattctagctcagtatttctagctgtatgttaagttttattggatctgataacaactatgctctcgtgctgtcccctaatgtcaacgaaattttaagagtatattaattataatcaaccgagattaaacaagttgatattgtatattaatgggtgatagctgtaaccacatgtctcgaagcgtagaataattttacaatcggtcattaaatattaaattttattctattataaaaatgaaaatagtataataatcgatgtaattccttttttttttggtgagagttgatgtatttcacataatgaaagtacagttatttagcatattactaaaacaattatttgatttattactttcctatgtattaaaaattgatttaaaactcagattcacagaattgtatgtttggatactaattcattcaacttaaattttgctgcagaaaatatgaccttcaaatactagtatgaatgtatgataaacttgcatgcgtggtttagtaattgtacaaacaaaatttgaaatgatattccaatttgaaaagtttcatggtttcaagaggtttgtgtggttcttgcagttgccaaatcggagatgattaataaataattttatcttttgattttatttaacattttatttttatttgttttcactatgatttctatatggttttggaaaacattttatatggtctcgagtgtttataagtatttctactctgaagaattatattcaggttattggcactaaaatgacgaaaatgatattaaaaagaaagaaagatggaaaacaagtatttgaagacttgagaagtatcaatttttcaataattattgtttttgaccaaaaaaaaacaaacagaataaaatggtgacacatgacatgtgcgaaccaaaaaacaaaaaatagtatgttaaatagattcaacaccataaaatctttgttattttttttgtttagttttcaacatcctaattgggttaattaaacagttgaaacatttttcttcaataagttcaatgcaagtattttaacatatagagtttatattttcatcagtttattaatttttttaataccgaaatttgaaccttttaagtaaaaacaagatgatttttggtgattttttttatatttttaggtttttatgcttgttggaataaaagaaagagtttagaaatggaaaacaaaaaacaagatgatttttgggtgtttaaatttatgtaatagatttaatattaatagagatgatataggttttataaatatataaaaaaaaaacaaaaacaatcatatcatgtttaacaaaatatgaaattaaacaataaaaaaaagtgactaaaatttttaaatccaactttaaagtttaaaaccgtaacaaatatagtagaaaatcaccaatgtctaaaataaactaaaaaaacattgcgaatttgaacaactaatatcggttgtctctctcaccattacattcattcttttaagacgacattgtcaagtttttaccaaaatctaaaacatcaaatgagtttaaaaagtaaattaatttgtaaaaataactatataaagtttaaaatacaatattttattctaaaatcaaatatcttttttaaaatccacatccatccagtttaaccggttcatcaaaacgtaagttaatggcgagtttttgtgggtttttccagatttagaattatcggatattagcattaaactcaaaaaaagaaaaaaatccggaccacagcttaactgaaaaatatggaaaaatatctttatgttttttacgggaagtgtagaaacctccaattgaatgaaagtgttagatcttcgtgtatttaacttttgaatcgttgatatctaaagtaggcccattggcccaacaatatacaacacaacaaatataatacttaaaatttcccaaaataatccaatatttctgatccaaaattcgaatcttctctgaaatagtgaaaatttggatagtaattaactaactaatctaaactattcgacccagttgaaggcccaattcagtggcttcctcttcgatttttctcatcttcttccctttgttaaacaaaaatccagactttgaaaaacggcttcaatcccttgttggctcccattaattcgttccaagcaatcttcttcgatctccctcgtgttggtatttccttttcccatggctgtattgattttcatagtatagatacttcacctttatttcctaaatgtaaccctaatttcaagagttgatcgcaattacctcaatttcgaagccaatttatatctccattggagtttaatataattgcgttgcattattaattttttcttaagtagtgtaagatttgagttacagttttttgcagcaaccaatgatgaatatggtttattataaatggcaatgaaaagagagtagaaattgttgcacgaaataaacttcttggtttgttggatattgttttcaggatggcacattctttgagtttcatctccaccaacttgaacagtttagtccttaaccatcatcagtgccagagtttcggaacgtttgtgtcgtcgccatttaaacgaaagaggagatttgcaagaagcattagagctttacaagagactgaaggtccaacgccaagaagattgatagacattataagatctgttcctgaaatctctaggaattacttcaagaagccttcaagaagaacgctttttggaggaatctcgttgttaggtggcttttatgtcgcgcagactatctctctctcgtttggagcattgggagtgaacgatgttattgctgcggttctatgcgttcttttgacagagtatgtgacaagattctattatagccgcaccacagtcacatttcctattgctctgctcaataatttcaagatgggtttcacttatggtctcttcattgacgccttcaagctggctagctaactgtttgcaaaactgagtcaccagagatcccaagctcgtgtatttacttgttttttctcctcaaatgtaatattttgttgtcataattttgtagtgaagcaaccaaaaactttgaagttaaagagaatctgtagtatgcttaaatatcctgggccctcttgtttctggttagccatgtcaagtaccttgccttctcttgcttgtatcttttccgttcttgtagtgctagctgcaaggacgtgtcctgccatgagcaggaaaaacggcgtgtacactgcaaagcaatgttcataagagaagtagctgactggcatgatggattgatggtacaaggcattctcggcttcggaccttgcttctcttgatgaactggctaaagaactgtatcctccagagaagcattagagagccattagctccagcagaagtatccaagtgccactcatttgagttcacaaaaaaggatagatcaatggtcctaaagatataactctgaagtttttcgtcccaagatgaaaatgacgacttcggtgtttgatgcaaaacctgactttcaacattcatattagctgctattggtgcttttgtactttcacgtaagaaaatctagatggtaatttgtgagtcctgaaaagctacatttgaatccaaatatactcaagtgagaaaggaaaatgaaaatttatcaataatagagcgataaatagataagttgaaagagattaataaccaaacccatttgttctgagttagttactttaacaatgatgaaactgaatgaaacttagggagaggttttatatgtacagaaaacctcagcagcagaatcagcaatttttaaatctgaacaacaacaacataaaatgcttttgatgaattctcaatgtttttgtcttcctcttcttacgcaatgtgctttctgctctttgcccagaacggtattgcgggtgtacgctttaaagccttcacgctaaacggactgttcttgctctgccaaatcacaacatttcaaaatcagtaaacatttccatcaaaaatgctctttgataccaatagatatatgaagaaactaaccatcaaacaggttccgcggttaacgtcacaaaccgggtactcatgaggacagcaacttgagttatcatcgcagcaagtagcagcttcgagcgggcaacatccccatccgaagcagtacttaccatacttgtagagacaacaacaagtgttgctctcagggcaagagaagtacttgtcacatgtggttggtggcttaatgggagatggtggtgacgggccagggtttggtgggttctgacctttcttgatcggatacgaagcctccatagcgattccacactttcctgttggcgcttcaatgttacgtgccatctttatgtatccgctctctccccatctgtttccccatgagtttctcacaatccagtagtcctttccgttctcggttccataacccacagccacaacaccgtggtctaactccgtcccacaaagtccatcaaatacaccctgaagacaaaatagccaaccaacattttaacatcttgaaatcaagatagtgcaaatggttgtctagcagttttttgaaacaattaggttatttcataccgaagaatagagctggaaagcgcgaccacccgcttcaatggcgacactaataggctggtgagccaaagctttctttagagacgcctcgctgttctcagggacatcttcatatgaatcaatggtaacaaccttagcatttttctgcaaaacataacaaaacagagtaaatttcaaattcaaagccattgttgagtttcattttataaactaaatacactaaactaaccctgttctggtcacaacgaccatcagcagccttgtaaggataatccgcttcggtatcaataccaccatttttgataataaactcaaacgcatagtccattaaaccaccattacatccttggttataagatgtgtcacaatcaaccaattcttgttcagacaaagatattaaatctcctgtcacaatcttgtttattccttccactgctccaatagttgagaatgcccaacaactccctaaacaacaagaagattagttgttattatcaatcaaattgtcacaatctaaacactaacacataccaaatcatcgtccccaccattcatttaaattcttgacaaaaaacaaatcttgtaatgggtccatattgtcccactaccaactttaaagtttaaagaccatggtccataaaggcccaaaatatcatcaattttctcagatttaaccaaaatattagctccccgaaacgtgcacctaaaattcaacattttgttttgatgcataaacacaaaatatcatcagaagtttgtgtctttctcaagatttattaaccataattattcatctccataaaaattcaaaatctttgtttttcgaaacgtacacctaaaagtaaaagtcaacatttcagaccaaactcatcattccccagacaaaagtttcaagatatctctgaattatttatcaaaagtttcttggagtatttatgaaacaatccaagaattttcgcagtttttactactttttcgataattttcatagaaacccatttcaattctaaagaaaaaactgacccatccgtaaaataatcaggatttgagggatttttccagattcgaaatctaataatgtttttttttgttaaattttaaaaatgaataaaatcaaaagaaaaagaatttattcttaccacagcttccttgatctttaacatcagcgacggcaccttcttttctccagtcaaccgaatcaggaagcgcgtcaccaacacgcgcctgataccgatcactggttttcaaaaccctcttggtcggtttagcaccaaggtacatagatcggtactcctcattggttaaatcagcaaaccgggttaaaccaagtttataactgaggtttttggtgttatgttcatcgatgaaacgaagattatctttaaagatctcgaatctttgatctttctctgcaccaagaccgttttgattcatcttcttcttcccgtgttccaccatccacgcttcgtagattctctcaacctccgagtcgctacggctggtctcggtggtgatgtggtggttttcgtcgtaggagatgattgacatgtccatggcatatgaaacgccgatcattgctaggagaaggatcattggagataactttaagaaacccattttttgtttgaagaagaagaagatgaatgtagacaattgttttgatcgagatagagatttgatggtggtgtatataaaggggaaaactcaattagtgttcctaattaattattaattaatttttgtccacttttcaaaaagattttaaaatagttatttttggtttttaatgggctagtggggtcaattataagagatgagggaattaaagaaataagtgagaaatagtggggtgaaaattaaaataataaaatttgtaagagtcaattacatttgttaaagccgtccaatttttttagttctttatctagatgttcatctacacactcaacattttgatttatttttcacattcatatgtttatcgttttttaactattttttaactcaaaaactgtatatggttccaaaactatttgtttgtaagagaaaaaagatgcaacctacaatgatttaaaatcatgtttttagttagtcaataatctttatttattgtttttgtccaatattcaaaaaagtttagaagttaataatttttatttttaaatggggctgatggagccaatcgaaagaattgaggggtttaaagaaataagagagaagtagtgaggtaaaaatgaaaatgtaaaaattgtgaagagtccactattattggttaagacaaggtgggaagggacagctcagaagtgccaagtggatgtggttagattgggttggggtgaagataaattagaaatacatatcttctagtcccaagcaaataggggacgtaaatagaagcacgtgaaggatcggattgtttgatgatagaattgttaaaacaagattttctttgatttccaaacaagaagattcttttgataaatgttgagagaaaattggttgcaccaaaaaaaaaaaaaaattgacagataatgtggatttttatattttaagaagaatagattaaggatttacaaaataaaaataaaaaaggaagaatagtttactcgagttttagttcacatggtcgtctctattattatgattccttgcgaaaatactaatgaaaatgttgatgtatatttaatatcttaaggtattaatttatatgtatttcttaaactaaaatttaatttatatgtatttcttaaactaaaatttaatttcctacaagtaatacaagtgtcgaatagaaaagggacaatttcaaatatatatgttttacaatgtaatggaccatgtggtttacccatcatagttgctagctaatccgtgtgtcaaaacatttttactgtataaacctataaacattattaatcatatgaaacattatacagattattaatcttataaaactttagaattgtatgtcaaatctgaagtatggaaataaaattaaaattgaccattaaccattaggtaattacgataatgtttttattagtttatgtcatcgtttatcattcatgttataagagattcttatggggccactaaaattttatatacatttgagtataataagggacatggaaatatttaatttataatttacattagaataagaaactgcattacaaataaaaaataaaatgaagaaaatgaaactttcttttgcgtggagaagacacatagtgggaccttttcgtttttaagtgatcataatttttagaacttacaaataattgccggacaaaaccgtttacttacaaatatttaagatccctcgtgaagataatgagtttacttacaaatattttagaaaaaataatcaattttctctattctcaaaatttgcattatacccctaaaataattaaaacaaaatcagacatgcttcttcttctttctttttttatattccttagcaattcaattatcttaaagaaataccatactccttgacaaaaaaacaaaaaaaaaaacaaaaaaaaaaacatgttcaatcaaaattccaaaatggcctttgatcaaaatttggtatcaactctttcttcactcttggaaaagaccaattataaatttaaaatattttcttgtttttttctccggttttccgagaagaatctatgttagactcttagaactcgatgcaatttaagcttataacaagtctattatctttactgagttaagcgcattatcttcccttctagcttatcgttttaaactccattgatcgtaatgtggatctttccaaacttctttcctatgtttgcatagttttctgtttgtacctccacaactctttgcactagaagttctatctacaatcttaaactggttttaaagaagagatatgtgcctttggaagttttggttaattgatgcttttgaacaaattgtccttgttggtcttcttgttattagtagtggtgttgaacccctctagcttggcttgtaacaacgacttcagttggaagtactttccttgttgcatttgtgctaggtagaattggtcttattggggttccacattgatattcctatataattaattaatgttcccataataatggttgaaagagcgtctttatttttttctagaaaataatcactttactatttaattatactttttagtgtaccaatatacacagcgtatatttacatatgtacactaaaaatattgttcaatctaggtataatcaaacagtttaaattgactactttacaaattgtaaatgggaaaaatgtcaaaaaaagcatgaactttcaaatttgggatgaaaaaaacatgaacttcaaaaatgccactaacatcctaaagttttgtttgactttaataaaatagtaaagtttcgttgacttcgccattttagacatgtcgttaagtttccgttaacaaaaaaaacacagcgttaattttccgtttagtatgttctgtttcagacaaaacgacgtcgttttgaaaatctaaaataaaataacgatagtaagtccacgaggattcgatccagtaacgtattgttttcctcagatgcacacaccattaggccacgatattattctagtacagattgcaaacagatctatataacatactagataaggcccgcctatttaggcgggtgtacccgaaattttcaaatactcgaacgagtctaaacttcaaaacccgaaaactcgaactcgaatccgaataagtattcaaacatatatcaaatataagtatatattagttatatttatacttatatatagaaaatattaggatttttttggatattttagttattttgtgtgtttttagatatattcaagcaaaactactcgtgttgttttgagaatttttgaaaatttcaagtaatttaatagatttgcacacaaaatttgatatttcaatatataaataaactcgaacccgaacccgaacccaaaccaaacccgacccaaaatcttagattacccgaacgggtcctaaacttttaaatccgaaaacccgaaccgaatacccaaacgtctagggctaataattaataaaaaatcaaacattgttgaaaatatattttctatatatgccgtaatctcgtaagttaattttacatcatgcaaattaatattaaatgagttaaaattaataaatgaaaataattgaaaagttaaatcctataagctaagctatttttctcaaattgttctattttcacttatgattacatgagttaaagacaaatttgttaattttccttttgttgaataaatgttaattgtttataaatatatagacatataaataagtatatgtaaatttgtttactttttaagattttctatttttttagagaataaaaaagttaaattttgaatgacacatgtaaacatctgatcgtttgacttgatacgtggcacaatcctatgagttagcaaatttgaaaaccatactttatataataagatacgtatgcaattaattaaaaataaccaaatatgtacaaatattaaatattcataccataaatatacatttcgaaatatcatatttttaattttacatatagagatttcttctaaatgcattgaatttttatctgaaaatttattttttcttcattttattttatgaaaaaaattgaaacttatgaaattagaaaataggctaaaatttatacaatccttctcaaataaatataggattaatttatacatgcacatagaattttattcaatttaattttatagatatttttaattataaaaacatatctattcgataaattaacttgtaatatatatatatatatatatatatatatataagataaatataaaatataatcattccatcttcaaataattaaatgtgatgttcataattagatggaaacaatataagaaaccatttatttaggcaatatattttattttctatatttcatatgtttcttttttatataatttaagaaagaataatttaaattaaatgcactaatatagatctttgtttggttatttttaattaattgtgtatttatatgttatctatatatatatatgtgtgtttttcattttgttaatatgttctcgtggctcagtggtttaatgattctttgaaagacaaaagatcataggttcgaatccttgtcggttcacttttttcttttatttagaatttcaaaacgacatcgtttcacttttaacagaaaatggtaacggagtgttaattctgtgatttttttgttaacgaaaacttaacgacatgtccaaaatggcaaaatcaacgaaaattgactatttaatcaaaagtcaaacaaaactttacgattttaatggcattttgaaagttcatgtttttttcttcccaaatttaaaaattcatgctttttttttgacattttcccaattgtaaatagtaaaatgactaatttttcaattatatttttcaatttttcaattatatttatcacgtaataatatggtaaaaaaagacaaaagagagacaataattacctaggacacgtaaaatacctatggtgtggtctaggatgatatatgtctaatgcattatgcatggtacaacttactaaaggtttgtccctttaccttggcaggtgaggccttattttacaaagaaacactcttctaagcttggaacagatgtagcctgaacctttacatttttttttccggattctcaagttcttattccgcttctccaatatggcgacaatcacaatgatttagtgtcttttgctctatgaggtataaaggttacgtttacagttttctttgatttcctttagttacctcgtttacccaacttttttgtggactcgttggcaaaaattgtttgtactgtcttttgaagctatctccaatttggaggtgaacaattagtcttttttttaaaaacaatgaattattgtgattatatgacttccattaagttaaatttatagaaaaattaaaagtttagatttatatttaaaaccattttttgtaatatcaaagtcaattttttccaacgcaatcaaaatatcaaatcgtccatttgggcacaaaataattgaggaatgcgtagatctattagcgggaaaaggtctgagaagttttatttttgacgatacagatacagatagagtagaacatgttcgtgtgacgtactgacgtatagacgtggttgcgtaaattattatttgtaacttgtagaagacaaatatagaactctttttttttttggttaaaaggaaacatatagaaccagtttacgtaatttagtcttcccatttgctttcatcatccaaaggaactaatcaacgaaagtcgcaagtagaaaactgatcaaatagttgaaaagaaaatcatgtacatccgtcatccccccttttccacctcaagtactatataataacaaaagaaataaaaataaaaataaaagaagttatagaggttgttttggtcgcaaataatatatattatattttatcataaagtccacttgcaatattagttgtttgatcatcaaagaatagtttcttataatagtattctttttctgataaattaaaaaaaatataaatggcattacaaaataatagtaatcttagctaaactgtttgtttgataatgataatgcttcaagatagacatctctaaagctttcgattcggttcaatggacttttctccgaaacgtcctagaagccatggagtttccgccggtttttatacattggatcatgctttgtgttaccaccgcttctttcttggtccaagttaacggagaacttgcaggttattttaatagcactcggggtttgaggcagggatgctctttatctccatatttatttgttgtgagtatgaatgtcctttctaaacttttagataaggcaacaggtcagcgtagatttggctaccacccaagatgcaagcaaatgggtttaactcatcttagctttgcggatgatcttatggttctttcggatggtaaagtgaggtctattgaaggaattgttgaagtttttgaaacatttgctaagtgctcggggctgcgaataagtatggaaaaatcaacggtctattttgcggggttgtcccacacttctccccaggaagtcatggctcatttcccctttgcggtgggtacacttccagttcgttatttgggtctcccgctagtcaccaagcaactctcctcaacagattatctgcctcttattgaacacataaagaagaaaattggttcttggtcagcccgttttttgtcttacgccgggagattaaacttaataagctcagtcctttggagcatttgtaatttctggatgggagctttccgtttacctcgggaatgtattagggaaattgataagatgtgttcggcttatctatggtcaggaggagatcttaacacgtcaaaagcaaagattgcatggacagatgtatgtaagcctaaagacgaggggggacttggtttaagatctctcaaggaagcaaatgatgtaagttgtttaaaacttatttggcgcatcatatctcatgctgattctctgtgggttaaatggattcacgcaactctccttaaacaagtctccttttgggcggtaagagagaacacaagtctaggctcttggatgtggaaaaaagttcttaagtttcgggatgcagctatacaactctgtaaagctgaagtgaataatggtgctcacacttttttttggtatgacaattggagtgatatgggaaggcttatagatattgcaggggacagaggcgttatagatatgggtataaaaaaacacgcaacaatggcggatgcttggggcaatcgaagaagaagaagacaccgggttgatttgttaaataaagtggaggagcgactaaatcttacatagaattcccatagtcaagaagcggatcgtgtctttggaaagggaaagagaattactgcaacaatttctctacaaagcatacttggaatcatattagatcagtttcaactaaggtggcttggtataaaggggtctgatttgctcaagccatcccaaagcatgctttctgcatgtggttagctgttcataatagactctctacgggggacagaatgctgcaatggaacatgggagtagcggccacttgtatcctctgcaacaacgatttggaatctcgtaaccaccttttcttttcatgcccctatgcaatggaagtgtgggaacctttagctgcgaccatctataacacaagttactccacggactggcaaaccatcattaacaccgtctcaaccaattggcatgatcgcactgcaggcttcctggctcgttgtcttttgcaggtttcaatacacactatatggcgtgagcgtaatgaacgtaaacacggtgcttctctaaatccagcaagcaggcttgtcaggtggatagacaaacacattcggaatcacttattgacaataaaacagagtggagatagaagatttgacaaaggttttcaagtttggctacaagctcgagggactcattaagaggggaaaattctgtaaagttctttgtgttttagattaaaactctcaactactcagtagcacttgttgtaacaactttgaccttttcttttgaatttaatttaacataaatttaaaaaaaaaaaaaaaaaaaaaaaaaagataatgcttgaatcctcatacttctctgaattttctatatagtgcatatatataattgggatcgtccaagtggtaacatgatcatcttttattttgtgttgaaattgttggatcgcgttgatgcccatcttattatttattcataagatccaataaattgaagatatgcccgtcaggagagttgccgtgttatagatcacaaaccatgtgccacgagttgctttcaagttgccataaagtggaaaaataccttacatctatctaggatatgaatccaatacgaaatttctaaagagatggacataaatctattaattcaaagcatagattataaatgtaaagcataaagagaagccacaagatttaacgtatgtatcaagttgtttatttaaaatagggttgggcacaaaaccaaaccaaaccaaaattcatcaattcaaatttgaacaaactttttttttatataactcgatttttatagaaaatttaatcctgaattactcaaactaaaccagaagtgaactttaattttgtgcagctaaatcaaattaactaaatttcattaatagtcaatattttacctatcttattataaaaaatatggttttcaaaattaataactcgcacaatcgcaatacgtgtcattgatattaaagttatggttccgtagtaataattattggtcctaagtctctcattcaccacccctaatggagaactgtgtggtctaaaatttaaacccacattcatatgtgttactcatgtattaatttttgatttaaaaaataatatataaataataataaaaatatagtgtggtacgattttggctcttttatgtttccctaatttatatgaaatcaaattgtagaaattatgggcagtggtttgcccagtatatatgttttatatatatttatgattatttttttgtagatttaaagaaaaaatgcatctcctatataggaaatatttgttttcaaaaataatccccgttttaatatgttttttttatttaaatcgacccttaaataaataatccacattcatatgtttttttttattataaaaaatctttggaattaaattgatatgctgattcgtaaacgaattaacacatcatggatatctaaaacaactatagattactttttaacatcaaaccaaaaaatagaaaaaactatagaataccgctccagacttagctctaatcaaaatccattttcattgaaaagaaattttcagtaaaaacaaaagtaaaagttgaaacatatatagttggttaagaagagtgtgagctggtagagctgtcgcgtcatcactcgtcagcaactaagatggtgaatcgcagaatcggtctgatgatgacttcacaccgtgttaatatccaaaccgactacaaagaaaaattaaagtcaaaagttgacattgtcacactcaagaaattcttcaataagttacccattggtttcctattaaccaattaatttccaccttttgctaaccatttttcaactcctactttttttgttttcttacaaatctttttatgagagtcatagagacagagttcaacgatatctcttatgaagaagcacaacgagaaactcattagatattcacttgtgtcaatctctttaattagttcaaaagagcgaattctgaaaaatattatttacataaatgatatattacagtttagtataacttgttttatcagattatccgtgtttatatttgcattgtaaaaaattaaaaataaagaaaatgttgaaagtttttcgttttcgctccgtaaatcctccaatacactgaaaacacatcatttgtttgaatacatatcatttgttttgtttggcttgtactatttaactaaatgactaaaacatgaagaatttaattaaatatgtaaaaacgcgatgaaaatgattaaaagtcaaatattctcggtcaagaattaatgccctttgcttacacactcacacacaaaagcataaatatacaagaaaatcgcgaagccattcttttcaatcacgaagagaaatagaaccaaatttttttataaaatggagaacaagaatgtgtttgtgttgtgtgtgatcttatttttggtgagctcgtcgttgatgtttgagggtggtcattgcagaactctacgatcgaagccgttcagagataccaacggccatgaccaatcgtcggcgactatgaaggtgaagcacagctcggaaagttttgctttccgtttagcgtctgggtcgagcaggagaggacgtggtcactgatcaacaatcactactactattttgaacacgcgtcagtgttttttttgttcgtattagttttgttagattgtagctttctaaaggttttgtttttgccaaaaagtagaaggaaagacttattcattcaagaagatgtgatacgtaatatgaagtttttgaatgtaaatgtttactttatccgtccatcgcatgtaaatgttcgattggaatctatctatactatagtaaacgtgggagtctagacttttccttgtgtccccacattggtaaataaaagaggtaattaaaaaggaaatgtccacagatcgagacttcatgctaaagttttaatatcctcgatgattaaatattgaaagctttgaaaaaagaaagaaagaaagagcgatagagtgcatggggttagatggtcaaaaaaagcaacaagagtcaagagaccaagatctacggaaagagatagagtagcattctaggaaaaaagaagatgaagaagttaaggtgcaagaagccgatgaaacttttggtatttatcgatgttttaaaaaaaaaagataccaaagagtggtactgaaagatggattagtttgcacgatgctgctgttgtgcttacatgtatgtaacattatatcatatttttgtaggtacttagaatactaatgtatgtactcacaactagttaacttttatgccattggatctacggtttttctcttctttatgattagccaaagaagaatgatattacaaatcaaagcttgtgtttaaaaacaaaagcaaaagttgaaacatattagggttaagagagtgagtggtaatgctgtcgcgttcacgtccaccagtcgtcagcggctataatttcaccgttttgattttttacctttttgcgatcctaacgtagaggaatcggtctctgatgacttcacaccgtgttaatccgaaccgactacgaaggaaaacaaaagtcaaaagatgacagctctctaagaaaccattggtctcctactaaccaataaaattccacttttaactacgtgtttgctaactattttcaatttattattttatatatataactaaatctttaaatgaagagaatccagacaatacatgacgaaaatttggtaaaaataaaaaactgaaccaaatatcattagtttggtaaaaatcttagatgaagcatacaagtcgtcggtttaaataatatttaagacgaaattaatatacatgttatggttttggatatgaaaggattacgggttttgacacataactttctaaaaaagaaaaaaaatggagagctaaaggattgcacttcaaacaatccaaaaccaaatcatgattatagatagcttgcacggttagcaaatttatcatcgagacagagctatcaataaatcactccaacaaaaaggatatcggtagaagaacatattctccattaaggagaaaatatttagtctcggtctctccaaaatggagataaactgcggaaggattttgccatagaggaagaatgaggaaattgatatgacttggttaataaaatttgggttcaaggacaaaattcttattacaaaatggttttttgtttttttgttaattacgaaacggatgctattttcaaccttttatgaaagtaatagagacatggttcaacaacatctcttatggagaattagggagttggagaaactcattggatattcacttgtaatatgaaatgtacatcaattgttttctctggcttctataaatagtaaacaattaaaaggttgatcaagagtttgattaaacatgtaaaaacgcgataactgtattactgtatgatgtgagaatctcttgtaatggataatagatatagaagtaaaagagagagtggtctcgtactagggtaaatctacaaataagggaaatatagataaacacaaatcatggtatactctaacataagcacaatgaaatagtcctacatatacttggtcaagaattaatgccctttgtttatacaagcacactatctcatatagaaacaaaaataatcaggaagcattcttcctaatgccaaagagaaagaaaacaaaaaaaagttacaaaaatggagaaaaagaatatgttcgtgctgtgtatgatcttgttattggtgggctcgtcgttgatgtttgagagagttgattgcagagtcgtacgatcggagcctttcagagatatcaacggccatgatcaatcaacggcgaccaaggtgaagagaagctcgtgcagtcgacgtcctttgatgaggattctagcgtctggaccgaacaaaagaggacgtggtcactgatcaacaattacccctatttccgacatgtatgttttttgttttgtcttttttggattatttaaatatgtaaatcgaatgtttttgtttcagccaagagaatgattttttcaaggagttcctaacttttatatccattgatgagtgtaaatgtttttcccccattggaatggtaacaataatggtagaaaaaacctaaaacaaatatgcatttcgtatttatttgctaactactttcaattcccacttttgatttcttactaagcaaatgtgtctttcaactttttatgaaagtcatagagacagatttcaacaccatctcttgtggagaagcacgtagttttttttttctttgtttaaccgatgggagtttcgggcctttggtcaacatttagattttacgatttaaagaatattggggcacaagggaaccaacccctttttaccactaggccgccacctctttgatgagaagcaagtagttggagaagctcattcagaaatccaatagtataatatgaatacacaaacatcaatttgctggagaccatgaaggtgaaaaacagttcgagaagcccttcaaagaggagctacgcttaccggttagcgtctgcgccgagcagaaggaggcgttgtcactgatcgacaatttccacttcttctttttctttgcttttctttttttctttttcttttttctctgctgaagtttattttttctttcctttttgttagattttgatatgcaaatcgaaagtttttgttttagtcaaaaaaggagaagaagagattgattctttcaagaagatttaacgtgagacaatagttccaagctttattgatctatatactgcatgtaaatgtctgattttttatttccaaatgaaatagtaatagtgatgcaggtaaaataatgtttacatttatcaattatttggtttttaaaacgcatatgcattcactaattgtggatagaaagctacactaattagttcaagcattttctgcaatgtctaggtaggcgcttgtacgttaggcggctatggatggtaaggattttttttaagacgttaaaattaaacggttttgttactaagatgagttcaacgatcttaaaagggtctcagtgtgttcctagacggttctaggcagctctatataattttgaaccaaataccatttagtgaagaaataggtgatagaagccgtaacgagatctgcccctccgcatatatccgtctcacttcctaggttcatatcttccagttatagtttttacgtgtccttatttccagtctgcgttcattgaatcaacaactttaaaaagcctactttcataaatattcaaattaaagaatcaacaacaatgttaatctaaacgctctcactgtattagtgttacatataaaaatattttcattttttgataaactaaaatacaaaataaatcattaaacttttggtagtgcctttttttccatattccttaaatctttagattttcatggcgcatgacttaagggtggctaaaatacaaaccaacaaattaaaggcgacacaactagtgttgtgaatgtacattcctttgttacttttttctttttaccacatatttcttaatatttcggatagaaatttactaatttatatttacaatttttacaaacactattgaaattaccattagattagctctcaaaaatcacaatggtaacatatatagctttttattaaagtcacagagttcaacaaacataccttgtggccaaaggaggtggtagttgaagaaactcgttcgacttgcaatatgaatacacgtcaattattttgtccgtcttatttataaatagtaaaagattgaaaacatgaagacttcaattaaatatgtaaaaacgcgatacacaaaatcaaatagtcaaacattctcggtcaagaaataatgcccttcgcttacacacgcacacacaatcgcatatatacatataaaatcacgaagacattcttcttaatctcaaagaaaaaaaagagaacaagtatcgaaagagaaaagaagaagctagcgaaagaactcaaagaagtttttttaaaaaagttataagagatggagaagaagaatgtgtttctgttgtttgtgatcttcttattggtggggtcatcattgatgtttgagagagttgattgcagagctctacgatcaaaggcgttgagagatattaaaggccatgatcaatcgtcggtgatcatgaaggtgaagaacaactcgacaagtcaacgtcctttggggaagagctttgcttaccggttagcgtctgggccgagcagaagagggcgtggtcactgatcaacaactaccacctttggtcgataagtgtaaatcgaaagatttgtttcagcccgtcgaaaagaaaagaaaagaaaagtatttttctttcaggcaaataactaattagtgtattgtttcatagtttttaatatagtcttgatttgtgagctttttctatataaatagaaatatccttatggaatgagagggtttgtaattatttaccaaaatttgagcgtaaccaactaagagcatacttgccaaaaaaaaaaacaaggattagcctaaagcatatagcttaatgccacataaaccaagtctgtagaaggtttccgaagcattggatattccttttgcctagaaaagtgtcccggatttggccatcaatttcacttgaagaatagttttattgatatttagtggtgatatacattaaaactaatgttagaaatgtgatttttcaagaaataaaatatttttttctagctttcaagaaataaaatatttttttttctagaaaaaatgtgagttagactttttaaaatttcacaatttgatatagttatatgtataaatatttagaccttgtgagtttttttttcttagaaccatatatatgtgaattttgaaccccatatcaaataatgtggtttaaaattttgagctgacataaaattaatcacctatctgttatactaaattgaatatccttacttgcattagtttttttgaaatttaaaacgttaatataaatcattaactttaacgatcataatatatttatttgtcgaaaatataaatcaccattaatttattacgttacaacttacatgtatagtgtttgttgatatgtaaggttttcaatgacgtttaaatagatgaaataatttcgtttcaaaaataacaaatacaaaccatttttcattacactatattcatatgataagaataaatttattaaagttatgtttaaattaagcacttaaatattattatcattgttgtagctttggtgtgtgcgtttattctaattttttagtagaataagctataagcaaaaccattatgaaatacatgtcttattaaatttttcctaaatgttcgttgaatattattgatgttgtctttggaaatggaatcatcttttctagagtttaagaaagcactcccatagatatattgattcttttagtattatctttctagtgactttgaatgaatgaattttgtctagcttactccaagcgggaaccaaaaaaggatttgaatccggaacggtaactaaagaacaaaaacagtggggtttaaaattaaactctcgaattccaaggctccaaaaccaataaagagtaaagacaaagaaagagtcaggaggacatatcaaaggcagatttctggttccaagaaaaaaactatttgactgcccaatgcacatgaacaactaaattccagtttttgaatccaaaaaaaaaaactttcaaattttgtaaaagttcattagttgtaatcgcactatgcttctaacccaaaagaattaacgaaagtaaggggagatatgttttcattgtcacaatagtcacctaaaccataaaattaaaactacttatcttacaaaaatgtctagtttctctaatggtttagattcatgtgatctcgaatacctaaacaaaaaatactacgcatatgtcaaaatgaagatgtatttaacgagttgctaacactattaagaaagcaaaatcagccaaatccttcctttttgtttaatattcaagccttgctaattaccatgattaagaaagtgtaaaaccttgcaattaacaagtaaatcaccataattcaagagtttattaaatcacaagttaacgagttaattaccatatgattaagacagataattatccaaaaattttcttttaccatgattaagcaagcgaaatcatcccattaacgagttaattaccatggaaattaaaacgtcaaaaccaaatcaaccacaaaatcatattagtaacaggtcccaaatccacaagttatacaacaaacaaaactctgagatagataatcgcataccaatctaaaacaaataaaaagatagttagagataagagaacaacaccatattcaagcctcgtcaagcttcacttgaatcaatcttcgaatcaacagctgattcaattccatcaccatccttcggtggaggagaagccacattactcttagccttaacagattcaagcatacgtttactaatctctttagaataagctttaagaatctcgatcccgtcgtcatcaccgaatacggtggcagaagcgatggcgtaagcttcgtcttcgattgatttcgcgacggaggaagcttcttcggattcaagagatccgaatctcttggagaggattgattcggttgacagtgtttcgatcagacggttaatcacggcgtcgcgagttttttgagtcggtggccagattctgagggaaatggttaccggattgggattcttctccgtctccgttgttggtaatgtggtggagttttcggtttctgagatcggcggtggagaagaggtggtgatcgactccgtttcggtttcggccattttttctgagtttatttgtttgaaagctttttagggattttgaaatttgtggcagtaatgttgtggtgggtgggtgataactgataagagaggtttggtacggtgtcgtttaaagaattgggtggtgcgttacattaagcgtgatttatttttaaaatgatcagaccgatcggtaaccaaagtatattcatgtgaaaaaaaccttcgtagtcacccattttcaaaattttatgttcaaaaaatcaagacaaaacgtttgaaagattgaatacatatttaaatagagttagacaccttgcctttgtcatacagagatgaagagcgtggttcatcatgttgtacgatatttgcaagaagaactagtataagatcttagtgattttaatttgttgtggcaaccaaaacgtgaccttgctttgtcataccaagatatagagcattttacgagcaatggctcaaagattggatgtaatattaagaagttctttgactagagtgtgaaatgcaaacgattatgaatcaaatttaaatgttgatgtatgaacacggtattgagcacggttcaggaatcaaattcatatgtatttgctttcccccaaggtattttgatgccttatttgatggtcttcaaccttgcattcgccgtaatttgtaaggaagattaaaggttctgttcctatcaaaaaaagattaaaggttctagcctcacctagtttggtcttggacttgagcgtgaccctgatgatatcatattttattttatttttgatatagttctcttatttttgttctgtttcaaaactgattagtaaaagtcacatggataatcaggagtttagtataaagttgttttccagaaatatcattacccaatatgcggttcttcactttattatctgagtcgttagttaccaaaaccggtttcaagtaaaatagttcttcgatgttggtaagagttttctgaaactttaccctttacttttaaaaatataaagtaatcatacaaagtcaaaaataatacacaatgtacctctttttcgctaccgtaaaaaaaatattattaaaatgtcaaattgaggtttcgcggtgaagagttcaactcaatttttaagaatttagaaaacctagtgtatatgattgtaaaacatttacgttatatgtataaatgttatattgcgtgttatgtgtattcaagatcaacatggaagaacatggaagaatcacggtgttatgtgtcttcaaaatcactaaatttatgataatataagccaaaacatggaagaatcacggtgttatgtactcaagatcactgaatttatgataacataaaccagaacatgggatgaacatggaagaatcacggtgttatgtgtactcaagatcgctgaatttatgatagtatatgctagaagatttacgttattctctaatagcttcgaactttatgacattaataaactagtagaatttaatatgaattggtcaataaaaatacattatctctataaaaatgaaatctagtttaccaaacttttgaaaagatttagttttataaggatagggaaaaaaaacaaatttagctaaattttctcaaccaattttctattaaatagattcttttcagaatacaaatttaagaattcttaaatttattccataaaaatctttgtttctgttgtaacattttttatttttagtgctatagatgtttttgtttttgttttcttattacgtcatatgatggtggtattcaactacatacaatctgcaacaattccacggtacagttctccctgcaacactcagattttctatgaatggttgtacatgtatgatatccctgcgatggacaaactctctccgcaataatcagaccactatgaacggctttatccaccaggcaatgaggccataaatatttttaacagttgcttagaattgaaaattttcttttttgggtcttgttcaatctcattgggcaagacaaaacaaattgttgtgttaaaaacattgggaaaattcccaaaaaaaaaccgaactatttaaaatctgccagaaaactacctgaacttttttcgttgtcagaaaaatacacaaactaattttgagtgaaaataaaatacacgatctattttttttttccaattacctctcttcaccgtaacggaccgttaacgacgttaaccaaatcgtcaaacactgttagttttatttacagaaaatttctggaaaaaaacctaacttatttaatatttgccaaaaaaatacatgaacttttttgttgtcataaaaatacacaaactaacttaaattggaaatataatacacgatctatatttattttttcgatttccctaaccaaattgtcaaatattgttaattttatttacaaaaattcttaaaaaagcttgactattaaagcaatcctctaaaaccttaagatcttgagtaatatcaaccaaaatcatgttattgatgggtatattttatcctaaattactaaatttttttaaaatatctatcgtatatctagattcgatgtaagcaacaataaattaaaaaaaaaaatactccctttgttaacgaaagttcttcttattaatttcttcagtttattatggttaatatctgaaatggatagatgtgttatattaacactaggattcaaagaggttcaacatagattatgggtttataaggggataaaatcggctttatcgccactcttatttaccacgtgtaaagaaaatgaaaaaatatatttttatttagttaaccttttgtaaccattacgataaagtgagtgaaattggaacacaaaactacatcatgctctttatttcaactttaaactagtttgtatatatttctggcagcgaaaaaaagttcgggtattattttggcaaatattaaataagtcgtggttttttcagaaattttctataaataaaattgaaaatgttaaccgatttggttaacgccgttaacggtcgttacggcgaagggaggtaatcggaaaaaaataatagatcgtgttttttattttcaatccaaattagtttgtatatttttttgacaacgaaaaaagttcaggtagttttctggcagattttaaatagttcgggtttttttgggaatatttcctaaaaacattactattgggcaagacatattgggccaataaacaagcccattgacaatttgcatcatcatcttcctcgtttacgaattaggtcttcctgtgataccaaatttaacatttcccggtgaaaatttcgaagctcaaaactctaatcaaaacatcgcgccaacacaattcagcttcatttttcaaaaaatcaaaacctgtaaagaattcggaaaaaccgccaaaatccaaactttattccaaaaaatcacaaaaatgtctcttcgcttcttctctttttctcacccttctcacttccattctcatccacctaatctcgatctcaatccctctctcttgaatccaatcaaccatggccgacgaaaaagagaactgcgtgagaatgacaagagcagcaacaaaaagaaaagcttccatggaagcggcaatagacaaagaacgaatcaacaagaagagagtcgtactcggagagcttccaaacttgtccaacatcaagaaatctcgaaaagccactacaaaacagaagaagaaatcagtttcgattccgacaatcgaaaccttaaattcagacattgacacaagatctgatgatccacaaatgtgtggtccttatgttacatcaatcttcgagtatcttcgtcaattagaggtaaagaaacaaaacccatctctagatttctagatttcacaatctgagttagtttctcgattaacacaattcaggtaaagtcaagacctttggttgattatatagagaagattcagaaagatgtaacttcgaatatgagaggagttttggttgattggttagtagaagttgctgaagaatacaaacttctctcagacactctttacctcgctgtttcttacattgatagattcttgtctctcaagactgttaataaacaaaggcttcagcttttgggagttacttcaatgcttattgcttcgtaagctttttcttgttttgtttgtttgaatctctctttttttgtgtgggtttgtttatttggattttggttttgaaaaatttgtagaaagtatgaagagattactcctccaaatgtggatgacttttgttatatcacagacaatacttacacgaaacaagagattgttaagatggaagctgatatacttcttgcgttgcaatttgaattaggaaaccctacaagcaacacgtttctaaggtttgattctgattcttttggtgctcattgagtaatgtttttgtgtagtttattgtctcattgcgttttgctttgtgcagacggtttacaagggttgcacaagaagatttcgaagtaagctctttttgaattgtggtatttgcaatttatagagagtatcaaatttgctaagaatttctcttatttgtttcagatgtcacatttacagatggagtttctttgtagctatctttcggagttgagcatgttagactatcaatctgtgaagtttcttccgtctactgtggctgcttcagcggtgtttctcgctaggttcatcatccgtccaaaacaacatccctgggtaaagcattttgcaaagcggttcttgttctaattctctgtgttcactactttatataagaagctaaagctctggtgttgaatgtaacagaatgtgatgttggaagaatacacaagatacaaagcgggtgatttgaaagaatgtgtggctatgatacatgacttgtatctgagtagaaaatgtggagctttagaagctataagagagaaatacaagcagcataaggtaaccctaaatactattaaatgataatttgaagaacaatgttcttgagattcacatgtttctttttctatttggttcaatacagttcaagtgtgtagcgacaatgcctgtatcaccagagctgcctcttacggtttttgaagatgtcaacatttagagacaacttttggtaatcggcatagatagtataaaaccaggtagcggtttcgttggtttctttccttggtgttttggcttgtacatgtcttaggactactagtgtgataaaggatcttaatatatgtttaaagattttggttacttaatgattttttttgtttgggttataattcaagcgttcaacaccaatgttgaaccatgcatttccataaatctatctaatgggttgatgcctaagccaaccgatgcaactatacgtaaaagattgagatcttgtgcactacatattccattctttgacatccaaagctttccacttatcttcagttttcttcgttttgataaaaacaacgctccatctttgttttacattatcgtcatccagacatccacactagaactcgccatcagtcaaagaaaaacttctcaaaccaatattttgcagctgttcactattaggttccactaggttgtatatagaaaaagaagattggtttgagaagtcgcttcttgtcaaaccaatattttgcacctgttcactattaggcatagatagtaaccggcatctgcctatgcactcatgaaatccgtgaatcatatcagcttactggtttaggcgttaaaaatcggtgttaatcggctaaatcggccggtttagtgtttattatttttctttcaaatatgacatctttataagtaaaaaacatttaagtaaaaatataataaaaatacttgattactaaaactaaaaatttaagccaaagatttctatcgataaatataataaaagaatagatattaatttaataggtgataaatgcgaagtttccacgcgactcaaatacatcaaaactttgactattgaaatatttttgactatttattgtgcatgggaaagattttgactatttaatgtgcaatctctttttttgtttcttttcttttttttggtgcaattaaatctcacttatttaccttaatcatgatttcctctataaataaatcacctttccttcctttgtttttgttttcttttcttttcgtattaaattttcttgaacaaaaaaaaaaaggtttatatcttttttacataaagagatttagtgattagatttttcagcttcttcttctttctttaaccatggataacaagttttatgtgaacactaacggcgaacgcaacatctggtccacggcggcggaggagaatatgacaacagcggcgtcatcgtctcagtcacaaccgccgcagatgcagtcgtctaagtttcatcaaccggagaaccacatccatataaatgatggtttctcgagtggtgcttttgatttgcaaaccctagaatcctcttttcgtggactttcttttgcagattcaaatgttcatcagaacggtaatccgatactccccgcccatcaatacaatcaggtgtttaacggtggaggtggtagttatggtgatgggtacttatttcctccaagtggttcttatcaccactatgaattaaaagacttgcaaaggtttaaccagaatcaacagagattgtcatatcagaacgattatgttaatcaatcttataggtatgatactattggtggtggtaatgggatgcttaacaatagtttcttgaatggagttccttgtgcttcaagaaacaatgtttcagattactacactaatatttttgggtatggagttaacaattcttggaggagtaatgaaggttgtacctataatcaagatcaggcggcctcgtcgatggagaatgggaggggctcgtacttttccattgctacagaccgagtatggagcaaggaattggagaagactatctttgtgggtactaaagagacgattgatatgattttcgatggtctcattgtcggtatttgtgagttgatggttgatccttttggtaatgatgttgttaagctgcttatcggaaaatgcagctctgaacagatcattctgattgttgatgttgtcactcggcacatttctaagtttgttaacatatgctttaatccgatcgggtacacacttctaatcattattctttaactttgagatatgattgtgcattgtttccttggatcttgattttctataattctttcttttggagatatcagaactttggcaatacaagttctgttaactagtattcatgagcgtgctaacaatcaaatcccgcgcattatggatgctataagctcggtagcacttcaattgacaaggaacaccaatgccaaatatgtgattctagcatgtttccgcatgtttacttcgtcgcagtgtagggtaagcatctcattcacatattaatctacttcagttctcaaaacctatatagaatatttgtttcttgtcatggagttgtttgctagttttgtttaagcttcaagtcactttcttataccatatagttgatgaaagaatctactatagaacacctcaagtagattaatcaatttgatgtttgagtttgcttgttatcggttaattttgcaatgtttgttttcttaagttcctagaatctgtatgttttaattgagcagatctgacctcaattattttctatcacgtggtataagtaaaatgtgccattattgaccatggatcacaagtttaatcttctttcacaagtattcttgagaaatgacaatctttcttctgtttttacagcgtcttcttgaagttgtctctcaacattgttaccagatagcgattgatcaaaacggatgctgcttgcttcagcaatgttttgacaaggaacgtgttccgaatcatgagataaggcaacgtttgatttcggaagttatcgaacatgcgttgaaactctgcttgaactgtcatgggtaaacatgatatgaatgatatctacacaactctactttctcatatatgatccactttattttttactcacaagtatgttctccttcagaaactatgtggttcaatatgtcgtggagctcgataatcaacatgaaacagatttgctcgtgaataagctacttaggaactatgcgcatctagcccgcaacaaatatggaagtcatgttgtgcagaagttgttgaaactaaggggtatcgactctaagctgattgttgttgacttgcttagagggattgatacacttcttcttgacccgtttggtaactatgtcattcaaaccgcatggtttgtgtctaaggtaatgtcttacagttttttttcattacggtgatctgattagagattttgcgagattatgagaatcttgtttggtgtgtgcaggaagatgtgcgccagatgttgaggtattatatagagcgtaacattcgattgatgaggtgcaacaaatttgggaacaaaattctggagaaactcaatatctagagagagctgaatggtagaaagaagaatttgtttttgatgttgtttagttggtttgttatgattgattcattgtgttgtcattggtaatgatgatggttcttatgtgttttcttgtaactttcgttgaatcttaggaaattgttagacaaaactagacaatgttctcaccaaaacagaatgtctttctcttgtaaggtttgtgtgttgtgttgtgtttttagctttttttctctatgtaaatgattgaattgttcaaagtttattttattttttattttttattttttatttttttttgtcaaggaattcaaagtttattcattttttttttttttataatgtttttctgctctgttttttttcattgcttacttaggtaattttctatattttgatgatatttcttttcgaatgatttgagctttttattctaatttcgttcagaaagaattctacgaaagctaaaaaagataaatacaaataataattactggttgtgatcaaatacaaaattgagactagtcggttgagttggtttagcagatacaaccaacgatagtagatgtgatatattccgaaaagtatttggtttaaatttttgtgaacttcaactaatcaaacttgttttaatgctcgtctagtttaataattcgcaaaaagatttagaattctagaaattaggcataactaactcacgacaatggcttccacaatctgcatatcataatccacctttttccgtttttttccataattactttgtttgatgtgtttaatccgcaccgtttctcaatttgccggtctcccactcacatacctacctttatcagacatggtaagaagagttatgattcgttgacttcacaagacttgttcaaacagacacgtggcactacattattcgttattctaaccaaaaaaaatattgaatcatgaaaccaccgtgagagacaaattccattcactctctctctctctctcttcctttcttctcatttttcaaggacgacggagccacggtggagttgactccgcttaaaccccctccgtcgccaccggcgttcttcaatttcaaaccccaatccaccacccatggatcgatcttccctcctccttctcctctttaccaccaccaccatctctatattcttcttcgatctaaccaccgccgatgaatcgccgatgattttccctcttagctactcttccttaccaccgcgaccgcgagtcgaggattttcgccgccgtcgccttcatcaatctcagctccctaacgctcacatgaaactctacgatgacctcctctccaacgggttcgtcttttcgatttaattaccatttagtcctccagcaaatcctaggtttatgactctcatgtttatgcagctactacactacacgattatggattggaacaccaccacaagagtttgctttgattgttgatactggaagtactgttacttacgttccttgctctacttgtaaacagtgtgggaagcatcaggtgaattatctttttcctaaatgtgattaagcttttggtttgtagtatatcattgcttaagggatttgtgattactactgtttcaggatccaaagtttcaaccagagttatctactagttaccaagctttgaagtgtaatcctgattgtaattgtgatgatgaggggaaattatgtgtctacgaaagaaggtatgcggagatgagttcgagtagcggggttttgagtgaggatttgatatcttttggtaatgagagtcaactttctccgcaacgagctgttttcggatgtgagaatgaggagactggtgatctttttagccaacgtgctgatggtataatggggttaggtcgtggtaagcttagcgttgtagatcagcttgtcgataagggtgttatcgaggatgttttttccttgtgttatggaggaatggaagttggtggtggtgctatggttcttggtaaaatatctcctccacctggaatggtgttttctcattctgatcctttccgcaggtagagtaacttcatagattttgcagtttatatgaattattttagagtagatttcgagcttcttacaacatcactgtagtttcgggtgtttgcagtccgtattacaacattgacctgaaacaaatgcatgttgctggaaagtctctaaagctaaacccaaaggtcttcaatggaaagcatggaaccgtcttggatagtggaacaacatatgcttattttcccaaggaagcatttattgccattaaggatgcggtaagatttcttgtatataactctcagctctcttctcttcacgagtctttagtctccacaagtttttaagagctttctgtttgagttgttctgtatctgattatacaagcacttgcatcacaatccataagacatttaaaacttatatatattgttagtgagttgctagagctatgtaaatacccctgtcatgcctaatggatgaccttccacaaaagattgtgctttttgagcttagtatataaattgtaggagacaaatgttgatatttcttccttattgtaatcgcatgtgattatgtcgtattgcaggtcattaaggaaattccatctctcaaacggatccatggtccagacccaaattatgatgatgtttgtttctctggcgctggaaggtttgtttaaacaacaattttacacttattcaaatttatatcttgtctaaagagtaaggatactattttgaataccattcagggatgtggctgagatacacaatttttttcctgagattgctatggaatttggaaatggtcagaaactgattctttctcccgagaactacttattcagggtaataacttggtaaagtaaattggctccaccctattatattaagtacttgtttgatccttcaggcaagtattgacagttttttcacctttcttcctgacattctatagcacactaaagttagaggcgcatactgccttggaatctttcctgatagggattcaacaacactcctaggaggtaagtatatgcagactcgatatacatatcttgcatgctttccaattttctttgaaagcatttatcatttatgctttagtttcaaagcagagcatgtatcttccagtctttccaaatcaagttcagtttatgttagatttggcttccatgtataaatttgatatttgtaaaatcaggaattgttgttcgcaatactcttgtcacctatgatcgtgagaatgataagctcgggtttctgaagaccaactgttctgatatatggaggaggctggcggcaccagaatctcctgcacctacttcaccaatatcccaaaataaaagttctaacatttctccaagccctgctacaagcgagtctcctacctctcatcttccaggtagtttagccttgtatgtctctatgtttctggtcgctgtcgcagtctctagtcgctagcaactgcaaacgaatatgacctatatctgacattgtatgttctgaagtcagaagtttgcttaatctaaacacttgttgggcatgcttattttgctataatcttttgtaagactctttacctgtcttagtctgaatttctggcgatgaaaaagtacaattactcctagcatttgaaatgttattacttattacccacagtctcattaatgtcatctatagcactgtgattggctacatcggaatttccttttctgttcttttctgttttggtgttaacctgctattgacttataccttacgaacgtaaaggtgttttccgggttggagttattaccttcgaagtatcaattagtgtgaacaattcttcattgaagcccaagttctcagagatcgctgatttcattgcccatgagttagacattcaaagtgcacaggcaagcttataaacattcattctactagctgtactgtctgaggtgctttctttgtgatcaaatagtcccgattgctctttttgttgttaggttcgcttgctgaatttctcgtctagtggaaatgagtatcgcctgaaatggggagtctttcccccacaatcttccgagtacatttccaacactacggcattggtaattcttcttttcctaacaaatgatggtgtattggtttaggagtatcttcatgggccgatgacattatatgtgattgcagaacataatgttgcttctgaaagaaaaccggttacgcctacctggacaatttggaagctacaagttgctagaatggaaagctgagcaaaagaagaaacagtacgtttcctttccctcgtatctaccattgcgctgtggttcactagatttcatctgtttacgggtctaatgtggtgctttaagcaggagctggtgggagaaacacttacttggtgtggtgggaggagcgatgatatcgttgcttgttacttcggtgatgatcaaacttgcattggtgtggagacggcgaaagcaagaagaagctacttatgagcctgtaaatgctgctattaaagaacaagaacttcagcctctctcctctgaaacatctaatgcctgagcctcctcatcactcatagagtctctttacggtctctcgctctttatatatatttatatatttgatagaaagaaaatgaaaccccagaacacaggaaacaagattcctcaaattaaaaacacttttgatttcaagtaaattgatgtagttattacgctattttgatgtacaaggaaagaaagaaaatagagagaaaaatggttggaatgtatttggaaggcttattggcgtgagggtttaatttggtttgtgagagatatgtgtttaagtgatattttatgattttattgagaaattaaatttagtgaatttaagtgatattttatgatttttagttgttaagtaatatttgttaatgaaattcactaacttatatctctattagcgaaataacccgatgttacgtgggatgttacaaaatatgccattgaaaaatatttcagctagtatttaattacttttatttaaaatgacgaaaatcatatcttccatatattcaaattctacaaaatatatcatatcttctgtttattctcaaaatttgctattattagtttctatgaatttatgattttttttgggtatcaacatgtctcactcttaatttgttgcactccatttccatttagttatttctgtatattttaatattattaatatttaaacaataatttctgtatatttttggtagaaatttaagttttatataaaaaattaaatattcagcatccatatatgataaattcgaaaatgcgttgttgttatattaaaaaaactatttaataaaataaaattatagtttagttttaaatttattatattagagatttcacactatcttctaaaacaatatcaactaaaatatttgcaaaccgttttgagtatattttacattcaataattaagaaaacaatttctatatattttatactaaatttgatttgcaagaatttttcatatctcgaaaatttaaaattgactcctaaacctaacaatctctataatatatatatatatattttaaaaaatttagtagtacttgaatgtgtatactttttatatggatatttttatttttttctaaagtcattcaatattttatttcataaaacaagaacatagaatatgaatccaaaataaataactaaaacatagagtatgatccaacggattttaacattggatggattactgtaggatcatcaaatatgattcgattgcgagattacattggagtatgatacaataaattaaatacataaatttacaaaatagcttattaaataaaaaatattatgattatgatttatgatgtaaactagctaactaaaatttttacaaatagtttccaacgctgcagagtgtgggtataccgtctcgtattactatcgacccaaacccgtcctaccatctaattccgttcagtgaaattaaacattattttgttatttttgttttaatagtattttaatttaaaagatatataattcaacagatatcgtagagaagaaatctcggaaaaagtatgttgggagtaattagttgatgaaaaaaatctcggattatagatatgtgaatgaaaccgtgtagaatttctgggaaaaatttagaaatttttagaaacattagttgagcgcaatataaaatatttaaaattttaaatctgaataattaataccaattagatatcttgagagattttggcagctattgttgaacataatatcttatatttaattatcaacaaaaaatatttaatgttagtagtattgtgttgtatgcgtcccttctaacccaaaaaacccattcgctaaggaacgtccctcctattttatctcattttttctttatttttgggctttttttcaaggacctcatccctttagagacccataagggacattgttggagttggtcttaggttttaaatgctcatgataattctgctaagatattctagaagatgtcattgtcacccatgagaggtcgccgatgtcaacagattgcgttgcagaggagcaaggtttagtcacttcggcatctggggttgtcacccgtgagagatcgccgatgatgaaccatgagtcaagaactgcatagcagctgtccccggttgttcttgttactgtctgcaagttaaatatgaattgcttgttgtggaattgtcgggagcgaataaacccaattttcgacggtcaattcgttacattctaaaaaagtttaatacagatgtgttagccatctttgaaacgcacgctggaggtgatcaagcgggtcgtatttgtagaggattgggttttgaaaattctttccgtgtagatgcagtgggtcaaagcggaggtttgtggctcttgtggaggactggaatcggtgaagtgtcggttgtggactctacggaccagtttattcacgctaaaatagttaatggagaggattgtgtaaacctcattgttgtctatgctgctccaacggctagtagaaggagtgggttgtgggatagattaggcgatgtcattcgtggtgtggatggacctgcggtgataggaggtgactttaacacaattgtgagactagatgaaaggtctggaggtaacggactttatcaagtgattcagtagcatttggtgaatggattaatgagctctcattgattgatatgggcttcatgggaaataaatttacttggaagcgaggaagagaagagaggttctttgtggcaaagagattggatagggttctttgttgtgctcatgctcgtctgaagtggcaagaagcgagtgtcatgcacctacctttcttggcgtctgaccatgcgccgctgtatgtgcagttattcccagcggtaagtagcaatcgtggtagacgaccgtttcgatttgaagcagcctggttatctcacccgggatttaaggaattactgcaaacttcttggaaaggtgatatctctacaccggaggcacttaaaagtctgcagagaacactacaacagtggaacagagaagttttcggagatattcagaagaaaaaaggaaaactaatgggggaaattaaacggatgcaggatttgcttgatggacatcaaactgatgatctgttaaagcgggaagaggagctattaaaagagtttgatgttgtgttggaacaagaagaaattgtctggtttcagaaatcgaaagagcagtgggtggtggatggagatagaaatactacctttttccacacgtctacaatcataaggagacgccggaatcgtattgatatgctgcagaatgatgagggtcgctggttgtcgaatgcgcaagagcttgaaactttggctcttgagtattatcggaggctctattcgttagatgaccttgacgctgtagtggagaagctaccacatgctggttttacgagactaaattaggatgagctgaggaggctaagtaaacctttctcaccgctggaagtagaaagtgcgattcggagtatgggcaaattcaagtctccaggtcctgacggtttccaacccgtcttctatcagctgggctgggatgtggtgggtgcatcagtagtaaagtttgtgctggagttttttagaaccggttatcttcctccggagattaatgatgctttagtggtgcttatagcgaaagtgttgaagccggagaatataacacagtttcgtcctattagtttatcaatgtcctgtttaaaaccattaccaaagtgatggtaggaaggctgaaaggtgttattacgaagctcattgggccggcacaaacaagttttatccctggcagattaagcacggataacatcgtagtggtttaggaagtagtgcactctatgcggcgtaaaaaaaggagtgaaggggtggatgctgctgaaacttgacttggaaaaagcctatgaccgcatcagatgggatttcctggaagataaattaattgcggcaggtttgtcagagaattgggtgagatggattatgaaatgtgtagaaggtccttcgatgcggttattgtggaatggtgagcggacggatgcgtttgaaccgttacgtgggctgcggcagggagatccattgtcacaatatctgtttgtactgtgtttggagcggttttgtcatttgataaaagcttccattggagggaagaaatggaaaccaattaaaatatctcagactgagccgaagctctcacacatctgttttgcagacgatctgattttatttggagaggcttctgttgaaaaaattcgggtgatcaggggcgtgctggaaaggttttgtgttgcgtcgggccaaaaggttagcttggagaagtccaaaatctttttttctaagaatgtctcaagggagatggggaagttgattagtgatgagagtggcataaaagctacacaagacttgggaaaatatttggggatgccaattcttcataagaggattaataaggatacttttggagaggtgcttgagagagtctcgtcaaaattggcgggttggaaagggcgtacattgagtttggtgggcagattaacgctaactaaagcagtgttgaattcagtcccggttcatactatgagcaccattaaactgcctcagtctacgcttgagaatttgataaaatctctcgctcttttctttggggcagcacagcggagaagagaaggcagcatttagttgcttgggacagagtgtgcttaccaagatgtgaggggggcctaggcattcgttcagcagctaacatgaatagggctttgatcgttaaaattggatggagagtattacatgatcgttccagcctttgggctcaagtagttcgaagcaagtatcgagttggagaagttcatgatggatcttgggctctcgctaaaagcaactggtcctcgacttggaggagtgtaggcctggggctgcgtgatgcattttgcaaggtgttaaatgggtaatcggggatgggagacagattcgattctggacaaatatgtggttatctaatactccacttattgatgaaattacagctccaattccaccgaatttggttaattgtacagcccgacatctttggcagaatggagagggctgggacatgttgagagtagcgccgtttgtcacagagaataagtggttggaactcttggcagtggtagtagatggcctcacgggagttttagacatgctagcttggggagagtcctcagatgggctctttacggttacatctgcttatcatatgttgactggaaatgaggctccgggtcaagatatgagtagtttctatgggagtgtgtggaaagttctagtgcccgaacgggtaagagtctttctctggctagttgtaaaccaagtcattatgacggattctgagcgaaaacgaagacacttgtgtgagtctgatatttgtcaagtttgtaagggaggcgttgaaacaagtttacatgtgctcagggattgtctggctatgacaggtatttggctccgcattgtacctaggcgcatgcaaccggggttcttcactatgtctttacttgagtggattcacacgaatctgcgacagagtggtaataaagaaggtagtgattggtcgactttgttcgccttggcgtgttggtggggatggaaatggagatgtgggaacgtttttggtgataacaggagatgtcgagatagagtgcgtttcttaaaggatgtagctgccgaagtttctttagcgaattcaaaaaaaagggaacttaggccggtggtggatcgagtgggcaggttaatacaatggacggctccaactgtaggatggcacaaactcaatacggacgatgcctcacgggggaacccgggcttaacttcagccggaggggtattgcgggatagtgagggcgtttggtgcgggggatttgcggtcaatattggtagatgctcggcccctttagcggagttgtgggggtgtactatggcttatataccgcttggggaaaacggattacgcggttggagttggaagtggattcggaggtggtggtaggttttctcaaacaagggataggtgagactcataccttgtctttcctggtacggttgtgccatggcttcttatcaaaagactggatagtgcgtatttctcacgtttatcgggaggctaatagtcttgcagacggtttagctaaccatgtgttctctttgcccttgtgctttcatatttttgattcggttctttttgttgttgatacgctgtttatcgaggataataacgggcctgggcgcctgaggcatgtacgtttgtagtttttttttctttagttttttttaatacaattccggggatttatccccgggaaatcaccaaaaaaaaaagatattctagaagattttatactcctaattttactccgagctaaactcggatctttgtatttatatagatacacaagagcaaaatttttagtattagcacgaaactccattcgagctaacacacctccgccgtttttgtctcttcttccgatctcatctcatctcatctcatcgatcacctactctcaaggttaataacctaagacttgatccttagaaaaaaacaccaaagtccatgttttgattgttcggtcaatatatagtcatggttaattgattaagatgtaactgatctatatgcttcggttcatctgttattgttatatttgattatcgatcatcgttattacgagttgcttgtcaatcgttactacttattagttctgtgtcataattaagctttattagggtttttatttagaataatcgttcacaaactgacatagttcatattgttttactaaaggcacgttttatagatttattgattcatgtattgtttggtttggtataaatcgttggtttaacctagtttgagattctgatgcttaacggtttttttttccgatattcatcatcaagattgtttataattatacataaatgccttcaccatgattggagcatgttacaatacattcactgcataatattgaagattcacagttatagttttactcatgattactctttcattataaatatacaatataaatctctaattaattaatatctctctctctttttctgtttagatttttcagctcctccttgattttcaaaaccatggacaagaattttcgtgtcaacactaacgacgaacgtaacatctggttgtccacggcggtgaatgagaatctgacaatggcgtcgtcgtcatctcagccacaaccaatatcgtctccgtttcatcaaccagagaatcaggtcaacagagttaatcctggaagtcattattatgatttggaaaccctagaatcttcttttggtgggctttctttcaacgattcaagtgttggtcagaatggtgattcgattcacctccctcgtcgaaccaatcaggtattcactggcagtagttctggtggtgctggtgatgacaatggctacttgttacctccgatgggttctcatcaccaccgtgaattagaggagttgcaaaggcataattatctgaatcaactgagaatgtcgtatcagaacgattatgctcatcaatcttattggtataatactgatggtgatggtaatgggatgcttaataatggtttcttgaatgatgttccttcttcttcaagagaccgtgtctcagattactacactaatcgttttgggtatgaaggttacaactattggaggggtaatgaaggttttgactataatcaatgtcaggcctctttctctgcctttgctaaagacaaagaaatgagtgagaggttggggatgagcatctttcagggtactaaagagacagttgatgcgatttacaacggtctcattggcgatatttgtgagttgatggtggatccttatggtagtgatgttgttcagttgcttatgagaagatgcagctctgaacaaatcgttcagctcgttgatattgtcactcagcaaatgttccagtttgttaacatatgcattgattctctcgggtactacacacttctgattcttgtttaactttgacgtatgattatgcatttgttttcttgattgcttttaatttgtatttgtcttttttttggagatttcagaaccaatgctatacaagttcttttgacatgtattaatgagcgtgctaaagatcaaatcccgcgcatcgtggatgttgtaagaacggtagcacttcaattgtcaaagagcaaccatgccatctttgtgattctcgcatgcttccgtctatttcctttgcactgtagggtaagtatctcattcacagtaatactctgctttagttcttaaactactatgttaaagatctatatagaatctttgtttctggtcatggagttgttttctaattttgtttattgagctttaagtcacttatttttataccatatagttgatgaatttgagtttgcttgtggtacaagtaaaatgtgccattatagatcctgaatcattagttaaatcttctttactagtatttatgaaatgacaatctttcttctgtatctgcagttacttcttgaacttatcgttcaaaattgccaccagatagccattgatcaacacgggtgctgcctgcttcagctatgttttaacaaggaccgggttccaaatctagagataaggcaacgtttgattatggaagcaatcgctaatgcattgagactctgcttaaactgctacgggtaaacatgatatgaatgatatctttattatatactttctcatatatgattccttatattgttttactcacaagtatgttctccttcagaaactatgtggttcagtatatcgtggagctcaataatcgttatttaatagacgcgctcgtgagacagctaatagggaactatgcacaccttgcccgcaacaaatatggaagtcatgctgtgcagaagttgttgaaactaaggtggatcgactctagggttattgtaattgacttgcttagagagattgatacacttcttcttgacccgtttggaaactatgtcattcaaaccgcatggtttgtgtctaaggtaaggccgaacatttttttcattgtactgatcaggttagagactttggcgagattacgagaatcttgtttggtgtgtttgcaggacgatgtgcgccggatgttgaggtatcatatagagcgtaacattccaatgatgaggtgcaacaaatttgggaacaaagttctggagaaactcaatatctagagagagctgaatggtagaatgaagaatgtgtaacctaagaatgtgttttgattgattcattgtgttgtttttctttgttttttttttcttttttaggtgcgggttcttgatgtttttttttttagtttttgttaaatcttaggttagtcttaacacatcaagactatgctatcacaaaacagaatgtctttgtattgttgagatttactaggccaggcctgtttttctatcattgcttatttatgttaatttctatgttttgatgaatttgaattctctagtaatacatagacaacacttatagaaaatagtagaaaaatgtctctgttacacatatactatcgatttacaatgataaaatagtataaactattgtactaccaagttatttttttcttgtaaagaaatgtactacaaagttaaaaaccacatagttttttgaattgtttaagcgaaaaggaccatttgcatttcactttcttatgcggctgctagatgtcatcacattactaggccactatagttcacatttttaatacacaaaaacccacttggatctgtatatccacctggatcacatacaaaaccctattttccctttttgtctttaaccttctttaatcaccaagaacagccaaaagaccaagcaaatctcagatctttcatggaccacttctcttacaggaatacaaacaagatggtcaggacccacgttgttgtcggttccagaccctgttgtttctcttgtgccatggaggaaaaagacccttgtgttagaaaagcatggttagagttatctctgagagatatgcacatgataagagatgatacagagcttgctctcacgctcagtttcatctggagatacgccatggcagaccccgagaaccccgagttaccgtctctcggtgtctttgagtgcatgacaaggttgatgaagaaaggtcttgaggatgtagaatgggtaatgactggccaaaatgtgtatgttccttactatgcagctcatatcattggatcttacaccatgaagaagcccgattttgctacaaaagctgtggagtctggagtcatagctccattgcttgagcttatgagaagaaagatgagttgggtcgagcaaagagtcgtcgttagggcgttaggtcacttggcgagctacgagacaacgtttgaggcagtggctgcttacgaggatgaggtggtgagattagctatggagattgcaatgacatgtgttgatgttgtatatgaagagtttgtgagtgttcaagaaaaagaaggaagagtgaggtatcacagtgacttgcttactagaggacttggagggttagagatggaagaccgaaaagccgaggaatgggcaagccaactccaatgctggtcacttcatttactcaattgctttgcttacaagcaaaagtgtatttctcttatttgcaacaaaacatttctcaaggagcttagtcaaatgtggggtggattggttaaccacacttctccttcgggcatcggactaatccggattctttgttatagtaaacaagggcgaaggcatgtatcgggatcgagagaaatgatactgagtctatgtaacctctcccggtcttctgatgattggcaatacatggggatagattgccttttgctgcttcttaaagaccaagcaacaaggtacaatgtcttagagatgtcattgttttatctagtagacctagttgaggttaaagctcttaacgtcagaaaaaacttaggtgatagaataactaaggttcttttaatgcattactgcaagacaaagaaaggttgtgcttactctcacaaggcccaaaaagctttgaaagaactatggaggaataaagtagaaaggagaaggagggagagaaagtttatgagtaagaatcaagattttctgagagagacaagtgttgttgtatatttgattaagcagcaagcaaaccaacttcttcatgtaggagacatagagggagctattaaatgctacaccgaagcaataggcttatgtcctttaaaacttaggagaaagagaatgaatctttatagcgaaagaggagagtgttacttacttcttggagatgtagatgcggccataagtgattgcacaagagctctttgcttgtcggaaccagtgaattctcatggtaagagtctttggacaaggtcaagagcttatgacatcaaagggctttcaagagaaagcttgatggattgtatcatgttcgtcaatggccgctgctttcgtggtaatatcccttactatgctgctcaaatgataagcaaacagatggaggctacgtggctgtttgaaaaggctagagcatcaaagcttggaagaatgatgctcaaggagaaatttcacttaacaggtatattcattttcttatatatatgtatgaatataagttcttgaatcttttctagataaaacaatttcatattacattgtttatctctctggcaaggtttgtcgacgatcacagaagaacccgagaagaagaaggaaggattgatgatgcaaaggaagaatcttgatcccttggagtgatcaatatctatgaagcgattttaattattctatctcattagttttttcttttcgttttctattagaatgtttggtacttttgtgatggattagtatcgatttgtcaaagagtttaagtgttgtactaatcactatgtactagtactactagaattcttatttatatcgttctttagtttataaaatggttgcattaagattgtatttactcatccacatatttactaaaaacaaaccctagtaatttaaagacaattttctccaatgttgttctttttttttatattctttacgacttcatctaccaaaatcataaccataagcatagtattattattattttcttaattgttttccatctaatattagtatgaaacttttccttattgagttttcttctagtctatccttagaatttgaagtgtattgtctatatatagataagatcgaatccttaaatattatgaaaaagttacacgatgaaacactaaaaacataattgaaattcgtgttttcagtatatttatgggttcttagtagttacaacgttgttttcttggcattgaatagagtgaaaacgagtattttatgcgaagtagtaaatgggatagaggtgcgagtcacagaaggtggggaggaccacaaaaccacaattaagttccgcgtgatctttactcattcttttacttgaataatatggtttagtgtagacaaatttctcgagtttgcgtgtattatttggactaaacacaatatttttatcatctatttacaagaaatatcaataagagtaatgaagttatagcaaccatattaataatttgtgattatttatttgatgggtccagtcgctaactagacggtgtgatacatactgtatatgatttaacaaagagtacttttgtctttcaattttgcattggatgcaaagtattgagatatgagtcactagaagatgtgttgtaaattgacgtttgagttgaaatggccatgaaaaaacaatgaacataacagaaacaaatcacaatggtataaaaataaatgacttggggccttgacgattaaattatcatcagaagcttataaatataatgattcttctttctattgaattaatcgatacatcagagtggatttggacatctgtggctctctttcgaggaccgcaaccacatccttcacagagattgtcctcaccactttcggttgaagcgacgaaccttggtttttccctactcttcgaccacctgcaaacaagaatccaaagctcatcatcgcaaaccaaaaccgtgaggaactaactcgatagacaatccccacaccacagctagattcttagcatttcctaacactagcagcatttcatgctttcaaggagggtttatcggtttgttcatcggctttgctaggggaaacaagttaaaaaggatggactcaccagtaccagaaaaccgtcgtccaccatcttgtctatctttggagttctttcctccacctgaagtagttttctgattcccatctttaccagcttcagatacagatttctgacgagcttcagccattaattgccattttaagaacgcatcatctcctccgacagcagcacgagcagcaacatttgcagctgtcgttctcattttgtcgtcatcctctttatttcccttcacatgtcgaaaccacttttgtaagaacactgcaacggtattattaatttccacaaatgtattattaatttctccataccttcacaccctttgaacgattatcttctttatccttctcactgtcaactccaccatcaccttcttcactctgcagcaaaaagatgaaatttgcaatgtctgtgtgttgtagtaaacataagaacatagataatgagctcagaacagacctcactcggtttcttaagcttttctgcttcagcctgtttcttctcccattcttccttcaccttctgattcatttcgttgatttgtagccgaatatctgatgtgataaaagtccggtgcctagatttctcagcatcaacccgctgaagaagcatttttagcttcagacagaatttatcaaacaatgttgaaccaggtagtaagagaaagttagactgacctgctttgacaaccgaattatatgggataatagtcctcgcatcctttcctccacacactgaaagcaaatacatgagaaaaggggaaaaagaagctcaagtattgtatgcaaacaatgcacacgaagttgacatctcaccaaagataagcaccgttcgacatcattgcttatctgctttaacccggctttagccactgccagataagaaaagcatatgtaagcttcgtctccaagtgattcaataactagaaattaaaatagaagaagatatgggaagtatcccaactaatttccgccagctttctttgcagaggattcttctgcaagattaatctttcttcttcttcgtgcacaactctccgagatgcttcggaaacacgaccatcttccttggccccagaaaataattgttcttcctcttcctaaatcaaatgcagacaaaaaatgatttacttcagtaatctacatccagattaaaattgaaaactgaagctaccaggaaacgcaccctgagattaacaccactgactgcagtgacatcattgagctgttcaatactttgatccatagaattccctgctactttttgcttcttgctgcaagttgatccatgcaaaacgattatgattttatattacttggggactcgaaaagaaaagtggtttacacttaaaaatccatacatcagaagtctattattaacgaagaaagagtgacttaaaaaactgttccctgtttctaagcctgagcagatcaattaccttggtggtggaggtgaagaacctaatgtctcaagaggttttttctgaccaacagaaggctttttgggtggcatcctagcattagctcctccttgagaggttcccaatgggccacgagaattcatctgatggatacacaaacaatgttaatgatgtccaattgaaacttttcctatttactgtttatagtagaaattataaaacccaaaacaaggaaaaacaatagatgtccaggttgtcggacataacacggaaaatatgcaagggcttttgaagcgccatagttgccccagcagctcaaagagaagaggcaaacaagaacagtggagactgacttttataatgagaaaactatatattaatagatctcttacagttgtgctggcgtctagttgagttgtcatggaaggagaaacagagcttgcaggcgccatgttgttaggcgtggataaaaccattctagaggactccttctctaagtcctcattcgaagtcattgaggctgcattattcttttcaaaactttgatcaactgattcctgctttacgtgggacactgatgatccttgaccaggtgcagaatttagaggcaatgatgagctgttctggaagtgcgatgtagcgccaccctgaaccctactcggatcatttacagaacttggcctctcaaacttgggcatagtcatcatgtttgtggtagactggggcggtcctccaagaccagttgatcccataggctggttatgtgccacatgtctcatatgggaatcatgaaggtgaggtctcaacgtggaaccagaagcattggtgtttggacccgggaatgaatgaaaactaccagaagtggtatacataggaaaagaacttggtggatgctgcatctggtgctgcggatgtttggtaagtccctgtaccggaactgaactgcctaaggtgcctgaagctgaggacggtagttggttaagatggactgcacgaggatcagactgagatttttgattattgatttctgcgaatgaatagatttaatcaggtaagatattggctcctgcatggaagtaataagatatatctatggagagtatagaagcttttatgataatggtgaaagaaaaataaaaaagaatgcattagtgaataatttataccagtagaaggagcttgaattccaatttttccctggttatagttcacctgaaaacaatgagcacaaattacaaataaataagaatctatacccaatttcaaatgcttcaacggttagcacaattttagttggaattaagaacccagttcaaaaagcaaaaccttcattaaaatagtagaaaacagaacaaagagaataactttggttccctcggacaaagataaagagcttcaaccttatatataggaaaagataactcccaaacgaaaaagggaaagaaaatagaaattctaattagaattggactaaacttttcgtatcttattataattataatgggaaataagattaaatcgtatcagttggtgtacttgaactagtcctactctgcagacattgaccacaaacgctggacgtataaatttagcaccgttttaacatgtaaatgtgggacaaacgcaagtcagtaaactcatatgattagatcatcccaggcataagtctgataacctttggaaaggaataataatctgctaagattggtattctgtaagaaagtaaatctcgactttttggtagtgatcaaaatagaggaaaataaagagtttttccctaattcaatatgttgtatctaatttatgaagctaaaatatatattctaaacatcatttgacttatcaacagttctacttcatgtcagaccattctatgtgcattcaagctaataaaaaacaatagtcttttgatccagctaaattcaaagagcaaatgtaaaaaaagagtaaaaatgtaaagcactagcaagcagaacttttagacaaacaattccaacatgattccacttacaaactaataccctaggttggttgtctggttttagtcacaacatggcacaatatatgcaaaatggtaatacctgctggagtttactaactgccatcctgagcatctgatcgcccacaatatctttcatatgtcgtgtgaacccctctttggggatttcatttttctgcaaaaaaaagtagcagaaggaaagaaatgataatacaatagctttggaacagaatgtcaaatgatttcacagatagacataccttaagtctagcatatagggtacggagctgcagtgctctatctttatcgagttggttcattaaagtaggaagcaaagcagcaaatggtacttgcttagggttgcggtttatagggttaacattcatagggttaacaggcggttccactccccgagcctgttgactactcatcttttgcagtttcatatactgagattcactctcttgattatgggatctatctgattcattaccagtaggattcttttcactaatcggtaacccagttgattgggggacctgcgagggattctcccagagttgaccagctcgatgaaggtcttgaggctggttgtgttgtaaatgaggttcatttgcgcgtttcaaatcatgttgatgttgattttctaaagtcgatccttcttgctccttcatctgagtactttcaaggctatgctgagtctggacattgatattagaatctccaataccattcttccatgtcgaaaactgctgcctggaagaatggttgtttcctataaaaataatagaagcaattggttgatgatactcaaatcacaagttaaactggaggaaaaatcatataatacccaaaaaaggacaaaagacaggattttgttgtagcagattatgcacacaaaatgcatactcagtagctctcatacacctatccacaaatcacaacctatttgtatttcaatatttaatggtgtagtcagaggaaagagatcacttccagcaccagagacagaaaataatgatttaaggagacacgtaatcatcgtcaagattgcagtgaaccaagaacaaagcctaacactaaaatagtatcagcatcaccaacctatgtctaccctggctaataaatcccatcacactgatcaattttaatgactcaacaatcaactagtacaggctatattggcaatgacaaagcttatcccgatattaacatacagaaaccctaacaaactaatatttcatgaccttaactattgctttaatacaggactgaaacttccaaacatgtcactagattagcaaggtttacaatatagcctaaccaaggcatcttcttaagttatccatgttccaagagtaataacctatctgagaaaactgtatatattaaaaacaagcacaactttgctaacatgtcaaagcttcccaaagcagccaatccaagataaaaccaaaagatactatctttatattaactaatagtaccacaaaaattaaaatctcagacataaaatttaagagcgaatttgtagagaaaccaaacctgggtttgtcacgtggggtattgaagttgtcatagaaccttcaatatcacgattcagagcagcttggaacgcgtctacgtcagctcctgaatgcatcgattcatcctaaaataatacaattcgaccggaatcaaaaaccacgaagacgattccagatacatcacacaaaattggattttgaaacgagtgagattagaaacctaacctcatcttcttcaaggagcttgaaaattgaaggatccattgaaatagctggggaaggcaaagagagaaagagagctctcggcgtagatgaattaataggaaacagatgttataagattagtcctaaactaacctcatgtcgtttattagctttgttttagcactgtatgtcgtttttaattttgatcgaaaaaaaacgataccgtttgttatggatgagtaacctcatgttgtttattggtgttcttttaaaaactgcatgacgtttaatggaatacgaaaaacgctgtcgtttgctttattgcgtggagagatatatcaaactttatgtcgtttattggttttggttaagcactgtttgttgtttgcgtgtattgagactaaaagttctggtacagagagagagatacatcaaaagtacagtgtaagctgccgccattaacgaagcatcggcgaaaaaagaagatgaatatcgttggattgagcaaacgtttcttctccgatcgtcgctctcttcacgggatcaacaatgctctcttgaaaacagtgttcaccggtcggaaaccgattctcggattctccggccgatcgattcacgagctacgcaaaactgggaatttcgtaatccctcgtgttttctccgtgtcgcgaaatctaacgacgaaggcttcgtcttcttcttcgaaacaacctgcgtttctacgatggtatttgagaaagctcgaatcacatccttttatgactaagagtatcactacttctgtcatctatatggctgcagatctcacttctcaggtttttttttgaatctttgtagtttttggaatttagggttctttctcatttcattactaattagagaattttgttaaagttttgaattttatctcttgatttaggaagaaaagactaatcttcatttgttattataccaagacaattccaaatttgatttgaaactagatcataatcttactagtggaagaagttataatactttagtaaagaataggtggagatagcactaaaagttggtgttttttaatgaattgttattctcatatttttggtttagtctgtgttctcaactgttgttctttgatgtgtgagactgtacttacagtgtttactgaatctgtatattgtactcttgtgaatttgaagtctttctgtactgaataatggatgaatttagtattggtttgattactcagaaaactcacactccaatccgaatagtctaatcttcttgttattatctcttgtgaatacttattgctaaggtgaaaaaagctttaggtgtgtgtgttggggttcttgtaaactctgtttttcttcttgtcattagtggatttctcttttgagtctttttatgatcatgttgtggtgctcttcccccagtaatatgttagagcgaaactagagaaccttttgttttgttttatttgtgttgactctctaaattcttcaacagatgatcacaatggagccaactggttcttttgacttgataagaacagcgagaatggcgagctttgggttgatatttctcgggccgtctcagcatctgtggttcagttatctttcgaagatattgccaaagcgcgacgtgttgacaacctttaagaaaataatgatggggcaggttcttttcggacctgttagcaacacagtcttctattcctacaatgctgctttacaaggtacataacataatcaaacctctatggattgaacggatttagctttttacggtttctctgcctgtaaatttatggtgctcattatgagattggttctggcacgttgttggtcctttttaaggcgaaaattctgaggaaattgtggcgagattgaagagagatcttctgccaacattgaaaaatggacttatgtattggccggtctgtgattttgttacattcaagtatgtgccagttcatctacaggtaaaccaaatatctatcttattactttctctattgtttgggatgtttgaagacacttcttaacttcaacttgtaatcttctggttgcagccactgatgaatagctcgtgcgcatatatatggacaatctatttgacatatatggcaaaccagacgaaagctgacagctgaacaatgacaagtatgagtgttctgggtcacacgcaatcgcattctttttattcaattgaaccaaccatcagtactagtagattttttttgtttttttggtgtctacaatgcagcaaaagtatcgcatagatatggacataaacatgtatgaattttgatcatctaagcatatatttatcaggaagtctcaaagttccatcgcgttttactgcgaaaacttgcttcaccatcttcttttactttttgttactttcttgtaacattttgactaaaaaaataatttggtttatttttgtttatttaaattaatgccaaaaataaattagggtaggtaaaactagtatgaggttaaccacataattcacaaatgaaaccaaacttaggccacgttttaggtcatattgcctccttgaatcatataacatcattcttccattgtcacattgtggccaaaataaaacactatttatcgtcctaagtatatataattgcccttacacttttgtcctactatacttttaagaaaataacaattggcacgagatatttgccgtcagaaaaaaaaatgatactgtttggtcttccgtattttcttccacaaaaaatgaataaaaacccaatttgatttcatgaaagccatcaggaaatctacacgtggaggcaactaggagctaccgacaatttaatagtgttcgtcgtatacaacggcactcgacatttgggacccatactgaatcttatcatacgtggctcaaatctaattggtatgacgtcagcatgccgaaagggagaagacgcagctaagtgattttcctttattatcctccttcacaaatcgaaagtcgaaaactctttttttttttgttttgttaccattataattgaaccgaaccaatttaaattgaaccaattttttttgtttttctgaattgaactaaattttatcatcccaattcaattcaatctcatttctattataactcgactgataattaaattaatatcaaaaatatctccatttatatgattggtattttttagaaaaaataatatgaagatgaaaaaaaatgggaagaaaagtagaataatttattttatttgtcataaaatttacatactcaaactaaggcaaatgtttacatataaaatatcatatttttttatataaatatatatatttgttattattaaaaacgtatcataatttttcacagttgtaccgcatatttccgtttcaatccaaaatatgttttattcagaacaaaataagagattagattatatgattagtgagtttttaacagaacttagattaatttaatatctaaattcaattatttacattataaattataattaacaatcaatcacaaccttttaaaaatatttcatttattgcctagaagtaactatttttatttttatcataatcttataactaacacctaacggagtcctaatctgaacaaaaaaatgtttcacaccaaatccaaataaattttgatataacctattttccaaaacccaaatcataaaacttcactatccgaaccaaatcaaccagaccagaagaatgtcagaagaaaaaaagatttgttttcaccatcagtgaggaaaggaccaaaatgtctttgcacgattgtattcaatatttataatacgtttataagaataaaacatagaatatacggctgatatttcctttcctattaaaatattttttattttaataagactctctctctttatctacttagttttaagttattgcttgtaacgtcagtttttgggggttgggtttcttctcccttcctacatcctctctcttctctttctctacactttcatctaatggccggcctgagatggagagagtggtggaacacgatggccttccccacccggcgtatctggaatcgtttcaccgttcgcgtcgggtttcgacacagcggtaagctccaatcctctaccctccttttcaccgagggctaagaatcctctgtttcatcatcaatcgaaaaacgaataaaagttgatctttacgagattagtttagattttatcacgttcttttgtgattcttgatcatatctagaaactgtcggtggaaaaaattttagctatcaagaattaggttttgttgctttatccgtgatggtcttgaggaaaaatctttactatggaggatttagtcacctttcggattattcgaacgtttcgataaaacccgaataaatcgttgttaagtgtttttaaaaaacactaaatgattgttcttttgtgttgtaggacttttgaggttagaacatgacgtgagttcttgcgagtatgaagacatacacataatgtggaatttgttacacaagaatgaagatcttacacgcgtaccaatccaacaacaacaacaacagaggaagaaaccttgttggaatcttcttggttcgtatctttgccaaagattctgatccgttttatgatataaaccaaaccattgttgtatttgagagagccttgacgggtcccttgcagtgtggtgtggttttattgacaaatttcgcaaataatgaatccgaggttgcagagttttaaattagctgttatatattccattgcatacctctatgtacttatcatcacatgagtgttgtatatatattacaaaatgctttacatagtttgatactacctatgttcatctacttggtttcattgatcttgccttttcacataagaaaacagaacaaatcttaacttaaaactcccaagttgctaaaaaatggattttgtaatagaaggaaaaactttcttgagaatccaatgataaatttatcaaattttaaaatcaaagcctttttccaaggaaaaggaataatatagtggtatctttatttaataggtctctttagaaagaaaaaagacatccctattccataaaaaagattagacttccaagttccaaattagtggccattattaaaagaaattaaattagcaaccaatgagaaagatgaaacgtcagaatcaattggttagatactgatgtccaaacaagtgtgtgtgtgtttgcttcatatatgtgtgtcggctgcttctaggcttattaaaaggccggtctttaaaagagtattcaacaagtattgtgtgatgatgtgattgctttttctcttttttggttagacatttcacctaacgactctttgatttcattatatgtaactaacgcatgttgatatctatatactctttgcctcttttttttttcccaatgtcaaacttacatattcttttcgtgtgaatcttttatctttatacttgtctcaatcttttttgtcaatcacatcatcacacaataatttgagttttttttttgttaatgaaaatttcacatgccttcatcttctttccaccaagttcttcatttgtcatgacatctaagttcttgtcatttgtcatgccttcatattcaacagctccaaaggtggggatcgcgtcgttgaacactttaatcgcatgtatctcgctggaatgcaaaacggcatcatactgatcggttatggagttataccgatcggttctctatttggtctcatacttatcggttgttgtaagtaaaccgatcagtatcaatctccgtttccagcttcttctcattctcgaatgtgatggtattgacatgctacttagactttgagtaagaaacgatatcagagactcgcttcaaacttcacatatctcttcatcttctgttggatttaataattcacatatgacttatcatatgaagaaaagaaactttgattatgtctctcgtttcgattattttcctactaaaaataattctcattttacaaaagtttctttcactcaaaccaacataaataggtatactcctattttccccaccaatacatgtaacaactctcaacgtgatattgaacatgttaagcatgccttagaccatccttattacatgtctcatactataaatcttaggtataatataatcaaaataacatgtgaatagtttagaagtgtttcttagctaagagataaaagaaggtttaagagcttcaaaccattacaaaaattcttagctataatgtttttcaataaaacaattcatcataatagttaagagacaaaattaagagtctaccattaaagttgctcttagactcgtccaacagtttgaatcctatatttcatcgtccaaattcttttaacgcaaagtgcaaaatcttgaaccctacacctcttaatatcgtgtttccacaccaagattctattgatcgtcaacatttagacatgaattccttgttatcaaagcacaatctgtgttttccaaggtggtcgatctttgatgaaagtgtccaaaccagccaatctttttgaataatctatttattatattgattctgaagaagatgagaaaaatgataaggatcaatatgatgttcgtacgcatagtctaccatatgaaaaatacggtccatatacatgttctaaatgtaaaggtgtgtttaatacttctcaaagttttgctgcacatatgttatctcattacaatcatgagacgaccaaagaaagagaacatagacttactgcaagaaacaagaaaagatatcgtaattacatggaaaatctcaaaagatcacaacagaaggtgggatccatattagtgacataagtgacaatgaaacttttcaaaatcttgtatcataaaagaagagtttgtttatgatttatttatttcatatctcttattcaacttattttatttaaataaataatgcaaacttgtcttctatttatagtatttcataatatttgttattaccaggaatggatatgcatatttgcacagaaaattgtaatctttatttgctctttatattttaaggtttggttttgagttttttttataaaataatttcttaaatttcaataaataatacgcatacacaattacgcatgttaagccatattaattaataaaggaaagagacgacagttataccctcacaaaacttaaacgtaattatctccccaccttccccactctattctcaagttcgccggagatttatactaacactgcaaaattcactcacatttctactaaaatcaaaaccctagtctcgccgggaatctctcaaatccgtaaaaatcttctctattcaatctctccttgctcacattcaataacgaggcaatgttgatttctcaatgtcggagatgacagctgcaacaatttcaccttctttcaacgcaaacgttaaacagaacaaaccaccgtcgtttccatcggaatcatcaaatcgccgcccaaaaacacgagatgtagcatcacgataccttggcggtacttcttctttcttccaccaatcatcaccgaagagatgtcaatctccgatcgttactcgaccggtgactccgtcgtctgttgctactaatcggccgcaatcaacaccacgtcgtgagtctttagatcgacgagaagtttctaaagcggagaggatgttgttgacttctgggagaagcttgttcgcgtcgtttcaggcggattcgtttactccaggaacattagagaggaggaagacgacttcttcggcaacaatatctaagagtggtggaggtaaacaagagaaattgaaactctctgatcaatggcctaggtctctgcaacctagttgtttaagtagtagaagtgtagatttcactgatactaggaagaaattgatcggatctggcaatggtgtagctagagctctgcaggattccatggttagtaatagaccggtttcgcgtgagcggataacgagtgttgatttggagacagagagtgtttcttctggaagctctaatggaagagggaaaatgttaccagctcgtggcaatgtggttaaggcgagagtttcgcaggatcggttagagcctagctcacatggactgaggaagatatctgtggatagttctgtattgtccccaaaggaagccaattgtttccaaaaagtgagcagattcgacctgcttcacctagtaaatttggtatgaatgcagctttgtcaagtccgagaggaactagcattgctagaggtttaagcccttcgagagaggttgttcctccaagaggggttagtccttcagatagaatgagtccactaagagtgagaagctcactgagtaaaaacacgcctttgattccgcattttgctgtggatggtaaagagaagatcagagataatggggttgctgatgctcacttgttaaggctattacacagtaggttgctgcaatggcaatttgctaatgcacgagcaaatgctgttatctcttcacaaaagatgagagaggaggttagaccttttcttcctgaatgctttagaatcttgattattgatagcacaacagctattggttgtagaaatctgtcagtttcagtcaaaacaatctcgtacgtacatctgtgttgtgttgaaaattcgaatttatttatgttagtacaggcttgtctctgtccaagtgattatatttttcattgcagagaagactgtacaatgcatggagaagtatctctaatctgtataattctgtcagcatgaaaagaattgaaatgcagcacctgaagcagaatttgaaactgatatctatcctcaatatgcaggtaagttaatccgcttttgttatttattgaactgcctttagcccctgtgctcttttagtaacactatataagttactctcagtcttctgttcttcccttttctgttctttcttttatatctctatttcggttcctttgtatgctctgcttattacagcattgggacctcctaaaagcttcatctaattgaattttacttagccagaaacttaaatgtttttcatgcctatgtatagatgggacatctagaagagtggttggttattgatcggaattatatgggttctttggtaggagctgctgaagctttgaaaggcagcaccctttgtctacctgttgattgcggggcaatggtttggctattctactcaaattattttttagttatgtgttgggaaagcatgtgatccttgctgatgatcatgttatcgcaggtaaatgtacaaagtgttaaggatgccatttgttcagcagttgatgttatgcaagcaatggcatcttccatatgcttgttgctgccaaaggtgactcttcttttctctcggataatgtttatggcacaatcttctattgcgttttattcatattgtatcttcaaagtgaaagccaatatcccaggttgggaaaataagtagcttggcagcagaacttggccgtgtgaatgccaaggacgaagggatgctcgacgtgtgccgggaccttctaaacacaatctcagctctgcaggtacaatatctcaaattcattatagatttgtctgcactatacctacagtgttggggattaatctctaaactatgcaggtaacagaatgcagtttgaggacacaggttacacagctacaatagtaaggtggcaaagttaacaaaacagagtgtaagtaagaaagctactcattatcggcaattttggagttatgagaatgtaaggagatcatctaattcaaatagagaggccaaattcacttgatagtttaacaaccaaacaaaagtcagttgtaaatattttcgattcggttttctaatgaatttagtatgctgttacttcagaaacaaaggaattgaatcgtattgtgtattggtaatagaatcaacaaaactgttccttgaaattgaaatttgatatttacatttgataaacttccaggtcttcaacaaagacttacttcaggcgaggcttcttagtcgccatcggactcatcacttcgtcgtccggcgaaaatccctgcaccggtataatattaaggtcaaatccacggtggctactactgctgacgtggctagtagaccccacaccttccgagttcgaaacgccaccatcgtagtggcaccgcttgtggccgccgagagcttgaccggtggcgaaagatttcccgcaaaccgaacaaacgtgagatttcacggcggtggatggtgtcgatttatcattctctccaccaccgtataagctccggtggctcgctttatgaccgccgagagcttggtaagacgaaaacgtcttgtaacaaacgccacacttataactcggcttctccgcaaccgtcacagagtcaagatcgccgccatcccgagcaagaagcatgagacagaaagctagatactcttcctcagtgagacggtggttatgatgaagatcagatctcgaacgtttggatcgtttcttacatttggtccactgctcaacgccattgaatcttaagggatcctcgaccaatcttggtgaattaagagcttcaagcgccattgctatagaaaatttaaaacctaatttgagagcagagagatatatagaagaaggtgaagtatggagaagaatcttgagaagagaggaagttgcgtgagaaagaagagtgagagtgggtggccaaattggccattctaattattttaagtatttagttgaaacgaaatatgtgctgagcaagttgtttgttgtaagttgtaacgaaagtgaatgtataattaaaatattatttcaacatttggtgagagtggaatatattaattttggcacgttttgtgggggagagaaatgttacacaagtcgggctatatactcttcttctgactagttgagagttgacatttgaatccaactacacacaataatgattgattctttaaaactaataaaaaccttgtctctaaacttaggccgtattttacaattaatattcatctagcttttcatttatgttttaacactttgcttatatatgtagttatttatttaagtgtaggtttgttgtacctttgggaatttctgaacaaacccaatagcattcattacttggtccaaacatttgaaaacggaggcaatgtgtgtagattaagattataatgaggaaaccttgaatataaaagatgattggatgtttcggtagagaactcatgacaacaagaaacaaagagcttataacttaattcccacagcccattgcaaccaagaatcatgaaattttctttattggttttaattcaaatgcgtgaatgtctagagttgaagttacactaaattggattcaacaacttgtgtcatgatacggtataagagttttggtttaatggtcttctctttagtataaggttttgggacttttcttttaaagttaggattatgggtgcttttttcacgtttaggttagaatctaagttgtatcatttttactagctatttacgttataatatagattgtataattacttatataattaggtctttatgctaactaaaaaataatttccaacaattaattaacctaattctctaagagtaacctatctctctctcttttctcacattacgagatctaaaagacacatcatgttagatgcctaaaaacgaaaagcctaatgaagtgtaatgattcttaggcttgctgcaactaacgagtttaagacaagctaccgaagcagatataccagcaaagtttggtggcctgagcaacgatgaccttcgtaaactcttgaaaaacatatgggtcatgcatgtgctttcacgaatataatgtgtgcatatatctctaaacctttagtttttcctttcacaagcggaagggggaccttttgggttatgttgcaatgggagaatcgtcggtaacagattatgcatggttgaatcatcaatagcttaacaacatctagtataaacttgtgtgtaatctttagaaagaaaaaactttataattaatctagtaacgggatgttgaaaaaatagatc

SEQ ID NO: 820 - DNA, 5880 bp, Arabidopsis thaliana
taacaaccaatgaatagctaatcggtgagattaatgcattgtaccttaactcaaacttagagacaagaatacatttccgagctgtgtttctttgtttttattatggacaatgacttttgacttattaaattttatctgtctctgtaagggtgatcttaagacaagcaaacgagtgtgaatctgatcttgtcggaatctcaaattattccgtgccgtcctttggtcttctactattactttgttcattatcttttaacaatatgtattataggaatttgaatcaagctaattagacaacgaccacattagcatgcagatacatattctagtcacgagtaaattgttgtttagactaaaaagtagctcgtctatattgtttatcatcatctttaattacgtattcaattcttattgggttaattagattcgatttgtagttagaatatttttttaaaaaattagttagtaaaaatgttgggttgtgaattcactttttttggactcgctatgtgatccgacactcggacattaacgataatatctacatgtctacagtttaattagtttaagcgaatcgtgaatttttttcttattggatggatcgacactccgaaccccaacgtaagatcatccatgttttgcggaaaaagagaaattattcacatctggattatagtatttcattgactatttattttcccaaacgttagaaaactaacaaaacaagttcattgtcacaggacatttttgtacataacgtgcattgggggcgccccatatattctttctttactctatttgtgattgtgtgtacattaaaatgtttaacattcattgaaaaacatgaatccttctatatatatatagaatatactaacattaatgtactcgtcatgcaatggagtggcataacctctttgactctgtctaaacttggcttttaccgaccccacaagttgactaatcgtagttgagcatggtaggttaagaacattaagacttgttcaagatacaatgagattttaaaaccctgattttataatcagccatcaaatatttatattccttctcaaagttattctcctcatgtctctaatataagcttgaacgttgctatatataaatgtaaaggcgaacgcataagaaaagaaaaatggagaatgaagcttttgtagatggtgaattggagtctcttttggggatgttcaactttgatcaatgttcatctaacgaatcgagcttttgcaatgctccaaatgagactgatgttttctcttctgatgatttcttcccatttggtacaattctgcaaagtaactatgcggccgttcttgatggttccaaccaccaaacgaaccgaaatgtcgactcaagacaagtaagtttaagtaaaaaatgttaagtttcctatgtttacatttgtcgaatattaacccataacggtaatgcaaagcaggatctgttgaaaccaaggaagaagcaaaagttaagctcggaaagcaatttggttaccgagcctaagactgcttggagagatggtcaaagcctaagcagttataatagttcagatgatgaaaaggctttaggtttagtgtctaatacatcaaaaagcctaaaacgcaaagcgaaagccaacagagggatagcttccgatcctcagagcctatacgctagggtaattcaagataacctaaacaaatattttcattgttgatttgagtttttaggttttgtggaataataatgttgatgaatgttgcagaaacgaagagaaaggataaacgataggctaaagacattgcagagcctagttcctaatgggacaaaggtcgatataagcacaatgctggaagatgctgtccattacgtgaagttcctgcagcttcaaatcaaggtaacgactttttttcttgttggagtattgatcgtttcttgtactgcaagaaaccatgtaaaactcttacctaaactctgttttaccatttttcctaaccaaacacttttgtcgtttttggaaattttgcaatgtagctcttgagttcagaagatctatggatgtatgcacctcttgctcacaatggtctgaatatgggactacatcacaatcttttgtctcggcttatttaagacaaaatcattggaataacataacttacagtacttgttttttttctcgttctatattcatgattatggttattttttgtttgagttgttcaatttttctgtctattgcgttctatgaacttgacactctttttgtaattattatatgctaaagacaatttggactaacagcattttaattttaatcttcttttaagatgtacctgaaagtcataaatattattttaaggactaccaatatttatttagatatcaattcaatatcgtacgtactagatgtgtttatttaatttcataaatattagaggtacttttcagattttatttcggaagctagtttttaacataattaccgttgtatacataattaaaaggcgagttagaatttatgaatacgaatatttgtgagtgcatgcgcagtctctgcgaaggggatcggacgtgctaatgttttatgcatttatccaatattatcttagatgttttcagaaggacatgaacaagaatcaaataatcgaaccgtgtcttgtgaagcatatatgagaatatattctcagtttaggaatatattagatgtcactttcttgtgattttattgcatcccatgcactgtttttatttcctaccacctaatcagatagtgttgtctttaatgaaatgcacgatttatatgtgcatatacaatatcttatttagaggtagaccataaaattagaaccctaaattatgataaatttgtaaatttatttactttacataaacataccatgtagaacttgaccaaatatataatatataccgtgtcgaaccaacagactggtggtaattactgatttgcataagccatgcaaagtgtgaatgcaagaattatcatatatgccaaaaatttaaaccagaaaacaaaaagccgaaaattacgaaatatgcatttaaaagttttaatcgttatacaatactttgttttaaagtaaattaatcatttgggtataaatctgaaatcatggcttgcgaccatgcaaaattaacataaacaatgaatattccaaatagtagaaacgaatgttgaagttgagaacttgtcaacaaataaaactattttgtatcgttcaaactctttgttcatttccattcgttattatatataatgaatgaaaacaataatcaacctgttattttcaatatctctctctctatgttttacaaacagaaattttagcggttgacggaaaatcaaactgatacaacacccaaacaaggcctaatgaagatgcgagcaccggtaacggtccaaacatccaaagcaacaacggtatagaaacacacataactctgttcccaaccatagccataaaaaaccctctctccaacaccaatcttgtatactccctaaacgaacttgtccccgtgatatcataagcgcagtcacagtctccttcatgctttttagctattgcgttgataaggaaaattgcatccattaaataactcaaggcaattgagctaaagaagaagcttgctgcaagaagtaacgaggctgaggcatattttaggacaaagattttagcattttgtgagccaaagaagatgtcatcagcggcagtgatgagatgactggctttaaatgcgttgttagttaccgcagctagagaaaggaagataaggatggcgattgtagcggttagaattgtcaccatttttttgttcctcaagctttgtacggccaacatcccagtcttatcgtcaccctgcgttttcattatgatcaacaaaacaggaagaaactatttattaaataaaaaaacactacagaggcattagggatttaattgatttactcctaaaagcaaaactttttcttagcgtttacatgtgagttattttttttcctttccattttcctctaaatatatttgttaaatgtaaacacgacgatatgattattccgtttcctcgaagatttttttaaagtaatacctatagattgttcaaaggtatttaatagttgttaagaaaaaaaatacaaagacataagggggttgattgtttcgcaaagttttgtctttgtgttaacatgtgaattacttttcgatttttcactaaatacatctaaacgcaaacaccattttattccgcttgcgtttatacaactaataaagattttttttggtaaaaacaattaaggatctagattgtttattaatatgtaaaacaaaagtgtgtatgcatgtttacgtattcatatttatcatcttttgaaaattttgagagcaaacgtaaaagaacaatagaaatgtttctaaaattttgtatatttgcctaaagttttaaaataatttttatatcataagtttatatacatataagcgcaaaacaaagtgtacgtaaacaaacttctaaaaacagaaaagaagaagaacctctttgatgtcacggaaccaagatttgcgttttgaggaatcaatgccaagtgaagtacgagaaggattgtgcttgaaggtgttccatagaaagacatggtatcccacagctatcaacaaactcaatggcactacaatgctgtctgtgtcgatcttcattctcattttctcctctctctctctctctctctctctctttttcctcaatttggactaatactgattctaattcgtattgacataggaatatatataaagatgaaaagttagtggacaaatgggattcatagtcagatatcaaatgaaagtagtggacatctctccattgtcttgttggtgttattttggacgtatacgcaactaattcttggtcggagtattaacaaaagttaaatatttatgggataaagtaggacatatcaacatctgactatacactcactttacctattattaacaattattatagtaaagcactatctaataggtatcatgtaaaacattaacatgcacaagtgtaagtagttggttataataaaaacatatatcaaatattcatatgtattgatctttttaatttgttgtatgtatttgacattgaatttgactttgagaatttttattaccactttatttttcctgcacatcatgtttctgaatttcaaagtagattaaaaactaacatttttttctgttcacattcttaattgttcttatatataccattcttttctgcatttgtttatccttaatctttgacatatttattcttttctgctttcattagatcaaagcgataagaaatcgatatggtgaaactgtaaacttttacatttcaccaacaatgatttacatattatagaaagaaaacaaaaaggaaaaaaaaaatctaaattaaataattagttaataggatgaatgctgggagaattttcaccacggcgacaattgcgacaacgtcgacaaattcctacaatagaaaatacaaagaaaacgaaaagcatcatcacaggaaccatccatgccttgaaccatggaggatcttttgggaagatcaatgcagcttcttcttcttcttcaagttggtatcgtgtcaaagatttgatgtgtattatattatagtttataaacaaccaccaaaattttcttctcatctcctgagtttcctttgtctaggagatgagaagaatgacaagacagtgaaaatttgttatcccctgaacatttgtttaatgatatgctgtgttttgtttaaaggtttatttttagtgttttgctatattttctctagatcttttttggaacatttgctattttgggattagtttggaaactt

SEQ ID NO: 821 - DNA, 45911 bp, Arabidopsis thaliana
gatcatgaaaatagaataactaatgtaatgtgttcatctttctagatcttttccgtcatgcattcaaaatttcacgtaactcaactctgtaaaaatttgttaaaaaggcaagttaaatgtgtgacatgcataaatttcattggtaagcaaagttagaagagttagggagatagacattctaggcttttattttcaaggcatggatggttcctgtgatgatgcttttcgttttctttgtattttcaattgtaggaatttgtcgacgttgttgaaattgtcgccgtggtgaaaattctcccagcattcatcctattacctaattatttagattttccccctttttcttttctttctataatatgtaaatcattgttggtgaaaatgtaaaatttacagtaggaattgccgaattggagagacaatcagttcaaagtaaagaaaaaaatgtgttagtttggacgcacctctatggagtgacttggtcacggtattttaggatagaactagcaatggatctagcaaaatattaattgttgtcacttggccaaaacaaaaacaaacaaaaaaaatatagtgaggagttcgaagatttttggggttaacttaacacaggttatgaaaattgtttcatcaaagattatggtcagatgggcccgccttttaatagtcctcaacaaggatatggtctttgagtttacttggactttgaacgtaagtgtatgtaacatatgatttctcatgataggaatcacatattcaccgctaacacaacctaattttacttagaagttcgagattaaatgtgccacatagcaagaaattggagaaattcttacagcagactaaatgataattaaaatatttacatattattagattggatagaatccctcatttgtaagcaactagctaacaaggaataaatatgtgacaatgcgttgaacggtccaagaatccttcaaatgaaatgtgtcaaacctcagtgttccaagcaatcttaaccactctggaagacccctcaaaatttcaagatcaaccgaaagatggtgataccgaaaactataccctagcacaaatacatactaaacaaaaacaatttttttttgctaattactatggtttcattttaaaagtacgtacacatggaaaatgaaaacaaacaatacccaatattaccaatcttttatttcacaaagagataccaaagaaacaattgatagaagaccccaaaaaatgaagatttgaacgcaaacaataacaaatactctataacaaagatgaatacagacatcaatccatcatcatataacaactaaacagaagcagacaagcttgggacaaaagagaaccaccgaaacccacaactccatttctccggcaacgaaggacatttaggaacccaatgccatgtccttcttccaacatgaaaaaacagaatctcaggccaattgtaacaacacacacaaatcatctccttatgccacagacagtacacatgctcgtagttatggtaacaaaccgaagtaaacttcctacaaacaatgtccggtaatgtttctacttcgatccaactctctgtttcttctttaaattcccaaatcttgatactcctacaaatcccattgctcccaattcctccaaccatgtaaagtatcttcttctctggatcacttactaatctagcaaacgtgatctcatcatccgccggaaaaacaccgtctccggtggctgttgtccactttccgtcgttgagatcaacgctcacgattagaaaaggctcggatctagcgaaatagagtgacccattgtaaaagactccatcttggttaaacccacgaggtaaaacttgatcaacgccgccgaattttctccatgagcggtcaccggaatcgtagagacaaacggatcttgaagaagcggcggaggacgatgaacaaagagtgaagattttgtagcctttgggggatgtcacaagagagagaagctcaaagggaaaagggtaacaaggtaatttgatagatcttgaagatcttgttaagggattgaagattgaaagagaagaaacagaggaaggtgagagggagaaacagaggaggccgttggaggaagagagaagagaagaggcgcaggttagtgatagggagcgagggagaggtaacgtgcaccaggagatgagattagggttaaagagagggaaggagttaaaagattgaggatgagagaggagaagaaacgaaggaagagagaaagagtggtcggagatgaaagatggagagaggattagagatcggagatgacgtgagattgatcggagagtgaggagagttttgaaaggaagtaaagagaggatgtgttcgaggaggtggtttggtaagttagaccagatgtttggatccaagttggtcggagaagatagagcggtgggggaagattctggtgaccagtagaggaaagtggaggcggtggtggtggtggtggtggtgatggttatgggtttctttccgtgagctctgagacggaacatggtgagaaacacgaaagagaaggttgaaccaacttttagttcaagaagactagagaagggaagaacgaagaagactcaacgtttgcgactttgcgactttgcgtctagaccggttcacatttgggatgtggggaaaataataaataaaccggacccttatttatatttaccatcggttattgttttggtcaaacacagtattaattttacttttttgaaacaatgacatttttttttattaacggtaattcaaatcgaaattaattcgaaaccagaattagcgtaaaatcgaattaaaccggataaaaaattagaagtttcagttctaatactttaattatcttacaattaaataatttagtcaaaatgacttagttatatatttaaaatgaaatatgtatatatatatatatatatatatatatagataattgatttgaaccaaaattctagcttggttaatgcatttcttaaaagcaggcatactcaatgggcacaatcaccaaaaactttggatgatatttgttttggctcaatatgtgtgttatatgtattaaaataaatgaatatactacaaaccattttcatcattcattaatgatacttaaaggcatataagaaaaaatattaatacaaataacaaatttctcttttatttatttaaaaccgtatataatccttgacaaaaaaaaaccccgtatataatccaaatcaaaccagagaaaaaattcagttatgcattatttgaaacagaataaacaaaaccgaaaacttaaatgaggacggtgctcaaattcacgtattgggcagtacaactaccaaaccaagtggttgttgacttattcccgagtatcataaaatcaagtgggaaaatactatacaattacacatatataatatatgcacattttatttatagatgatagttatcaattaatcaaactggaacagttgattacgaagatgagattaatcttaggaccactttttgactttagaatttaatatggttctatcttttacaaaagttctatttggattggtgatgtaacaatcctagtaataaatgagtaggaccggtgggataagatcttacccgctcgtctactcggctactcttatggcaccgacgcctacgcatgtgttttattacttatatgtagctcaccatttgctcaacaaaaaatatagctcactcggatattcaaaacactttttttttttggttttttaagtgagttttgataattttggattaattcaaatcaaacatcgaattggaggtttatgagtaggacttagtcaaatcatatatccgattaaattcgtctaatcaattttaaagataaaccaggtcgaaaatctttttgacccactaaaaatttaactagggtcttaatattagatttgatggatatggttcaacttattttgcaaaaatagaaaataaaaatttctaagtgcgtagacctaaatttatttatcattttttattattatttatcttggtgttaggtcttaccgaatgccgaattaccgtctaacgattatttgaataaaatacaatacaaaattcaaaaataaataataccaaagttaatgttacatatatatatatatattataccaaaattaatgatgtgatgtgctacatttcccaaaaataattttagattactacaataataaaaatgcattgacacaaaactatttcttcactctttcactcttttcaattttcatttatttatattcaataaacttctcttgtgttgaagtctatcttggggtgatttattttatttttcggtgatgtgagatctggttctcgaaggctatcattttcctcagtcttcaataccttttgaaatatataaaacaagatttctctacaccttgtgcaatattcgtatgtgaatacaaataccgtttaacaaaaagcatggtcttgaatgcgccaccaccatccacatatcgatatacaacatgaaccatatgcatgcaaggccttcctataaaacaccatatgtgtatctttgaaagaccatacgtatcataatgctttaagtaaatataaatttgatagatgtgtgtaaaacgctccatcacatatagtctctatgcaaggtgcattagctccttccattcgattcttgaactcacaagtgacgtgcacgtattacatcaagtgattcacatatacaaaattatccttttaacattattttcttgtcaactatagcaagttgttttgaaaaatgataagtttaaaaaatagcagacaatctattaaaatttaaacctaggtatggacactttccaatatttttgggatagtttggataaaaaattcaggaattttgtccttttgttcttggtttaaatccattttttttttttttgccaattaaaatcgaacaaaacttctgtttggtttcagtcaagaaaaaaactaatgtttggttcaaaagtataaaattttggttcggtcacttactcactacagtctttgatatcacaaactgaaccaaaatttggtttttttttttaataaaatttttgattttaagaattttttttttctatttcagtaaactcaataatttcggaattttgatttcgtagagaaacttttagtatgataaaaaaagaacctattttactgaaactaatcgttttggaggttccgaacccaaccaaaccggtaatccaatcaaatttaaatttttagagataaacgaaagtcaaaccgagtttacttaaattggttcgccggtacgtcatctttctcttctccctttacactctttgaattgactttggatattggtagtttctgcttggaaaggagtctaaaaagaaagtggtttttgattaccatttaggtttctacttagaaaagcatcagctttcgattcttatttcaaggaaatctaaaacgaaaagtgcttgttgcttaccatttaggttctgtttgaaaaggccctagctttagattcatatacatttcaagaaatttgaaaagtaaagtgcttgttattgcaggaagaccatggcgttgtgcttgtatcatcactggtttcacttgttgaagtcaaggtaccatctttattcatctctaggaattgataacattgccttgtgaatgtatatatgcttatggaatatggatgatgttgagcgtcccttgtttaatttctgcagcttcctcgttttaatctaaatggaagatcttttcatgaaagttacagcggagaaagaaagatgaggagataagtcagattgatgctttgctacaacacatgaggagagctttggataaagttgaggaatcactagactgcattcatcttgaaaccgactggaaaatctaatcaggtaaccaaaaactaacttaatccatcaatggattcactgatttttctgtgcagtgacacaagtttgtgtacccatgtatgaattactatgttgggaatgtacttgtcatatggcaatagtttggaaaatacattgcacaaccccataacatgttgtaacttttgaggaacactatttaaatgtgattatgctaagcgctgggaaagtagcagtgttcaatatacaacataaattgtgcttcggatcttgaggtaaccaacaactgactttccgagtagctaaaatcttccttttggtttaattccacgagttagacaacagatcgaaagtttccgaatcgctacacaaaattctagatcatcaatagaatctcactaacaaacgtacatgatctctcttctaaaaccaattccagatcactctgttttaagtaaaagttttactaaattgtgtcatgtttttggtataatcaggtctcacttgtgggattaatgtgtgacaaagatggttcaaaagtcacacgagttagattcactcttgatgatggaacaggccaatttgactgtaaaagatggtaaagtcacagaaactattccttttggtagagaatgcaagagttgtttttaggtacaatggtcagttttgaagtttgtaattggtgttgttgtgcccttttttagagggtggatgatactgtcgacgctagagaaatgtagtctgtgcggttagtatctacggcttaatctgatttgtggtgaaatcacatttagtttggaggtaagcttgtggaacagagatggaacctatgtgtgtctcaatggtcagtggaagacttttctctgtgaggtatgtgcgtctcaatggtcatttgaagagtcattagtatctccagaacctaggatcacgtctagttcacttctaaaacttaagtagtgtgtatttgattgtttccttgtttttttttcaatttcgtaagccaacctcaaaaaatcaaagttgccttctttttaatctgaaactaaatttggttgaagtcagtgttttgtgttgcaagagatatatgtgtcgcatactagaatcaaacttgtaaatgaaattgataaaatcatactgtattacatgttgccaacaaaaacagatacataaactacggaaaaccctaatctgcctcttagacaaacataaaagtgaaaaccctaaacagaatccagaaacaagttaacatatttgaaaccctaattagacgcagtttcactgtggttgtttgtcaacaggtttgcgacagagagggcatgagttattacctcggatcaaccactgagtgagacatggttcatgaaaacaatgagtgcagttaggcaactcgcagtaatcatcggatgtcgacaattcctccaaacagatggcacaagtcttcgattcttcttcttctccttggctcatctcttggtccaaatctgttgccaacggaggcacaacgacgtaaaccttgtgtgtcaatttgacagagacgattatgaataaaggtggttgttgtggcaagtaaacactttgacttgtttgccgttgttgggcttcgacaatcttacaagatatttgctcggacaagtcatgatcgtggagttgggtctggagatgttgatagacgtcgtttggtttgaaacttgggagtgtcagagagattagtgggtcgtgacaagtagaagaatcatccgggtaagatccgagactcgtgacacaattatccttgttgttaatgagaaattcctctacttctctgtattgactgattactaccgtacttaagaaccctaacgacggaggttgagacaaagcttttacatgaacatcgagtttgaaagattcagtttccattgtcgagcgagtgaaactagacaaaactcagagagacagagtgaaatattgttgagaaattagatgatgattcgtaaggaagagagaaaaacagagattgttgagaaaattgtaattgtggagaagtcacaagtgtaatgttgtgtttatataagcaaaaagaaaaaaactctgattataatttgttgtaacgtgttaacctaatttcctttttcctttctaatttcctttttttcttcaatatttccattttttttagggttaatttgtaaactagtcacttttttaaacttaattagaaaagtagtcactttactattcataatttgcaaaatagtcacttttcactgtttgattcgtacacttagattgtacaccacttttagtgtacaaatatatataaaaatacacagcgtacactttatatttgtacactaaaagtgatagtacaatccaagtgtacgaatcaaacagtgaaaagtgactattttgcaaattatgaatagtaaagtgactactttcctaattaagtttgaaaaagtgactattttgccaacatacccttttttttaacaccaaatcaatatttccatttttctttaacgttcattttttattgttgtatttcctttttttgtcttgtttgtataactataacatatctcattatatataccagagcttaagccaattcaatttcgaaccaaaccaaaccgaaagcaaatcgaattcggtttaacttggttttgcaaatcaaattattctctagtaagatgatgatgaagatgacgagagaattgagatgacgaggttgctctctaggacgttcccgtccgtgaagcttcgcgattccaatcctaaagctcccgaattcaaaaatttgaaaaattcacaaacccaagttccgattccatcgtcttcttctccgcaagagaactcaaagattcccaaatccaaatcctggtctgtttatctcattctctccacgaccgaacccatcaaaacatatgtcggaatcaccaccgatttttctcgccggttcgtcctcctctctttgaatcgagtttaggtagattctgatggaaaggcacgagctttcgattcatagttcttaaggaatgtataaagcaaagtgctttttgattaccatttaggtttctgtttcaaaaggcttgagcttttgattcttttggatttgaaggaatttgaaaagcaaagtgtttgttattggttgcagattaaagcagcacaatggtgaaatcagaggtggtgcaaaagcttcaagtgcaggaagaccatggctttgtgcttgcattatcactggattcacttgtttaagtcaaggtactatctctctttatctcctaagaattgaacattgcattgtgactgtatatatgcttatggatgatgattgatgagcttcccttgtttaatttccgcagcttcttcgtttgaatcaaaatggaagatctttacaagaaagttaccgcggagaaagaaagacgaagacatgagtcagagtgatgctttgctacaacaccgtaggagagctttaaacaaagtcgaggaatcattagactgtagttatcttgaaactgactggaaaatctaaccaggtaaccaaacgactgacttaattaatcaccggtgtgctctgcagccacacaagattacgtttttatgctgggacttgacgacaatagcgataagaatatagctagtatgtgggtttaacttgtcatatggcaatagtttgaaaaccacattgcacaacctcatgtgcattgatatttgtagctgttgtaacttttaagaatgataggcaaaagtcaaaactaatgtgttgtaagattttttaattcattttgtgtcttcagtttataaagaaaaaacaagtatagacaatcatttttaagatatattgagaactgttgagtcggcagaagaagtgaaatcatctgcagtagccaattttggttatgttaagcacgttcatgtaccctttagaatcatcactcgtagttcgacaccacttttccatttttgagggctcggctatgtgtttccaaacatattccttaaccagaatgccacaacaatacatataatacaaaatcataccaaattatatactatttattcaacataatcttaaaaatctgttggggttatatgagagcattaataatatgctcctgcttgtataaagaaaataagaaaatggtgcaacccacgtccatttcaggccggtggttttgtttattactccaaaacatgaactccattataacccaaaatcgaaaacccctttactaattcataatcaactatcaccattttcgaccaaaaaaacaaaaatggtattgggtcttcggacaaagagccgtagagacaatggagtattcgttgagtatctaatctcaatcaaagagctaaaaccatggccaacaagccaagtccctgcacaatgcgtccttctcaaatgggaaaacggcgaaaacaattcaggctccttcatcgcggtcgtgggcaaagacactatcatgttcaacgagtcttttaggctaacattaacgttagaacccaaagttgggtccgacaataagttccacaagaatcttcttgaacttcatgtctacgacgcgaaaaagaaagacaagggcgtcaagaacaagcttcttggtacagcatcggtcaatcttgcggattttggcttgttgaccaactcggtccccgttggagctccgttcactttcaagaaaagctcaaggaacgacgctagctctgagatttacctaactgttgaaccggccggagaggaggattacgatgaaggaaataggagtagcggttcgtcgcagccgaagatgagcttctcgagaagatcggtagatggcagtgagtttagtttggcgtcattgacggatgacgatgatgatgcttcgtcagtgtcttcttcgacacggagagtttctttctcagctatgtgtgatgctaattccacggtacgcattttcatattagtgacgtaacacatatcattatcattttctgattaatttgaggtatgcacgtctatgatccaattcttggatattcttggttaagaacattctgtttgttgaccaaaaaaaaaagaacattctgttttatttttcttaataaagaaaacatataaagtagtcattttcccaaatgattagcacatattctctgataattttactcaatagtccaaaatttatcaaaatataaatatatttttttcaactcaatattcttagttttctctgtttttactagtataaatagaaatgtgggcttcttaactaaatagccaaattttatgcaaaatttatgaaggtaaaattaatttgggttgatgaatataaaaagattataacttatttttgtaaattttggatttagcaaatacaacttttccaatgatttgtttcatgaacatggctagtttcatgaacaagaatagatattttagagtctataaagatcactgttgtgtagtaacttttgcatgaatgtgattgggctatcatgatctgaatcttaagaattttatgtaaataagtagaaagtttgagtttcattggtgtaaaagaagtaagacttatattttgacccgttgtatcaaagcagaacacagaagcgatgacgaacggagatgagaagaaaggctggaaacatgtaacgcttaagcacagtaacaatgaagcagcactcgtctctgagatcgagaatctactgagagaagaagagagaaagagacagagcaatcaaccggtcattgtgagcgcagagattgatcagaaacaaaaagaagatacaaatgcctttaagctcaagaaacagttctctgagatcaaatctggtcctttatcgttacctcccgatgcagcgaaaaaacagatgaaacttcggacaaatactcttgccttaggaagaaagactttaggaatggaaggtattccaagacttaaacagcttaagtctattcagttgcattttgacggacacaaagatgatagtagtcacaaaaaggcgagtggagtgatcaacaaggtaggtttaataactccgcaagattctaaaacagagacgcttgaagatgagctgaaggaagcagcggttcttgaagcagctatttactctgtggttgctgagcatactagctccatgagcaaggttcatgctccagctcgtcgtcttgctaggttttatcttcatgcttgtaaaggaaatggctcagatcattctaagcgagccactgcggctagagcggcggtttctggattgatattggtttccaaagcatgtggaaatgatgttccaaggttaaccttttggctatcaaattcgattgtgcttagagcaattttaagccgcggtatggagaaaatgaagattgtccctgaaaaggctggttcagatgaatgggaagatcctcgagcattcctcgcggctttggagaagttcgagtcctggatattctcccgagttgttaagtcagtttggtggcaggtaatcaaaagaacaattttccaaatgaatttgtaaaggtattttcatctaaaccattaatgtgaaattaatcttgttgcagagtatgacgccgcatatgcaatctccagcggttaaaggatctatcgcgaggaaagtttcgggaaaaaggcggttaggtcaccggaaccagggactctatgctatagagctatggaaaaatgcctttagagctgcctgtgaaagactttgtccactaagaggttcaagacaagaatgtggttgtctacctatgcttgcaaaactggtaagagattagcatttagttacttaaaacacttagcagagccagaatcaagaatgttgaactacattgttatagctgcttcattttcttctgtattcaggtaatggaacagttaatcagtagacttgatgtagcaatgttcaacgcgatactccgtgagtcagcgggtgaaatgccgacagatcctgtctctgatccgatcagtgacataaatgttcttcccattccagcaggaaaagcaagttttggggccggcgcacaactaaaaaatgcggtacttaagctcacatgaacagagagtttgttctcaatcacaaaaacattccttttggtatgtaaaatatgtaattaagtgccattgcagattggaacttggtcaagatggcttgaggatcaatttgaacaaaaggaggacaaatctggtagaaacaaagatgaagataacaatgacaaggagaagccagagtgtgaacatttcagattgttccatttactcaactcgttaggtgatcttatgatgcttccattcaaaatgcttgcagacaaatccacaagaaaagaggtaatttagacttgaacactcattcttcttgttccagaacactaggctaattctatttcctctctatataggtttgtccaacccttggtccaccaataataaagagagttcttcgaaactttgtcccagatgagtttaacccacacagaatcccaagaaggctattcgatgttctgaactccgaggttagaaaaaactgtcttcatagtactaataatcagtatgtgtgtgtgtgtgtgttcttgaaccttttgtcttcaacacagggattaacggaggaagacaatggatgcatcacagtcttcccttccgctgcatcgcctacggtctacctaatgccgtctacagattccataaaacgcttcataggagagttgaacaatccgtccatatctgaaaccggatcatcggtatttaagaaacaatataccagcgacgatgagcttgatgacttagatacgtccattaactctatattctctgctcctggaacaaccaattcatcagagtggatgccgaaaggatatggacgcagaaagactgtaagatatcaactccttagagaaatatggaaagaagatggaatacaatgactcttctcctcttatctcctatgtttgactttgacggaaacactttctatgtttcttggttatttgtatgaaggatacttatggccaaagagatacaagtgggtttataagagtaaataaaacttgcattctatttataagattcaaaagattagactaagtcgatgtagtttacataaaaagcaaataaaaagtagcaaaatgaaaagattagacaaagtagatgtccaagaaactaataaattaaactgagcattcataagctatcaaaagattctctggcaatcaaatttagcaagaactcgaagtttctggttaaacattgctcctcaagtctcaatctttggcttcttcaaatttgcgctttgaggaacacttgttgaagctgattctatagctagaagaccagtgcttaaggcagaacatgtcaccaatgaagcttgtaataacctaatggcctgcagtgtgtaatataaacgcataatgttaataggcaatgttatatgttgaaactagacaagattattaacaagcatttacctcttcttttctaatgatgatctcttgaacctcgacatcatctaatcggatctgtttttcttttaccaatccaatggttgaggttgaattcaaaggtgtgatgatcaaatcatctgttatcataaactttgtccctctcttcataaagccaccactgggtattgttgactcatcagtagtgttagtactacctttagattttggatctatcgaaatcatgggcatgagttcatcccaaaaataaacaagtggcttactggagtcttctgacaaacggtactctctaatatgattcgaagccatggaggacacatacaagtagaaagtcggtggcttatgggtggtgacagcatcaagtagctgcttctgacacttgtagtaatgaggaagaacacatttagcttctcgtccgggatcaacacttaagtccttaaagcttttgctcaagtttccaatgcatccaatgatgattccatcgccagctattccccatgcagattctagaggtatagcaagaaaagtgaagagaagatcaacaaagtcatcaccacattcaacaaacagaatgtttccttccttctttacaacatttagtgtaatcgtttggtcaggtgttgattcctctctatcttcacagaggccaggactcggcaatttctgaatcctctttgtactatatgaacttttctttttcagaaatgtatcggtcaatggattatccgatgtagacaaacactccagcaaagtcggtacctacaaaaattaagagaaaatagcataagagcatgaagtttaaaagtctagctgaagaaaaataatacctcttcgagattaacgtcatgaatcttctcatccaacttttcacaatctacgtagccaagatctttaagaacattaagtgtcaacctaacagaggtaatttccactttcaaatcatcagtgatcatgaatgaagtatgatcactcctaacaaatactccaccttcaacaccatttcctgcactggctaggcctcctcttccatcaagctgagtcacttcattcatcaaaacaccacagctacatctcgaggtattaaaattgctgtaactttcagtacattgctcacgttccacaaacttaggacacacgaaatacttggtagcctcggaatcatctaccctcagcttaaggtttcgacatttctcatgattcaaactgcccggatacaaaagcatttgcttacaagcttcagtcaagaaatgctcaatgcccatactcacaacacttgcatatatattgctgaaacagcctattgctattttctgtgacttcttatacatctccagcaatctaacaatcgttcccattggcaaagtaaaaaaactaaagagtaaatcgacaaaatctttacccgcctcaacaaatacaactttgtttttctcttcatctatgagtagtttcaacttaatcaccggattcttcaaagtagctgacatgtcttgatacaaaatctgcactgatacaatgaaaaaggtcactttttacacagccatgttagagacgatagctacattgattttgtataaataggtaacaattttataaaagctaaacagagcggagtctgttcatatatcatacatgctaaaatacgtaacgaggctaacaatgaacaaaaacctcagaagaacatagtctaacgtggcatcaaagaaatggtttcctagtgcttagaaacagaagaaactacaaacacatcaattcttggaaaaactactttcataaatattcaacaatatgatctatatatgctgcgtaagattttaccttgttagagtaaaccaagcaattgtgttcttttcataggacttgaggttttatataaagcttaagtggaggaagtggaacagtttagagaagacatggtcaaaggccttaattaaaggtttcgggaatggaagaggcaacaaataacgaagtaaatccaattcgccgggttcatgtaccacaagttccgaaaagaacacaattgcttggtttatgttgtttaattataacggttcaagttctcataataactaaacggaatattaaagaaagtggatgttccattggattcaatcaatttgatatgtcaacataatcacttttttctttcacaattccgagaacataataagagcttttggacactcaagtcatcattgaataccactagacttggtctgaaaccataaaagcaaataaagaacatataccaaatccacactacaaagcagatgatataagatgaagtttgagaggagttattgagaaatgtaaccatggatagtgatcttgagaaatatcacactttcttgttaaaagtttcagactttacccatcagactggttcacttctactctagaaaacttgtcagaatgaaaaactaaagaaaactgaaacatacattccgcaaaagctttcattttgctcggtcacaaccgcgcttattagctcacaatcaaagaaagtataacatactattgtaacggcgacaacttctatagccatgttctttcagaagaacataaacactcaaaagtagtattcatataagaatagcttagaagaacaatacacatcccaaacctctctctctctctctctcaatctctacacaccaaagttagagcaatgcagagatttctaagcaacacaatgagatgtatctcacagtcacaggacaagaatcagtttctccaattagtagaaatgctaatagacacaacatctttaaaattaccaattcctataaaagttcctcatgatccatacattctcactacacttttagcaaaacaagattttgatttgagaacagagtaaaatttgcaattgtgaacaaaatgagaaattttactttaggctgaatcagtctttgctttccctttactgaagaaatcatcgatacgacgagtcccaattggcggcgccggaatcttcttgtcggaaaccgatttggtatgtttgacaggctgagccggcaacggaagcgagtctaagaggaaatcactagtaggttggtgtcttttcacggcgattcttaaatgatcgagattaacagtcttacgcttcttctccgccgtaacaacagcagatttctcggcgaggaagtggaggaagagttcggtggagtaagtgatgacgtgaagagcttctgagttgattttgttgatgtctttgtccagtttcattatcttctttactcttccgattggaaactctggtcggattgatccttcttcttcctccatggattttgattttgattctgttgagaaaatctgattaaggtaatgaattgtatatgttcgacatttttagggttttgagatttacgcgctctgtcacggcgggaaaatgaaaatgagcaatgagaaaacatgtaaaccggattaaccaaaacagcccgaacgaagattttgctaattcgggttttcagcttaaaccgattggtgagattgagaagaacgtttggtaacccggtatggttcgtagatttttatgttgtagagattgtttctacatgagtcactgtctagctcaaactagtactagtagtctattttaaagttttatattgaaaattttaaccgattctttcttttacttggatcacattgtacaaggaattctagaaagctacaagttggtacaaatctcctagctacctgaattgaaccccattgatccttcacgaacgcaacggatttaaggagtggcatatcgaactagaaatgccatcaaataacaaatgagctttagagatagttccaagtgtggataatgatttgagattatacttctatatggctgtaggaagcctttttttggctccgagatgtttctaatcttgagacttgagagaccatctactacaattgtagctgtttaatttgttataactaatccgtttcctctttactattcgcagcttttcacaaaattcacacacaacactccttcctctacaacgttttgaggttgtagacatgaaccaatttcataccattggaacaagaggctgttgaaacatctcatggtcacatattgagtactagacatgaaccaaacacatccaacaaagtccatttacaacaatatacaagaagaagctaacttttcgtatcattggatcaaacccatcatcttaattcttaatagttaatactaaagatttgagccaccaataatgacaaattcgaatattttgactatgaacagtaacaaaacaacccaacacaagaaaaaatatcacagaagctatcaaatctgtttctcatctatgtgtatatatatataatcaacttacaagacagagagtgagagagttcaagagagaagaatcgtttacaaagtatacaaatttcttgagaatcatcaataaggacgattcggtggctgaaccgtaatctgagccggtaaaggtctaccagttccagaaccaccacaattgctacaagccgcacgacctgaaccagaacacctacgacatccaacgtcaccatcggaccatcgagaacagaaacacgtgactcgtccagtaccgttacaagtcggacaacgagggaattgaccagccataggcttttggtccatgactgatttgataaagaccgcaccggctaaaacgctgattcctgtagctaactgggttatgacgatcggactcattgttggtttcaataagagagagaggtttggttttggttgccaattttggggataacgcaaaagtagaatcgtgaagaaattgaagaagagagacgtctcgaggaaaaaataaaagttttttttttttttgtgttcagacaaaagtgtggtcttgttttaatttgatacggttcggtttatttttgaagtaaatacaattttgggagataagggaatggttgagaaagtaaacacgtgggctagtgagggttaagttgttgtgtgaggagatgaatgaaacagccgtgttttttttggatactccagtttttggatttgggtttttattgggctgtgtgtgtaaaatatcttctacaagtgtacaaccttcagatttttcttttttttctttttttttttcgtcagatttttcttttttttagattatcattgatttatctgactgcttgcttttttttttttgtcatcaaagaagcaagcaactaatttttctactaaaaaaaatcaaaattttatttatagtaattgaggccacaagcttgtgtttgacccgcttgtacttatggacggctctgtattttacctaatagatttgaatggtaaccattttaataacaatacaattttgacagttactaatcacaaaaactttatcaaaagcgttacaaaaaaatttactctcagtttttttgtacagctcattttaacagttttacactattccgataaagctaacagctaaataacttgtatagtttttggttaccaatcagacccaatatatatgttctgtgtgatacagttcttttgttgacttttataacataataagtttctcgttagaagtttttcacaaattcactgtaaattaattaattgattaatcgaaagtataaactatgttacgaattagtcaatagggaaatgattaagtttgcagtgataaccgaacttacatgcactaaaattagaggaatgtaattcttactttgtttggttagggtttattgttctattgttactattatattgttgtactatcttgcaagggttgcaattgtaaccttccatttcattttttgggttaattttgtttctttcacgtttgtactataactaggttgcttgaattatcaggcgatgcactcttctccacaaacaaatcacgcgtcgaacgcagccataaacatgtccaatggtggacgaagaagcaattctcacaaccgcacgtgcttacttccaatatcgggcttttcaaattcggcgtgggccgagtggcccatatatgaagattctgagctattgttgcatcattttgaagtttttattattgtatactagatgagtacccgcactacgtgcgggtttatgtattactatttacaaattgttttatataatgtctgttcatataaagtaaagttaaatgcatcggttttgaaacataaatatgatttgtaattgttttcaaaaagtccaactatattagttcatctgaaaacgaaaatgcttgagttattttttattgttgttctagattctcagtttttttttttaatttatatatccttgttcttttggttatatatttagtttgtgaaacggtgaaattttagaaaatttctttcttacatttaaaatataacatgtttttattaaccatgtctctgcataaccaatctaatcatattcaacttgatgttcttggaaagtttagttaagttcttgtcataatcttctatcttacgtattagttttaaggataactcctcaaacatctttcaaattacttgttttcttagcataaatcttgaaaagcttagatatatttaatctgcatattcatttagtttctttcataataatcgtgtaatttttaggcaaggaatatgtgtaacatgtttggatctcaaaattaaaaaggatatattgaattaaaaaatgtagaaagagtgatggttcaagttctgattaattatatcctcctattttagttattatgttgaattaattactatttatgtattatttattttatgaagtttaggtgggaagctctcatgtgctgatgtgtcaagttgtaggagagagttggccaactttcatatatatgattcggttgagtctttaacatcttgaataattgcatttgacatctgtagcttaatttagtttgttttatttgctttgctttttgttcatgacttcatgcttattagctatgatttgtttactttgtgaattagttcattaggatttgtttcttgaaaccaaacatcatcatcatagcttagatcgttttatcatgcgtttgatcaatttcgtagtacaccatcaagatttataatcctaatgtataacacgacaaagatgatattaagacaattgtcaaagctctctaacccatgaaaatatttggacaaaaaaacaagagaggatttggtgtcttgcaagtttcaaagctcctatcttaacttatcactagcttgcttgatcctttaacatcaaatatcttattaggatttaaaggcatacaattttcagttataaaactggttcaagctgaagtagttttcattaaactggcctaccccatttctatgcagagcggtcgggccttcaactgcgggtgggtccggctgccaatagccggaaactgaattgagttgagccgcagaccggtgagctacgggttggaggttgcttgagggatggtgatcaagggtaaaacgccttggttggtcagaggaagaaacccatgttgttgaatttgacagaagagagagagcaccatcaagatcttgagaagcacccatgtgtgaagagattgtgaccttttctaaaaatacgcataacataaagcatcatcaagatcatgaatacaacaaaaagatgagaccatgtacttgaaactcaagagaatacaaacctttactgaataactcggctcttgcggttttggttttggggtccaacaatccaaatctattgtgctcggtatcggaaatctcagtctttgcaggttgcggcattaacactcttgatggtacgtgcttcgaacttggccatataaacttttcctcacttcttggatggataagtgcaaatctgttccatacaaaatccacctgtggtttcccatctgcatacacagaatgacaaaagcatctccaattctccatcaatgagattgttgtgaacccccaaaactacatgaaatgatatctatcttgacaaaggaaactaactaaatgctataactgaactataggcaatttcagagttcatataaggataagaaataaatgattgttgtatataccatatgtccttccaggatttggcttgcgacgtcttgcattgtgatctgagagacgtcggcgacagctacgtttcttctcatcaaactcagagagacagtggaacctttggagaccaaaaaagttaagattttattaaggcttttgctaacagattaaacaaccttctctcttgagaaagactagcttttacctgctacattgttggcagaaccgacgctctacgccactcacaacgactttaggaaactttgaatgattttcacaaatcctatgtttccgatgatagtctttagctgatgaaagatcaagattacagccttcaacttgacagtgaggagtttgtaacctctgaggaatggatttcgatttcttcacgggagaaacagaagatgaagccagagtcactggaagtcccaaacctttagcattctccacttcccaaaagtcttcaaagtacgttcgtttaccaagctttaaaccgagaaccggatcaccagagccaaaagaaagttcaagacttggagaagtatcaatcccctttgcaaattctccaggaagactttcaccagtttcggatgtaaaattgtgtgttcttacttcagctgatgaagagctaatggaagttgactttgagcttttagagaaagcatgagctatatcagaacctgaactaccagcataggcaaagcttgaagaatacagagaggtgcaatcaaatccatcaatttcccactccattggttttagctttctaggaacttcagctgtagaagtgccaaaagatatcaagttttccaattcccattgaaacggtggctttgcattacactccatcagacactgaccaccaaaatctgaaaaacattcaaatatcacacagagtaaatcaaaacttgaacttttgcttacaagaaaatagagaaaagatcaaaatgtttttctatgtaaactatcaaacatatgaagaaccgaaaatggatatttgttagaaagctacttatgtatgaaagagcatatatatttcagtcttatagatgctaatgacaatctacaaaattaaatctgttctccttctataactctgctagaaaccagacaatgatatctcaaggccaaactaaaaccagagcaaaaatgatctctcaagaaaaaaggcaaaattgtgcttagtcatgaagcaaagcgttttggcatgaataggcatgtaaggttgcatattaaagtgtctgagagaaactatcatgtgttccctatattaaaaccctctgcttattcatgccaaatctactcttcactctaggttctgtaatttgctcaaatctctatactcttcatccttttgtttttgaagacataaaggagagatttgctttctgatcaataaataaccatataattttcataaaagttaccaaaaacagatctctaagaagctttctctcttccactattcactaacagaaccatagttttctacaagcaaagttaagggtaataaaagtactcacataaaacttcaacctaggagaaaatcctcatttatcttctctgttatttgcagacataaaaggacaaaatcagcaacaacatacctcaaaacttatggatcccagaggaagaagaaattgttctgtttttttttttttttttttaagtttacgagtaagtttcaatcacaattttcatccacatttatagcaagaccaacaaaaaagataccctctctcattctttcatcagaaaactttttttttggctcaccaataattcacattcattagagattgtgggggcaaaacccttcaagaaagtaggaccctctcttcacaccatttcattatcaaaagctgtttacagatgtaagattaaacttctcatctgtcaaaatcatccctttaatattacattccgtaacatttctctctactttttgcctaacacatctaccaaaatcagtaatttacaaaaacccaaaagagatgatgaaccaaacccactaaagttttcatcttttattttgggaataagatccataggactaatgaaaaagagcaacatttgttttaaccttgtagagtaagttggtattagggtttctttcacttttactcattatctctgattatgatgttatttttgtatgtgagtgagtgacaatacaaatggaaatagagagagagaaaagagtaaagtagcaaaatctcagccgcaaatggatgtctcaccatttatggtaatattatcacaaactttttttgttgctaagtaaataccaaaaatctcaactttaagctataagatttgcaagaaccaaaatctattattcagaaataaaagatgggtacctgtaaattagagaaggatctcgtcttcaatagagtaaagcttccatttttggcttagcataagagagaagagatacaaagagaaaggagaagaaagagagagagagagagagagagagagagagcatgtggtgtgtgcgacgctaagtaccaagttgggagatgtggaggggtcaaactactttcatcagcttccacttttttggacgattcatttcattaccgaggaaaaagcaaatatttattatttataagaaaatattataaattaaaacaaaaagaaaaaaaaaaaaattgaatatgaagagttaaaatatgaaaaaagtggattttcgtaagatcaaatagcgtcaaaatcaagacaacccatgctttagtatatgttttagtttaatttaatacaagctcgtagcttaagagcaagttcttaaactgatttagataagttaattttatagtatttatcacaaaaatgaaaagttggttggagttatcattgtgctggaggacaaccgttcagcaggtatggctcaattatattattgaaaaattagatccaatggcaaatattttaaattaagggtgtggtcatatgttttaaattggtcatatgatcttctatataatatacacaactatgatatatttattttggtatataattttttttttttccattttcttgtctctcttctttcttctttaaataaataagataatagtacttctttttgcttcctctcacatcttttggctttgatttttaaagaaaaatgattcaatttacctaacagaattttcgattttccaggttctaatttttgaataacaaaacattgtatttgagaaatgaaaaagtttacagaaaaaaatacattattattttgttataattaccaatatattgttatatatagacaactataatagataattctttcaatactttaaaaagcagtataagaagttgtttaacctctaaacacctatcttagatcgcataaattactttttaagcgttggagttaagtttcttgttaggatattgagttatgcggttccaaccggttttgaacttaaacgttcctaaacattcatagcagttctaccagtgcactcactgtaaatcagatgcatggttcaagtgagatatttctgttaggttattacaacctatgcatcctaatatttgtaaaagaatatatgaatttaaacataactttttttttttattttaactcaattttcttacatcccgaaattagttatagggtgtcaatggtggacatgatcatggacatatagagaagggagaggattttgtgttaaattggtggaaagatttctgctactaaattgaaaaaagaaaaatcctactatattatttgggaagtacattttaaatgtaaccttaatttttgtaagtaattacataggtatgccattaaaaacaaaaaattaaagagtaaattaatttatctctttaaggattaaaaagtcaaatactaatttaattaattaaatttaattaaaaaataaaatacattattaatttccaaaaataataaccaatcaaaatcaacatataagatttgatgtataaatttcaattaatttaatttaattagaaaaacgaaatacattattaatttccgaaaaagtaaccaattaaaatcaacaaattagatttgatatctaaattatcatattaattttttattaattagtatagttcacttctcatctttatatgattctattttttcgaaaaaataaaatcatcattataaaaaaagaattagactttttcgcatatgccataatttgaatttttaaaaacgaatataaattgttcaatacatgaaaaaatattataacgggtgaaaaatagatttaagaaaactttctactgagtaacaggtcataatttgaaatatttatattcaatttcatacatattatattgaaaatttataatcttatatactacaataattaataacatattagattttttttatgtgtatgatgtgattcaatttttaatacaagctggaaaatcctagaattgacgggtttagatcgatattaatacaagatggtatactacaggtgaaactcttaaattaacaatcaaactacaagtgtataatcttaaacactaaacaatatagataatatcaacaaaacatatacaactcactgtttactatacatttaaaatcaaataaaataatatcatatatttttaaatcatctttacagtaaaagtttttagtttaactaaaatataagcctacatgcggtatactgcaggttaatatctagattatagggcttattggatctaaaaacgggtcatcaaagatttcctaaactgaagcaaaatatactgaatatttgaatatctatctgttaccaaattataaacaaagaagttcgtaaaacaatttaataattttatatacgaaatcaattaaatcttaatcacagaaaaattagcacaaaaaaaagtattcaacaattaaaaaattatcaaatctctgtgttatataagttttgatactatatttgaataaagtgtaatataccttttcaatttgtattcttcaactaataaaagctaactaatatatttgctaatcttatacctatcaaaaccgactatcgtttattatctctatagtatttttgcaagactttttttggtggatttgggtaaaagtgcattcgggtcataaggtacattcccctaataaataaatataatgcactcctatgttattagctaaaatgtttagattataattcaaagtcatatcattaataaaattaatattaataaaataaatggctttttggtaagacggatttggagggacgggtttttgaataaacattaataaaaaagtaaaatataattaatccaccgtttcaatacgggttaaatctttaatttattattttttaaaactactaatattaaacatatcaaatcatcctaatttagaaaagattatataaaaccaaaaatgttatgtggtatgtataatgttactatatataaaattaaactataaaatataaatgtattagagaatgatacaatttgcaaaacttttatatataaaaaataattcttaaaattttaaaattacttctttaaaaaaaattacgggacgggtaaagaaattacagaacggattttactttggaattgggttatatggtggatgtatttgaatcattatttaaaaaaatttaaaatattattaatatgctgttttaataggggttaaaactttagttttttaacaattgtctcattgattcggggtatagcgttacctaacaacaattataaactgtaaaatataaatattttttaaaaataaaatttgcaagttttaatatatattacttttacaaaataaatcgtcccgcggtataccgcgggttttaatctagttaacttgttatttgtctagccgtttagggcacactagattttggaatcgcaatttaacttgtattctattcgttttaaatcttttcagataaagttcgttcgaccatatttttgttttatatgatggtttgtatctgattagagcgtcaaaaaatggtatcgaaaacaaatttatcaccttaacattagtcgaccacgagtgcttcaattgaataaaacaatattctttgatgttgatgcacaattacgttagacaaaaaaaaaatcactagaacaatctatgtttagaagggaggaatcctaaaatcaaaaccataatgttgatcctaaaagacaactagtcgccataaaacgtagaaattgcatgtataattctagcaaccatcactcaattcaaggtaaggtcaaccaaaattatagaataaagtcataaaccataaataatcaaaaccaaaccgaaccattatatataattttacatggttttgttttttataaaaccgaaaaaccgtaaaaatcgaaaaataaaccgtaactaaaccgaattagatacggtttctaactggttttgatttttgcaaaaacgataaaccttaaaaccggaaaaataactaaaaccaaaccggaaaacggtacgccaaattactaatcatctatttctacttgttaaataatattagtaggatcacaaacagatacttcccaacaaattacatctgtgcccctttgtgattcaaagtttcatttcatttcaaacttgtattattagctcatatgatcatattcctttaaccttatcatcatcatcactgtatttcaaactatgacaatggagtcatacaaaaccctagaaatcattcgcaagaacactgattcctccgtatttcatctcatcatcaacagaccatcacatctcaacgccttatctctcgatttcttcatcgaattccccaaagctctctcatctctcgaccaaaatccagatgtctccgtcatcatcctctccggcgccggaaaacacttctgctccggtatcgatctcaattccctctcttcaatctcgacacaatcctcctccggtaacgacagaggacgatctagcgagcagctacgccgtaagatcaagtcgatgcaagcggcgattacagcgattgaacaatgccggaaacctgtaatcgccgctattcacggcgcgtgtatcggtggcggtgttgatctgattaccgcttgtgatattaggtattgctctgaggatgcgtttttctcgattaaagaggttgatctagcgattgttgcggatcttggtacacttcagcgattaccgagtatcgttgggtatgctaacgccatggaattggctttaactgctcggagattctctggaagtgaagcaaaggatcttggtttggtttctaaagttttcggatctaaatcggagcttgataatggcgtcactacaatcgccgaaggtaatcaatctagttttgcttaaatctgttgaatctatggttgatttgtttcaattttgatttctgagatgattgagagtatgagaatcacatttttgcttaactctgctgactctatgatcgatttttgtttcgagttagattctgggatgatttagggttcgaatcacgtttttcgaacgaattttctcggaattcgtttcatttttcgacttttcgtttaatcggttggttaagtcctgttgattctatgcttggtttgtctcagttttgattccgagatggttgatttgtgagggaatgagaattggagtttatggatgttttcaggaataggaggcaagtctcctttagctgtgacagggacaaaggcagtgttattaagaagcagagaggtgagtgtagaacaaggacttgactatgtagcaacttggaactcggctatgcttatatcagatgatctcaacgaagctgtttctgctcagatgatgaaaagaaaacctcggtttgctaaactttgatacagtctctctgttgcttctttatctttcaaagctcttctggtaactaaagtaataagatattacttcaaataagtttagttattgatagttccctaattacggattagggctatagataaaatggtcttctacacatgagaatatgattaatactctgcacaatgcatattggtaaatgctatacctcaatgtttattagtttctgtctcttctctccattcatttcacagtgtatctagaaatcagagtatttaaggatatgagcatcgaccggaagatttccaagtatcttataatctgattttctaatactttttgttttccattggatccgttaccatggaaatctttgccgtgtcgatgcatgtaatcagaatcatatccattaccttattgtcagacacaactgcatataccaacagtgagatgtgacatctccggtgaacagattacaaacctgttgtgaactcatccattctggtatctaaaaacattaaacaagtacggtggaaaccataaaatggtcttaatcaatttaaacaaagcaaaaaacgtctcaaatcatatcgaatcaatcgtaaacatggagggcataagaaactgatcgaaatcttcaacttcgaaagcagtcacacacaaaattttctttcgagcaggtgaaacttcggataaaataattgcttagtttcactcaatagacatgaaaatatactatgaaattagaaaatggctcaaccggctgaagtagaagaagctaaccctaaagtttttaatcctttaccttctttttcttttctttctttatatttgcctcccgctttaaaaaatttgcagttttttaaagagtgattgaaaatactgtaatatggtttgcacattttaaagagttgatagagtgcttcttaggctcgtccattagccgcaatcaggattagtagccacacggtcagagttttttcaggttatgagcttattcttgtttagctttatgttgatgaagcacatttgtaggaactttactcatctttgtttcgttattaaaaattgttttattgatttgttagatggtttctcgtgaaccttttataccgctcaaagaggatgaagtagctgaagtcagaagtgccttctctggaagaaataggtattttcagaagcttttgcatgtcatgtgatttacttataggattttaaccagttttattgctatctcagatcgaatttttagattattatattgagtgcaatacaaaacttttagattattatacatgcatgttcattataaaaagaatgaacattagacagtaatataatttttttttctttttattaatgtttaacaaaattacaatgccttaaccatgagtatgatgaatatgactataactgcaacgacaaagttttctttcaaaactacatgtgcgaatatacctatctcttctcatacaagctcttgcgcaatcaaaacaataaccaattttgcctattttaagtatttggttcagtgaacgtggatcgaaaggacttgctactggattgaaaggatatattctctcttcttcactagattcctttataagtattgatgtacctatcaaattttgaaaagatatatcaaattcttaaacaattttttgttgttgattataatactgatatattatcctaattaaataaatttagacttacatgaagaaacaaaaattaatagagttaaaaatataaaaatcaacttcatttcttcatagaaattaaccaataccacaaaaaaaaaattacaaaaaaaatttgtgaatcgttttgaattcttttttcttttgttttgtgctggagttattaaaacaatatacagtcatatttataggctctatagatacatatgttatacaaagagttaattttcaaataaacgttttattttgttataaacgaaagttaagtaacctatgtatgtttgtttttgtttttaaactataattgttttgttacatcatgaggttttcaacccaccctacacatggatttattctatacatattcataaaattcaaattcaattaatagtagttattaaaatgtgttatttattggtataactgataacatacatctaataagtacatacaattagcggttttaaactttaaaatttaaaattactattgaggcaaacattttatttaaaataaatatataagtcaaggaactaataaatatatataatatataaattgattagaaatgattaataatttatattatatataccaactcaagatgcctatcttgcttttctaacaaaacataaattactttttgattccttatttatatttatgatcttatagatgaccaaatcattttatttcatacatgcctcgaatctatccaaactctttgtacatatgtatatcttttttttttttaattgcgtaaatgatttcttaaccaaaaattccataaatccccttatttgtttttctttttttgaacaaacaccttcgacttgttatctatagagaccatatattttttaaagttatataaacaaaatattttaagatgtaaactgattaatttataagatttggtattaagttttttcaatatttttataagtttaaaactaaaaacatttttcaaaatttgtagaattttgttccgggatcgctatcaacttaacggaagtggcaatatcaaacatattaaatatttcttgaaactctttagatgtatttattgtgtagatgagcaaaataaatttatttaaacgtaaaaagtttagaagaaaaataaaactttctccggttatgataaagaagtttaattttatatttttttaatattttcaaataattttttatttatcaagaagctgtcaaaacactgtccctggtaggaatatttttcattgccggagctaccacatcttctagaagcccttgttgcggccgacactgatcaaccggaaaaaacaatccctcttcgagatttgccggtgtgttttcttgggctttattgactggatgattttggttggtgagctcacctaattgtgcttctttgctctcttcttgggtttgagattttttgttcatatcttgagcattatgtttatgtattttcgtttttttattgggccattgacgtgtcttatcgggtaggaagaaagggtaagtatagtggaagtggaaaccttcgtaggtaatgatatatgtgttagactcatcaattgatctctccacttgcttctttgcattgcatattgggtttgtgcacttgtaataactcctagacatatatcacaaatatagtaacattaggcttgtgaccgaaaactaagtatactaaataaaacttccatatgttgattttaatacgtatcattttggccgaaccaaagaagttcgatatgcatatacaattctaaaacggagaatgcatatatgtaccttgggttagggctatttttgattgatttttggccatattttctccatttgtatccatcatcacacattccattactattgttcttcacctttaaagtgtacctatccaccttgctcaaagtacttctttccaaaagaggaactctatacataaatataaaggaactcatgagtacttattattaaagggctatactaaacataaggcaaagagatgtattcttgtaattaaaaaaataaatatcaattacttacgttgatttagagatttctcggactgggtgggtcaggggttcgaccaaggccagagcgtttgcaatatcttggattcgtggaccggagtaaagtgttgatgtgacgaacttgttggcaatgaaatcttcatttggcatgagcccatgcatatgatgttggtcttgaggcagaaagaaaagaggtggctcataaacaaaaggatcttcaacggcgttgtttccacaccttcttgcccactgataaccttcttcttccatatgagtatggggacaagaaaacttatgcgagctggtggtgagggggagagggggagagggagagagggattctttattcttttaacttttaagagtaacgtgtgttgaatttctatttacttttctttttttgaggaggggatctacacgagttatatataataccaaaattagtcatgtggattcagttttgttatacttgagttatatgccatattattgtttttaataaattatctacattaattaatgtgttgaatttatatcaatttatcttttatctctaagttttgttttgcacaacattattataatcgttaataaacataaaaacactattatcattgatttttactttttggaatgtccaccatcttttcacacgtatcgatttacactagtttagagatagttttggaggaatccaaatagtttagatatgaaatgtatatatgtataaatgatttttttttttgagcttctaacttgttgctttaaaaaaacttattatatccagaactattatttatacctaattaaaaaatttacctcattagatttggcatcgaaattttggacgcggcaaaataaagttttctaacttcagagagtgagtcacagctaggattccgtgattgaaaactaggagcatgatgtatgttctactcttcaagaccacatcgtccacatgataagaatatcaaacaaattatggtcgttcttttccatagacacgaggagaatgtctgggatttgataagttggtttatgcttataccttacgtcaagatgcattatgatcggctaactatcatgatcacaacaaaatgagataaattctccaaattggactgaatttttctgatatacatcgataatactaacacaaagcactattatacatgtgtgggttatacatagtttttcttagaaatgtaaggcaataatgcatatttcgtatgcactgaacttgcgacagcctataacattaccattaaatttagggtcatcttatcattattgctttttttttgtctttagataggtttctagtaatgtccatatatttcatgaatcaaccgtcgtggataactttgaagcttatatcttaggccccataacattgataatatcgagttatttttggttgctatgtggctttgactttcgaacataaagacaaaaatatagtgtgaccagctggtggacaaaaaaccgtttgggttgacttagtgggtttaggttttgttgtcttttagtcattgaggaattggttttggatcttaaccaccacgcttgaaatagatttttttattttatttttggtatcatttaacaaagtcaaccgtttagtgttttaatattttgttgtctcagtcatagttaacgttaacgtacgtactatcttgttgtctcagtcattcaagaagggttttaaatttatagggtaaattagctaaataactttacagttgtaaatatatacgtaaataaccaataacagaaatttattgaaatatcgttttactttctttgccaaattttgaccaaattgttttgcggatgagaaccatgttattttgtaaaaacatttgcggtaaactgacatttttttttcgtggtctagggaaaatgtcttctttctacctaataatgaaacatggatctgctataaacccgtatttccgaaaatcacatgttaagaattatcatttaaaaaaaaattgatgatatctcatgacgtagaaagtttcctgaactactataatgtaatacgtaatatgttatcgaaaagcgatatttagcaatattcccttgagtctttggcacatgatttggcagaaaatcttatcggtcatattacacaggctaaatgaacgaaactctgccattgatatagggaataggcccatgatattgataaaatcaagtttccttttgttgctatgtcgctttgacttgctacgtaaagacaaaagtataatgtgactagctggtggacaaaaaaaggtttgggttgacttagtgggctttagtgttgttgttgtctgtgtgatttgattgaggaattggttgtaatggaagtttctgctcaaatcatttaacaaagtcaaccgtttagtttttgtttttttttttaaatttgcagtttgcatttatagttaatgttaacggtatatatatgtagagagtatcagaattttttgatccattcaagaagggtttttaaggatatggagtaataattttactatttccattgttaaagtaaatacccaaactctaataatttttttaaaaaaatgaatcaccaaacaaaaaataataattaaaatgtcttttgtattaacgtataggtatgttattttcttaaatttcttgttgtcagataaaataacatgattaaagaccatgctatctttagattacacatgaaattttgaaaaaaatgaattgttgatgaagaaaagattttcaaattttataagtttcactaattaaataattaacatatatgttgatgattccatgaagtttttcatcaagtttgattttcaccaatctcgattatttatattggagagaacctagtagttctgacgaacatgaaaactataattgtcatccatgaaatttatgattattttgaaaattaagaaccaaattaaaagtctttcaagaaatctatagaaaccccttgacatttataatcacattagaagtgaaaaattgtcatggaagaaggtctaattgagttcagacaaaacaattgaacaggaaatcatctaaggaagtaatatctcgacattaagatgtcaaattgatggttcatggaagttttatgattctacttgtgcgtttaagttggatttgtcagcaaagcgatgcacaaataatgctactaggatcaatatgtcaccgacagagttctttgcctcttcacttggagatggaaacattaatatgaggtatgaataacatccttacaagaaggatagaccgtcaggtgtttgaaacagattatgcagagttagatgagattggtttgctccgtacgtatttctataatttctaactctttcgtattactcgactttaaaagccaactgtttagccaagtgtttccaaattctttttttttggatcttttttcttgtaactatttagtacttaccctcgtgattggacacctatttaaggagaagttttctaattaacatgtggttagagaaaaaaaatcaagttaaaattatattttcgtattaaatttatactgtatatcatttttaatagtccaaacgttatgtatgtatgcattggacatagatatttgttttttgacaaagtagttaatgtaatgaaatagacttaataacccgaaattattacaaattaagaaaaacatttggtgatgcaacttcagttttcttatttaaacaattgcattaaacatctagctttctttcattagatacaaacaaaatctacaaaatctaatatagttatgtattttgattaaattaatttcatcatcattttttatgagaatatatttattttttaaaggaccatgtgatattacaacaaactaaaattccggttgtcatgttttgaatgtctttttttttttcttacagatttaggattttccgtttcaaatcggtcgttagatcattactaattctgagtaatacatcactttgtcttttcgcacaaactccgcggagactagtctcatgtgcagctgattagtaatcgaccacaaaaatatacatataaaaactatttaaacggcctaagttagtaagtagtcttatttacaagtaagcgaaagtgtgtaaatgaagcgaaatcttcattgttaaagcagttttggtacgaacttatttaacaaagtgatcatatccttagtaatttccacttttttcctctcctctccaaacctaatcagacactttctttcatcctcaccttcacaatcatcctcgtttgtaacttcgatattcgcaatggcttcggagatgtccttgaccatatcaacaatcactccctccacacccatcagatattgcaagtaaatcacctctaccacattgctgaaagtaatcaaaaaggattgtttcagaggaaaaaaagttgaggcgagagagaaatgacaacaatattaaactcgggaggattttacttaagctggccataagatagaagtgaaagttttgaatctttgactcgtgtgattgcgtttggggttcttaatatggccttaacctcagagacaagcccttgcaaaccgctttctttgcaaagcttgatggcctcgtctaatgagttccttctcacatccttatagatttcacatcctccatttgttaagaagaatacctgaaaacgtatatgagcatttccatgtacaaaaattaagccttaattgtcgaccatggagaaacttttcaccaaagaagaaatcttacaggataacacctttgcatattcctgatgagtcgagccgcgtcaggatgaaagctcgagaatataataggccggttcttggaatgttcatttacaacctgttcatctaaaagattgagattactgatcaacataagaagatcagacgggtgaaaatatgtcttttaccgtcaagatgttgtcaagagtttgacgtaactctccttctccatatacggtattatcatcgaatttgagctcgatattgaatccgagtgagtgtttaacatttaggaaagcatcttcaagggtacacaaaggatcatccttttcgactttccactcgaaaattctaccatcttttgtcttcctccacataggcttcacatttgtaccatccctttgtggtccatatgagagaaattcatgtaaatccatttccgttactcttttctcaataatcactccctgaaaagacatttccctttgctaatgaaaacttagacttatctatcagtaatacaattgtttgtgttaaaaaattaaatcctaacctgttcttgcgtgaacatgaagatatcatggaaaattacagggcaaccatctctagttacctacaaaatagttacattctttatttacggtgctattgtttcaaaatcattattttgcattattttactctaactttgagagttgcctcattttttccttaatgaaatatcaaaactaaaatcattttgatcttggtgataatctaaagttcatttcatttactaagtctggcactaaataaagctttaataagctatttcatttcagtctcattttctatggtttctaagagcttgaatcctacaagctttggattctcctacaaaagcaaatgcaaacaaataactgaggccaaatcataatcgtgtgttttcttttaaataattacatgagggttttaacacatatcatgttgttgttaaattactacaacatgctatttgtacatgatatgacattagacgctaaaaacatatattcttttttgacaccacgtgttttttcccctaattttagccaaacatttggctatcttacacataatcccaacaaatagttgaggccagatcattaatctaatttgtgtttttcatttcttgatagaaacaaaaaaaaaatgatcaagattctaggggggaaaagcaaacctggacatcaaactcaatgaagtcaataggaaaatctgcagcaacattaaaagaaagaagagaattttctttgataaatttcattttctcgtccggagattgaagcatgttcatcccaaatcctctatgacccatcaaaacaaatttagggaaaacaatagcctcttgcttcttatcatcttcaacaacacctttaaaatcaacacaaaaccaatcataaccaataatatattaacaaaaaaaaacagaagtttttgcatggagccatttgatattattacctgatgataacatggcagaactagataaagacaatgtcatagtttcaagagccatggtttagtttcttgcgaacaaagatttatattaaagaaatgggtttaagataatatgagcaggacaaaagaatattccattcgatacaaaagaagaatgctctagatatcgaatggaatactccattcgcaataatcttcaagcttttctttttgttggctctaaaagaacttttcttgttgaattttattctatctgatttttggatatcttttaattttctggatcattctttttagttctatttataagacagatggaaagggtttaatttagccaagtagacacaactacacgtgaataaaaataaattttattttcgttttggggttttgttagttaatttaggtaaattcttcttttcatatttctggattgttttttttttccaaaaacatctacaagattaatttttagattacatacttttttgttaatcaagatagaaccgcaaacttctgtatcgttagtagattgctattaatgatgtaccaaatgaagtcttataggcagaaaaaaaaaaaaaaaaacttcattgcattggaaccaaatgtttgcatcaattgtagtgtttttcagacattgttggagaagaggctcgatattgaatacatgataaatactctgtcactaaaagatttcaaagcttatctatattgtgtactcaggatactgtcttcttgttcttgaagggagacagtaatgaaaaatggcgagaagctggaaaaaaaaaaaaacagaagaaaaatgaacaaaagtgagcaaactttgattagaatcaaaaaagtttctaagggtaaaaaatatcttgttcacttacatttctgtgaagcagctgctgctgtaggtgtttcatcttgagatatgagattcttcagtgtaaaagctgcataacaaaacagaaacttaaataatttaggcattgtcgtatttctctgtaccaaacaatgtaaaacaccaacagaaccatattgatgtgaaaaagaaggttcttgctgttatgggataatgttaaatccaagagcaaataatttagtggaacaaactcctaaatatctctaagaagaaagcaaacaaaatagacgtttgcttcttctgagtaactactgtaaaagataaaaggatgtaacaaggatttaccttcacttgtcgtggcagcagttacagctggttcatgatcctcattgctattaaaagatgcattattagactcggtatggtgttcacttacagaagaagactgactcttctttccaaatttcaacagttttctgagcccttttgacgctgactccttcgtttgagatttctccgaggcctcacttatcttcttctctggtacaaggactttgacagtttcttgctctgtctcatttgaatataagcttggtggaggtgcttgggaacagtccgagtacactgtacatggatcttctaacgaagaaacccgagcatatggagcttcatatggtttcgcaacaatactttgacttgtcagaaactttggtgtttctgttactaagtcactcagagtctccaatctaacctgaaagcaaaataaccattcctttcatcaaaaccgttgaaacaaaaattaaaattgactcagctagaataagagtacttactaagactagatcattgccacactcctgcattgtttcaacaatgccttccttatcaactccttctcgaatggtggagttttcagagactacatcagacttctcgttttttacctgatctctacttatacttcgagctgaacttggcaacaccatcactactgtcttctcaaccactggagtttcatcaatatcattttggcacaaggatttgttcttgttaccacttggttcaatcccagacgctgatgatttagttttctcgacccctttcaccataacattagaaggacctttggttggttttatcttcagttccggaagagatgcaattttcgctatatcatagttaacaatggcagatagtttctttatctcaggagcgtcagatgcttttcttgatgctattgtgcgccgtggcctcactgacgaacttggtgcactagtattacccatttttggttctgataatcgtcttgtctgtgaaaccgacttgttctgcgtatctagactaactctggtttccctcttagacaaaggtaatggtgaaatcgacctggttaacctaattcctgttgctatgctttctctcttagctggaggtaacggtgatatcgaccttgttagcatatttcctgttgacttacttacggtactcagtttaccatttttggggaatttctgaaagtcatttgaccctagagaagtagttcttctaggaagacgttgaagaggtgacaatgaacctggttctgagtcgctaaacttagaggctctagaaccgggagaaaacttgtttagtatttgtttttttgtttgttgtgcaggcaactgtgactgccctaccgctgagttgcttttggaagcaatccgcttttgcctttctattttcagagcttcgatgcgcttcctgtcttcctcttcctaaaacaagaaagaatggtaataagagtttatgataagaattttcaaccacaagttggtttatatcctttaagattgtgctttctatatgattagtagaaaaagcaattctatcatcaaattgtttaagccgagattttaccttctcttttttcattttctggaggtcagctttgaaatttctaagtttgtcagcacgtgctcttgcttcatctaaaggactcatctttgtcggtcttcctttccgtattggccccggagccttcctcttatctgcagcatctttagaaagtctcgattttggatcttttactaacttcttagcacctccagctgcctggctattcttcttcaaagctttggatccaaactctaatgcaggatcatacccagctgataacttctctgtttcccgttcgggtatcaggctcagatcatgaggctcataattgacctgctttctttcatttccatcagtttgatagcacgaagagatctctgaaccaatgtctatagcatttctcttatttcttccagcttcatctcgggctgaagatacccgagtaacaatataagaatcatcatccatgtttctcttatccagaccattccttggagtatcaaatccattcatgttgagaggatcagaagaattctcaaaaccattttctctctggtgaaccataagagagtcactagatcccctgattctacgagtcacacttccattccgaatatcagctgtatccctttcttgatattttcctgattcacgttcaccatgtgccaaaggatcatactttcctgtaccttgcctcttcttccctctaatctccttttccatcatatggtcaatggaacgttcatctctgtcagcatcttgcaataaaaaagtctggaaggcctgccaatccccagtgtcagcctctgttccttttgttgccctctctttaccattgtaacattctcctcttgccacttcttcatgattgtcatcagcatcagattctgttccagaattatcttgcttctttgaattaatgtaatttatattccgaatcaccaccttccctgatttccttcttctacttgatttttcattatctctttcctgatcttctgattcggagtcctcgctacaagatgaatgatgtttccgagcctttctttggccagaaccacgtctagaatcatcggtagacggatagggagatggatatggactagctcctggatagcctgggtagtatggcatgccctgcatcgtatatccttgaaatactggaaaggtgcccggtggggagtgaactggccagggtgcatacatcggctgccgatgctgcccttgcacatattcttgatttccatttcgtttgttgtctgtaggagacttcgcatctggatacaataagtttctcgaaatgaatatcaattgtgccaaaagcaatgccaaacaatgcaagaaaagatattcaactctcagctactatgactcataagaatcatcttaccactattttcaggtgtcccaggcatattagcagcatttgcgaacataatccctgagtcgttcattgtagagatgtttggctgtgttgccattacttctgttgcttcaatttcaacccactggccagtttcgtgctttttcttccacaagtccatgaatttcacacatgcatccctataacattgttgaaaccaaacatgagaagtaagtctatgaaaagtttctttcaaacttaaagactttaatggatatgagattattggttgcaaaacaaagaagaaattggtgtaaactacaatcttctcacatcaaacgtgaggctccaaaagttttggcgaaagatataagaggaatcatatcatcagcctcaaaaccagctgccacagcacgtgcaaaggccattccttgttctttctgcaacattatcttccgtgtctccagaactttcataacttgagctctgatacaattccacatattaccaattagatacttaactactctctttgttgaaaaacattgaaaaccaaaaaacaattcacgcaaaggggtatacttagagttttcatctgatgaggtagaccgatttgcttgctttggatgggaatcaggctgttcaaatgcaagaagatgatataagttgtttgttccaaagagaaaaataagagaaaaggtcctttaaattatagaaaccatttcagttctaattgacctcgtaaaggacaatagctttctcctcgttgagctgtagcaaaggcctgctacctgattcacattctcacatattggttaaacagaaagatcaatagccaagagacacactattttcgattttatgagttgagatttgcttagtatcagtcaaatcctgagacgggaatattgtttttccaaatcagtagctttagcatagagactcataaattacataattttatccttatggcataccttctgcactatctgctttttttgctcgatgatcgtctttcacctgtttatacaatataccattaagtacttctgaccatacaacaaagaaagtattcaaaagtcccaatatacttacaacagtcaatgccatttccgagttgttctgaataccaatggcttccttgatctgtataatctcagtttctaaagtataaacacgttctatgacttccggcgtactcacaaatcgaacaaacctaaacgagtacaaaagaagaaaaaactcttatctcaaagtgtctagttccatacaaagacaactaatgtatatgacacaaacctttcaattgttcctttagtgaaccaagccgcattgtcactagcttcaggcttgagaataatcgaatagccacctttttccaattgatcttttgcagtctttaaatgagcaagaaatggatcaagtaaccctgtagctattttctcagtctttccattagctgttaccaacaaatcacacctgtaagaaccacaaagaaaaagacattaaattttccatagtaatatggtacacaaacaacaaaattcagtgacttttgaacctatcaatgaacataaagatacagtctttctatttgcattgaacagttcttcacaaaagttaacaacaattttctgcttaagtaaataaagctcacgaatacaagagtttatacaatacaagagagaaattattttacattagctgttacctacctaattaatcaatgcaaagaaaaacacttaaatttttcgttgcaagtttggtaagaaacctacaattttcaacgactttt

SEQ ID NO: 822 - DNA, 91193 bp, Arabidopsis thaliana
gatcttattaatgaacccaaaaaatgcaatctttcaacttccatagaaccaatttctcagaaaactaacacaaatattaacattataacaacttttgatcttattaggaaacccaaaaatgcaatcttttaacttccatagaaccaatttctcacaaaactaacacaaaatttatcactttaacaatatttaatcttttaaatgaacataaaaatgcaatctttcgacttccataaaaccaatttctctaacaagtcacacaaagtttaacacttctaacaatttttatgtcttatcaatgaacataacaatgcaatctttcgacttccatagaacaatttcacagaaagatttaacatttaggatcaattaccatatcaggcttctctaaagctgacgaaaacaagagtttacacgaaatttaacttaccgggttcgagtgggagtgagctgaaaagcaactgagtcaagccgagtcgaagatttcatcgctaaattatccaaagatcttcaaaactttttcagattaagaaatcatccgaagaaaaacacaaattgcagaaaatccaagtttaatcatagagagatggagaaataagagagagagagagaagcttttgtcttcattgtctgctttggattccagctggaagagtgagagcgaattttccgaggaagtgagtgtgggggactaaaatagtaatatcgcgaaacatttgggggtaaaatcggaacttcgcatgtggccactggtgtgagtgtgagtgtgtgaccgtgtgagtgagctagtgatagtgaacataatttatgtcgttattggctcgaaattcatggcttctttttcgtgacctttttcttaatctctcaacggtaaacaatggtatgtatttccagcatccgtctaatgcttccattggatccatatggatcatttgaatcattagtacttgataaaacacatggaatttagtgatgagcttaacaagttaaaaccatatactttatcacatataatttgtaatcaaatgatgttcgatttattccttaaattaggaaaccgataatttcgtgaaataaaaacaaagtctccatccattaaaatgtcgcagtgtcctccaacacgctcacgataaagccaagcctctcacttcctctttccattccctatggtgagtagctcaaagctctggagcgtgatgtcacgagcagtcctcgacggcgcagctcgggtaaaagaagaagatgacggtctagtggttgggtcagggacgagctgagtcctctgagcggttgaggaacggccattgcttgggacaactctgctagagcggttctctgtgaaatcagctgaagaagtggctcgtacgctcgatacaacagcttttcttgaagaacttgcgtgtcttgttgaagagattggtctttcgactctctcatagttttgctggttttgatcacgaaagagattaagaaaggatttgaatagccaatatagaaaagatttcatggttttagaaatgactcactggtgttgtatcctttgacgatgctaatacattctctgaggttcttggtctagatcgatcagcttgtaccacaccgcttcctgagccatttcttctagcatatgcctctaaagcacctgagaatctatctcgactgtcttgcccagctccagctgtatacatacacaaatttggtttactatgcccggttttgttcaaacaccaaactatgagcagggaacatgatggtttaccgagtcaattaacagaaaatcaacagacgaataggccttgacatccacttaagacattcatataaaattgatgaacctttcttatagcaaaatgaagaaaaagaaaagacagaaactaatcggctcctaggtggccataaagcacttgattagcgcctagctttgcaagtatagggaaactgtttgatgaagcaaagaagcagaagcacacacgaaaagatacacggaaacttaggcaagatgaaggttattgagttgggcttacctgaaggtttatctggtctttcggcaattggtactggaggattcatagctggtctcaggcttgactgttggaaaacagagacaaacgtgagaatttgataatacgttctaaggaattttctaagatgatgaaaatttccaaaaatatagatgttacttactcttggcttggagctagagctggagcccgaactaaactgtggatacttcaagattgtccaatcaaatacatagtcaaactgataacctgcaaatatataacattaaaaacaaattctttgagtttcttatgtgaaaatattcaagcataagctactacaaaatcgagacttttcccaaccttctcgaataaagagatccctgaaaagcctctttaggtatggataatctggtttgtcttcaaaccgcaatgatcgtacatagaggaagtatgatgtgaactcaggtggaaaggatttacagagaacctgccagtggaaatttaaattgaatctatgaatgcatccatggcagtttcaccacagggttccggatatagttgaaaaatggattacaaattggtacctctacaggtgtaagccttttcttttcgctgatcttgtcatacttctgttttttggtacccgcacgaaggccttgccaaggaagactagcaagagagactgaggtttagggacaaatggaaacaaattgaagaaaactctaaaatactgggtgaagtaaagatgtatctataccttcctcgaagaaaatacataagcacgtagccaagagattccagatcgtccctcctactttgctctgtttaaaggatctcaatttagtttgataaacgtacaaatagtcaagtttttaatgtgaaaatgaaagaagaaaaagcaaacaatactcaccaattccaagatgagtgttaacacttgcatatcgagctgttccagtaagattcttgttttccctaataagtaactctcgattagtaaatatattaccaatatttcactaacaattcgaaaattttaaattgagcaaaactttttaacaagaaaaagaaaaatgtgtacctgtagggaatgtgtctatgagtttggagatctctatacttttttgcaagtccgtagtcaatgatgtacacctagacaagaacaaagatgacatatcagagaaaagatgcaaacatatagaaggattcacaaggtagtagcaaaagaaattccaaaaccaaacaagtatattatcattccacacaataaagttgcataccataactactcacctggttcgctttgcgtccaagacccatcaaaaagttatcaggctttatgtcacgatgaagaaatccccggacatgcatatactcaactctattgatctgaagaaatcaaatcatgagcaacacaataactcaaacatatcagagaaaaggtagataatatatccgtaccatttgatctgcgagcattagaaccgtctttagattgaacctccgactacaataattaaataaatcctccatactcggacccaaaaggtcaatcaccatacagttgtattcaccctcaaccccataccattttagatgtggaataccagcttcaagaacacaaatgtaaaagttaataaaagaacgataactgaaggtttaaaccgacaaaaggcaaaacttacttcctccttgaagaagcatataaagctttgattcataatgaagttgaggatgtctagctctcgcaggttcctacaaagaaaaaaaccaaagttttagtaatcaagaatgagtttttacacattactgaattgaaaagggtaatagtcaaatgttgagacttacaagcttcacagcaacttcttctccagtttgtacattaacccctgaaaacaaaagagttattacaaaagcaaaacttggaattaccaaaagacagaagaaacttcaaatcacattacctagaaaaagttcaccaaatgatccacttccaagtttacgtccaagcttatacttaccaccaaccacacgatccatcgttaccaaatcaaaaagcttcctcctttcttcgatctcttaaaacaactaatccccaacaaaaccaaaagttgacccagatctcaattcaatgttccctacctctctaaaagcctgatcgaaattcaaagatccccaattcaaattctagtaagaacccttcaaatatctgaatcaaatcaaaattgtaatcgattcaccaagtaatcttatgcttctgctttaacacaaactaaaaatcacccattgaccaacaacatcttcatagaaagtctgacactttttttcagacaaaagctttagatcagattgaagaaacacaaaatgaaacggaagagacaaaaccaaaacaaaaaaaaaaggtgaaaagaacaaagagagacgaaatcagacccaaaaaaaaaaaaaatgggtcgttggattcgattatcgtttgatctataaagactgctacgagacagcttgattcactatttttttctcttttttttttgctgaattttttttttcttaaggaagataatggattagagacgaaaccaaacgttaaaagaaaaatgaaaaagaaatctgacgagacggccttgaagaagagattttgagattttctttccttatccctaattttttacaactttttatttttttgcttaactaatttgttttctttttctccaaatttgatttattcttcattaactgtaaacagtaacgtcactatatgaaaaagatgataattaatgacataaaattagttggattttaatattttctagcatctttattttcttccgctcaagcaatattgattattttttggtaggcctcaagcaatattgatatttgatttgaaactattacataaaaaatatcataaaaaaacataatattctaccaaaaaatgagtatttgataatatatttttaaaagtaaacaaaacaaaatttgtctcgaaactatcagatacaccataaaaaaaaaattggtactatttataaaatactatataatcacttgattgttaaatttgctttttaatttttattggtaataagaaaaattattactaactcgataaaccctgatataaaatattttattatgtagaataaagtaatataatagaatcgaatttcgattgatattatattatcttctttttttgtttagaccatttcttcaataacagtgtcaaacatataatgacatgcattttctacaaagacagctagaactttagttttatatattcagacaccacttacaaaagaagaaaatattaattaaacatgaaaaaagtaaacattgaacatccccatttaattagggctttaccaaattagtcggtacgataaactcgtctaaacattaaatgggcttaattagttgggcttattttaacactaaattggcccattataacttcccaaaatgatattggttcgagatgattcgataacgtgggcatcaatccatggatcatctcagctttcaccatcaccaataaataaacacacaggtctgctttcataccttcacgctctctcactgatcattcacaatctctctctttttttcaccggcgataattttccgatctcgattataagatggcgaaggaaccagttcgtgttcttgttaccggagctgcaggtaaaattcttatttctccgatcttgtttcttccatctctcgttattgattcgtatcgtcagatctttatgtaacaccaatttttcataatccaaaaatgtaaacgatcattgaatcatattttcgattcctatagtgagatctgaagagagaaattgattggatcatttggtgaatcctgttacattttgagatgtaattgtcattttggatcagttatttgattttatcatgatttgttctgattttgtaagctttatttggcgattgatttgtaattttgtgtgtagatcatgtttaagtgtgtttctgttattgtgcaggacaaatcggatatgctcttgttcctatgattgcaagggggataatgcttggtgctgatcagcctgtgatcctccacatgcttgacatcccttttgcagcagaagctttgaacggtgtgaagatggaattggtcgatgctgctttccctcttctaaagggtaagtttttattctagtatatatttttactgtgctcgtattggaatatggtatgttgcttgaggctgaaatgtgatgttggtgttttttctgtggaaggtgtggtggctacaactgatgctgttgaagcgtgtaccggtgttaatgttgctgtcatggttggtggtttcccgaggaaggaaggaatggagaggaaggatgttatgtccaagaacgtttccatttacaagtctcaagcttctgccttggagaagcatgctgcaccaaactgcaaggtgataagtcttttcgaatcgttcttatgatcattatgcagaaattaagcaagttaatctcttattttgttgtatgagatatttcatatttgctatctcttcgttttgtaggttctggttgttgcaaaccctgcaaacaccaatgcattgatcctgaaggaatttgcaccatcgatcccagagaagaacattacttgcttgaccaggcttgaccacaacagggcattgggacaagtgtctgagaggttaagcgtaccagtgtctgatgtgaagaacgtgattatctggggaaaccactcatcaacccaatacccagatgtcaaccacgctaccgttaagacttccgttggagagaagccagtgcgtgagctagtcaagaatgacgagtggtaaaaatctctaaaacacccttttaatatctcaatctagtttcgtgaatgtgatgctcatgtatgttagcaactaatgttgtaggttgaatggagagttcatctctaccgttcaacaacgtggtgctgccattatcaaggccaggaagctgtctagtgcactttctgcagctagctcagcttgtgaccatatccgtgattgggttgttggaacacctgaggttcgtcattactactgttttatctcgaatcaattggttgttttgtgtactaagtaaaactaatatgttcttcgacttgatttctcagggcacatttgtttcaatgggagtatactcagatggatcctacaatgttccagctggacttatctactccttccccgtaacctgccgtaatggagagtggaccattgttcaaggtaaatatatttctcgtaaccaaaagttatacacaatgttcttaagagaatcctagcctaaagctgacccgtgtaacggaaccgtaaactggattgtctacttctaatcctaagtgtgcaaggctggttctcgctgcgatgattagctcatagaactagatattggtctaatatgtgttgttgttattcacaggtttaccgattgatgacgcatcgaggaagaagatggatttgacagcagaggagttgaaggaagagaaggacctcgcttactcatgcctctcttaaaccggtcttttctcagctggtttaatcagtgaaagctttgtttcgaataaagaagttttgttataaaatgaacttttaataacctcatgagcttgaggtttagttttcctaatgtgcccatgatgtgtcggtactgatttgctgaccagatataaacaatcattttgataattgacctcttttggtttcctttcgtaacgggagagtggagagtggagagacaacaacaactcgaattttttggtagactttttcagatatgggccaaagctttgttgggtattcttttggcccatatgaaaaaaatacaaaagatttcgcaattgtgaaataaacagcttaagaatagtattatagaataaaatctcgcaataatatactccatggtttttatgcgatttagaacaatgggataatactaaattaataatttgaattaattttacgtaataattttacgtaacatttattttttaatttactattattatttaattatgctatttttactatttaccagttcatccaaatataaaaccttattagcctatcaaaaaaagaaaacgtaaaaccctatttcataggtttttatctaaaactaaaaccctattctatgagttttttctccaagacttgcagtcactttgatttatcttgtaattttatttttaaatataattttttttctataaaagagcaaatatagctgcagaagataatgatttgttgggtattgttgataactctttttttttcttctaattcctgatgaattatcgacggcttaattcatgtcctcttttttttcctggacattgaatgttagtgacaagtctatataggacctaaatacattccaaccttaacatttattattggcaataaatattgctatacatatttttctcatgttatctactaatctgtttgttgttttacttttgatatcagcttctaataacaataacatttttttttttttataaaatctgtttgatgaaaaagataataattcaaaaaaagtaggaaaactcatagtgcaactaaataaatctaaacaaaaaatctaaaagtctgacaaaacacaaaaagaaatcctaacaaaatccgataattaagcaaaaaaaacaaaaggaaaataaaaaaatctaaacaacaatcttctccttgattttctccggctcagtttcgccggaaagctcctcaagtgatttcccattagtctccggaattgtaaacgtgagaagcaagccaagcaaattgattcctgccatgatgtataacgtgttactcatacccaaagctttaaccaaagccgaaaacccgaaagaaccgaccatcgcaccggctttaccagacgccgccgatataccgtgacaagtcgaccttatcctcgccgggaaaatctcagccgggacaatgaaagtagttgcgttaggtccaaaattggagaagaaaaatgtgaaagagtaaagaacgacgaaaccaatccggttagccggtaaggtccaatgatggtacggtatggctaaactgagcatgaagatggtcatcatagcgaaacccatgatctggatctttttccgtcccatataatcgatgaaccctacagtgaaaaagtaaccgggaacggtgctgcaacaagcgattatggtttgagccttagcgatcatgtagagctcttggattgcgttcatggttttagccgaaggtaaccacccaatggtggtgaagatatccttctggaacaagttttggctgtagaaagcgatgtcgaggaggaaccatgtggaggctgttccgagtaagtggagtccgtgacggcgaaggaacttcatggagaacaagccaaactcgtccgaggaaaccctagcttgatcattctttgcggcagaggcttcaatgtctacgttgagaaccttagtcatatctaaagccgcttgctccgcgttcttggagacaagagccgtgtaacgagcggtttcgggcatcttcatccgccagtagtaggtcaagagagctggtaaggcgccgaccatcaggatgatcctccaaacgtaatccgcctgtgggacggtggaggctgcaccatccaatatataggctcgggacggaaacttactctcgaaaacagctgagacaagtaacgagacagctcctgcggcaaggatcccaatcccttgcataccgaaaacagctgctatgaaagcaccgcgagtacgtttgttggaatactcggacatgatcgtagccgagagaggatagtcaccaccgatgccaaacccgagccagaagcggaagaagcagagagttaccatgacggttttcgggtctcttccaagggaaagaccagaacaaatggagcatatggtcatgatcaagagagtcaaaccatagactctcttacgtccaagcttgtcaccaagacacccaaagaaaatctgtccgataaacgttccagcgaaggccacaccactcacggccgcagagatgccgtcagggaggcttccgggagaggaggagccaggaacctgatagtagatccggccaagaagcttcgtgataagagatatcacgaagagatcgtatgagtctgtgaagaaacccataccggagactacaaccgccgtgacgtggtaccattgagtctttgcaacgtcaagagctttcaagatgcttccttgttcttcgttagccatcgcaatatttttgttctctcaactctgaaaaaacaaacaagccgaaagaattgttacaatatatagagaaagttttgtaacaaaaacgtagcacgattctagttttgataaggaactattttatttgtaaacgtgaaataaacaatatcaacaaactattccaaaaaaattggggattatagaccatactgaaaaaacagcgataaaaagattttacacagaaagatcatgccgtggttttctttcatgcaatattcatgatccattgaacaaattagtttccgtgatgaaacatctgattatagctagttagtagttaccaacaaatatatgaacgaaatatatgtttataaagtaaatttaaggggatgaagtgattaccaaaacaagtgattagagccggaaagactcctttttttttgagctgacgattgttgaagttttgattcttagggttatagctttatatatagacagacacacatagagatgagatcacaatagcatattctattgggaaaaggaatagaattatcgtcaaactggaatttctttttggtttgataaaatcagagtggaaattaagaataattcggaatgtaactactctttttaataattttaaagtataagtcatttggtcaatagattttttccacatacatatctattttatataaaaaaataaaaactctaaaaaaaaaatgaacgtgtgaaaaaagaaattttttaaaaacaaaactaataaaaaaaaactgatttccccttctttaagaatacaaataaaaatgagaaaatttggaaaaatgcctattttctaagtttttgtttgaaaaataacctacacatttttccttttaaatatattttttaaaatataaaagaaatataaaattacaaatatatctttactaaaatttactaaaaaaacatttatatttaaaacaaaaatccggttttcattttatttttgtcgacaccaaaaaaatgtagttcaattttaaatatttaatgtaactaactaaaaattttaaatataattttatcttgaatatattttttaagaaaaatattgttacaagacaaagaaaaaaagaagaatattctttaaaagagaaaagttagtcgcatatatatgtataaattacaccatacatatatatgttacaccatgcagaattttattattatattcttataattgaaattacaaatatttacaaacaaaactaaattagttcaaaacttggataataatgtagaattaaagaattttagataaaacaaaatgtagagttaaagtgagatatgtatatgaagtgataaactttagaatatttttttataatatcatgttagattttaatatttgaaatatataaactgtcttcatcttaaaatagtttaaaataataattaagattttcaattaagttttttttttctttcaaaaattcttatttaatttaaatttattaaaaatatttcttttgttttaaatctggatataattgtcatttaatatatttttaattttatttttatttaaaaatagggtagagtatatttttatttaaaaactcaaaaatagagcaattttcaaaaatcacccaataaaaatatcaacaaagtcttaattcttaaatcacactacgatttactattattctatgtttgatttacccacaactccgtctaaattttcttatcgaaaattttcctaagttacgatcgcacttctacgttcgcgaccgtccaacggagtactagtcataatgaggggtattacagtacatgttcgtaaaacgggtgataaatactaataggttgataattgttgcgaatttttggttgattatatctgatggtaaaagaatattgcacgcatttgtaattgagaatattccttcttagtaataaactaataatattatagaatcttataatatggtgtaatgttgttagtaaaataatcatttgttatgtgggaaattacaagatatgctattgaaaatatttcagctagcatttaattacttttatttaaaatgacgaaaatcatatcttccatatattcaaatttcacaattaaacataatatatcatgtcttttgttaattttcaaaatttattattattaatttctatgaatttatgaatttttctgggtatcaacatgtctcactattaatttgtggcacttcatcctcatttagttatcactgcattttttaatattattaatatttaaacaatactttttgtatatttttggcagaaaattgagttttatgtgaaaattaaatattcagcatccatatatgataaatttgaaaatgcattattgttatattaaagaaactatttattgaaataaaattattgtatagttttaaattttaaagattcacattagtttttaaaactatatcaattaaaatatatgcaaaccgttttcatcatattttacatttaaaaatttagaaaataatttcatacattttgtactaaactttatttgcaagaagttttcatatctttaagatttgaaattgactcctaaacctaacaatttgtacaattatatatatattaaaaaattagcagtacttgaatgtgtatactgtttcatatggatgtttataattgttttctagactcgtttaatatttgatttattttttttcctttaaaaaaaacaagaatatgaatcacaaaaaaattacaaaaacatagagtactagattttaacccgcggaggcaattcattttttaaaattaatatatatatatatatataatttgtaaattattttatagtttacaattgttactaagtaacgttctgccaaacccgtcccgccaaaccgtccacaaaaaaaattatttattttattaatgttgatcttatttataatatgtttatgaatcattgtcaaaagattttattcgttgcgggatgttgaacccacacatttttcgtcaattagttaatatatgttcattcttaaaatttcgaatcacaaaatatgacgaattttgtgttgagattttttaaactctatatattatataatgatgttaagtttttttgatatattaaactttttataaatttaaatattattaatgttttatgaattttaaatatataaataagaataattaaaaaattaatattttttgccttttaggtaatgatataataactctaaaagcaagaatttagaagatttaaatctttaattaaatattttcatacctaaataattaatgtcagtagcatgacattgtaaataagttcaaataaatgatttgtttatttaaacaaaaaacgtttagtaagaacaatatttatttaaacaaaaaactttgttttaaaatattgttaacaaaatacttttatgctaattttaagggattgatgtgaagtttgtttggattaaatttgattgataatgtgattgacaatttaaattaaaaatttaaagtaaaactaattattttgaaaaaacgatttaatgctaatggcattgggttgtaaataagtccaactcgaagatttatttgttaaaatggctgcaaaaatatatatatagatgatctaacagattttaacattggatggattactttaagatggtttgatttgattgctgaattacattggaatatgtcacaataaattaaatacataaaattacaaaatagaacttattaaatagaaaatattatgattatgatttattatgtaaactagcaaactaaaatttctgcaaatatttccccaagctgaacagcgtggatcctatctagtatttatgtataatacaataaaagaactccaatttaactgttttcaatcttctacgtacgagggtttcccgtggataccgaatcaaacaaaaattcacaaatccaaaataaaattacattagtaaaattgatggtattattttgttttaccgaatcaacgtaccaaactaaatccaaaatggaactcaaatcttgagcaattcaaacgtacaaaccaaaatacactaaactgtatattttaaattaaatataaaatacatttaaattgtatttatatacccaaaattttcagaatatatgtaactttatatttttgtaacagttttcaattcaaaatctacccgtacggtacctataccaaaataaaattacatttgacaattcaaaattttggagtttaagacatgtttcctaaaaagcttaaacctaaaaaccccaaactcaaagaagttaaaccatataacttaactgaaaaaagcatgtccagacctatttctcgcaacaataatcaggtacattggacttctacaccacgatagaagctcgaacagaatccacaatctccttcttgagcgacataagaaaagattctttggaagcttttattatggtgtagaagtcacattcttgtgttttattttgttgccctaagctctagtactgtgtaactgtaaatgttgctctctttggatagatcagatctaaactttgaatgaaattcattagttttctaatatattaatataagtaaacgactagatctaattttaaccttgcttttggagtgaatatataagcttgtttccagaatagtgagtcgatttcgaaatattagacaagatttaaatgatatcataaatattcttataacatcataacttaaggtcaacgagccaataaaatgaaaacaaaaccaaacatcgcactccaaataacaaaataaacatacataattatttctcgtcatggctaacctcagcctcaccagagagttcttcaagggacttgcctttgggctctgggacaaggaaggtgaagagcataccgataaagttaagaacaccaagcatgatcaatgagttcttaactccgatgcctggtgggtatcctgcgtctaccttggccttgtcttgtgattgagccgcatataggaacccaaaggctccaacaatggctccagccttaccagccgcggctgatattccatgacatgtagaccttagcctggccgggaatatctcagcagggacaataaaagtggttgcatttggaccaaaattggcgaagaagaaagtaagagagtacataaccacaaatccgatacggttttctggtttgatccagtggttgtaagggaaggcaatggcaaacataaacacggtcatcatgaaaaatccatttagttggatcttaaaccttccaatggtatcaataaacgcaactgtgaaccagtagcctgggactgtactgcaaagggcgataagagtctgagccctagcaatcctgaaaacctcatgggtggcgttcatggtggctgcctttgggatccatccgatggccgagaaaatatccttctggaacaagttttggctgtagaaggcaatgtcaagcaaaaaccatgtggaggtagttccaaggagatgaagcccatggcgtctaaggaattccttggagaacaagccatagttttgtttggggtctttgacgtcatcctccaccctttcctcaagctcgatatctgtttgtaagaccttggacatgtcggctgtggcttgtttgatgttcttggcaaccaaagcggtgtaacgggcagtttcaggcatcttcatacgccagtagtaagtcaaagctgcgggtaaagcaccaaacatgacgatgattcgccaaatgtagtcaacttgaggaggcgttgagagggccctgtttactgcatatgttggagctgggaactttttgtcgaatatagaagatactgcgagtgccacgaaacctccagccaagataccgacaccttgcatggcgaagacagctgcgatgaaagccccacgggtcttcttgtttgcgtattcagacatgatggtggcagaaagtgggtagtcacctccaataccaaatcccaaccaaaacctacgtaatggtttatatataaaaaaactttctcaaagaaaaatacctaaatcagttcgaagcgtgactaacttttaaaacttgcattcgttattagattattggttaatcattgtgtatatataatattgtaattggatgaaaattgtacctgaagaagcaaagggtggtcatgacacccttggcttcgtggccaaaagagagaccagaagcgacagagcacaagatcatcattaccaaagtgagaccgtacacttttttccgtccgagtttgtcaccgagccaaccgaagaagagttgaccagaaagggttccacaaagggccacaccgttgaccgcggccgcaacatgagggggaagtgagccaggcttcgctgactccggattgaaatagtagatgcggccaaggagtttcgtcaccaaggacacgcaaaaaagatcgtaggcatcggtaaagaaacccataccggcgatgacaatcgccgtgaaatgataaagttgcgtcttcgcaacatcgagtgcctttagcactcctagttgttgttcggccatttcctagagctctataatcatacaacgcaaagaatccaagatttcatgtcattatttctcgcttatgaaatattttcatttggagacttaaaaaatatcatggaacagagcatttgacctctcaatggccaaaattttgaaacaaaacttgatatctttggaattatgaacaagaaaactcaacttgaaatggtatatacacaaattaaatatagacgacaaaggaaagtaatattaccttaatcagcttggcaggagaaattaagaacttctctggagagttgaggagagactatatgtggtcattagaaatgaacaattatgctggccatttatagagaagaagaaagagaagcacgttaaatgtaataaaaaaatgctttttgaaaaggaaagatatgtaagcaacgtgatcgcctctttcttcatagttattatttattttgtaatttcattttggattttagaattttagtcatcaatactccctccgtatgtttatagttgatgtttaagatttttgaacaccatttgtttctgaagtaaaatattatttacagtctattttatattgaaaagtataaaacatcatctaagctggacgatacgccttccagaatatgaacaccttatacaataaatctctctaggatacgtgagatgggatgatttttttattgtatgatagttacggattctgattattattttgaagcaggaaacgaagttttagcaaaaatttctgtttaaccatctcaattactatatggagacagattgatatatgagcattactatagatatgcattccatgtaaatttctataaatagaagtagctaatttagacgttgtacacacacaaaaaaagaataaaataaaatcaaaaagaagtagtgtagacacgaattcagtttgtagttaatcttgttggcattacttgtaatcgttgaccagttatatatatttatgtttgattccaactttgcaattatattattcgcaatataaaatgcatttctaaaattaaataaggagagttgcaagctctaatcatttatttattgtttcgtgtaaatctgaactacaagttattttagagccaatataagtcgaaaggttttaaatttctccatcttcctcgttttctttgttttgttttttgcagtcgagttattcaactctaatagttgacatttgaggagtgacaatcaggatacatatagtcatgaagattaattatcatttagcaaagtcaaaatcattattttaaaaaagcatattcgaaaaacataggatattcgcgagaacataagcatataaattcattttaacagataattcatgccttagtggacttagttgccattacatatacataaataaggatttaatatcaaccaatccagctcagaccatatatatatataaatgtgaggattgtatttgttttaaatgacgggttttctggacttcgatatgtacacgttaatgttttaaatggtttgaatgttttgttgttatacgagaggtattacatgcataaattaaatataaccataataacaacaaagattaggaatttgatagtagctgtgtagtagagataagcagtcaaataaatatcataaatgaccactaaatatcgattgattacattttgtcacacaaaaaaataaatgtagagatccaccattacgaacatgaaatatcacattacgcatcgcaaaaataaagtaaatcgtaatagaagatgtaattcatcgaaccaattaagaatttgaaaatattatggcgtaatcatttctcaacctcagcctcaccggagagctcttcaagggacttgcccttgggcattcctattatttacaaggctacaagcaaagaaaaagaaaaggccacttaacacatgcttatagtaaaaaaaaaagagaggatattttacacatgttcataatataaaaaaagcctctttacacatgttcatagtataaaaaagtgtgatcaaacaaaatataaaattggttatgtttaaaaaaagcactaaaagtattaaagcatcaaagatcaatgcaatttttatatatgatattccttgcatttatatatgtacgtagactcatccatcaagttttttttagtcaaatttctatcatatccttcatatgttgtttttatgaagaaacaatgattaagaagtaaagaaaaaaaacttatcagaataaaacatgaatttgttacagttaaaccactaatgaattatagaataagtatgagatacagagacaaaatagacaaaatggatggatttgaactaaaaagctgacagtttaaggaccaataaaccacacaatgctagaggaagaaaaggaaccaaaagattaattgcaattgaggttaattatttataatttagtaactaatttttttttgacaaaaacggaagaagaaaaactgtaataatatcggcatttgggagattcgaacttaagaagttaaacaaaacaaggaccaagttttccctgacgcgaacattggaccatagaacaacttcagtatttggaggccgaaaatgtaattattgaataatcggctgcaagcatgggcttggcccgcttgtgctcatggccggctctgcccttgggctaaggaacaaggaaggtgaagagaataccgacaaagttaatgacaccaagcatgaccagtgagttcttgactccaaagccatgtgggtatccttcgtccgtcttggtcatctcttgcggctcgcatataggaacccgaaacgtctgactatgttatataggggttcaagtgcaacgtctatatgctaaaataaagaaagaaatcgcaacaataaatgaaaatatggccgttgaaaattgaatgagagaatcggccatactaggaaagttgtgatgtgtcttgagtcttgataacttaggcatcattaattgtaggaatcttcaagacccgcaaaagatgatcagaatatagtcgttgtgatatgatctcattcggctctggaaaaagaaagttttggctctgtgggttcacataaggaaaaatgcaccaaggattagtgtgaatggttctgggtggtgtataggatgtccaggcttccatatgtggctctggaatgcacaaaagggaaggaaaggatagctttccttagtttgcacaagccctaggtttgcttgacactgccctaggttttgtagtcgttcatgtgcctacagtttggttatgatcgattaaatcaatatcaatattcataatatgctattaaagtcatattcagtgaacttggacgtccctagacttactcgcctaagctatcaagacttaagagaattaagactttcctatttcggcgatggaccaccatttgatgtccaatgtctcttcctttttgtttttttgcgaattttcttactttcttatttggccattaaccatcatcacgtaaaagggcaccaaacaacgtcattgcatccggaaatatgtttgagttctatggtcttgtttaccgggcaatgatgtcttggatctcgagagattagctttcttcatgagagaaaatggtagatgttactttcgggttggccgtgggcatctttaataaatttcatttgcatgtgtatcagaagaaggtgattctcatttctcgtaagggttaaaaatagttgcttttggtttgatagttttcgctatcttttcttagtttattatgtttttcttctgtatagagctagatttcggaaaattctcttttttctttttttcttttgcggtgtctctaaaaaattagtttatttgaggccttaagttttcttttgtttgagaattgaaaaattctttctaatgccctttacacattaccccttttcaattctaccatattatatttaccattttcatttataccctctttaaatttttaatgaccatttaacccctatttgtaaattgatttaggttaataaaatgaagtattaatattttcgcctaaaatattccaaaataaaatttcctgccaaaaaatttgggaaaaaacttcacgtcaaaaatttcggaaaaaaaaattcccgccaaaattttcccgcaaaaaaatttcggaaaaattttccgccaaaatttttttcgaaaatatttttcccgtaaattttttgttttggcgggaaatagatttacaagggattttaaaaggggtttaaaagatttacaagagattttaaaagggtttaaaagatttacaagggattttaaaggactttaaaagacttacaagagtttttttaaagatttttaaagggtttaaaaatgttttaaaagatttacaagggatttttaaagggttttaaaagatgtacaagagttttaaaagattttaaaagaatttataaaaaaaacctttaaaaactcttgtaaatctttttaaaacctgttttaaaggttcagaagagatttaaaatggttcaaaaagagtaataaatgttttcaatacttacaattctttttctaagagttaaaaaatgcttgtaaaaactttataagagttttaaaaggatttataaaggtttaaaatcccttgtaaatcattctttgacatttaaaaacgattgtaaatcattttaaccccttttaaaatctcttgtaaatcattcaatgtcacttacttatgctttaaaacgattgtaaaccatacaaacacttttaaaatcccttgtaaatcattctatgccacttacttatgctttaaaaacgattgttaaatcatgttgtacccttttataagcttttaaaatcccttgtaaatcattctaatgccacttacttatgcttaaaaaaacattgtgaaccatgctaaccctttttaaaactccttgtaaatcattttatgccaattacttatgctttaaaaacgattgtaaatcatgttttacccttttataagcttttaaaatcccttgtaaatcattcattgccacttacttatgcttaaaaaacgattgtaaaccatgctaaccctttttaaatcccttgtaaatcattgtatgtcacttacttatgctttaaaaacgattgtaaatcatgttttacctttttataagtttttaaaatcccttgtaaatcatttaatgccacttacttatgcttaaaaaacgattgtaaatcttgtaaaactattataaaaagctttaaaaagatttacaaaggttttaaaaggggttttaaagtatttacctatgtttttaaagactttataaaaattttaagagtttttaaaatgatttacaatggtttttagcaactaccaaaacttttaaaaaatttacaaagatttttaaaagcatttttttggctgggaaaaaaattttacgagaaaacatttttggcgggaaattttttttttggcgggaaaaaaagtttggcggaaattttttgtttggcgggaaaaataaattttggtacatgttattattaaatgagggtaatttggtcattctgttcaatagaagggatatttttaaaaataaacaatataaaatggtattgttacaaaagggtagtaaaaaaagggtagttttgcaaatctccctcgagaatttgcaatttctctctcatagcataacatgtcttttttttagtaaatttcaagatgacaaaaagaaaaaaaaaacataaagaaacaaattgaaagcaacatctatttttctgacttgtaaaaatgtggtgttactagcaaatatcaaatttttgtatctataaactagattttaacccgcggtatactaggagaacgatttattttttaaagttaatatatatacaagtttacaaattgaatatatttataaaaaaaataaattttttagtttacaattattattaggtaacatcccgccaaatctgttccatcaaaaagcttattaattttattaatgttaaccttagttatgatatgattctaaatcattgtctagatattttagccaatgttaggacgttgaacccacatagttttcgtcaattgaataatatatgttcgttttataaatttcgaatcacaatttatgcagaaaatgttttgaaatttttcttaactttacatattatacaataaaaaatcaaacaaagatgataggaaattcatagttttaaatcttaatcaaatcttctaaatatcaatattgttaaatatagaagtaatgagtataagagttgggttttatttgaaccaacccaactaagatttaatgaacatcataaactaatgggtctggtatcaaatgtaatcagatgcattttaacccacaatcaaaaggtgactgcaaaaatactatataagattcatagaagtagatcgtctatataggcctgaaaaatatcagttttaaattaaattatttagagatcttattttgttgggcttaaatactggagaataagactactttagtaatcaaaatatttgggccatgtaactaatgcaaaccaaaatcattattgacaaaagtcattgcatcaaatgattttcttaccaaaatgtctttaaaatatatatatatatatatatatatatatgtaccttcgtacggtacggttgcttttatataaaaaggtgttgtacggttgcattgacttttgatcgtaaatactatatagtccggagactcaaatgcaaaccactttctctatttttttggacggaagttatgttaacctaaattatctaaaatattacacaaataatttttaaacagtttaaaatggcatataattatgttaatagaaatttgacttttagtacggagatacattagctgagaagtttgacctcaccttatttagtgggaaccttgttacttttgaattagtttgaacaatatatctctaattcatataaagtattttgaaatataaagctttataaatataacatattttttggtgggtaatgcttctttttttctgtggcttataactacgtggagatcttatcttctgtccgcttatattagtatttcaccatagtgattttaataaaaatcagattaaacaatatataacagctattttagtttacaggtttaaacttttattttagttctttgattttttttttctttcagaaaatggtggacatcttctaaagtttgttttattaatctaggtagaaactttcaaacaaaagacgaaaacagaaaagttgactttagtacggaaatacatgatatgagataactgataagataacttgttagatggtttccactctcataaacaatataaaaaaattattaacgatagtgaactcgatttttagtaactctatgaaaatcttcttgtgagatcataacattttagaagactaggcttttcgtgtaatatgatctgtagaccattccaatgttatcatatgcagaacagcaacacaatgaaataaattaagagatggaaaataaattaagatcaaataaaatgtggatatacccttaagattccggagacaatacttctccagttctcctctcgtctataaatttctgccgtctcagccaacataatcacaaccaccacctctctcaataattctctctcttgtccttcacaacctgttactacttaggtgaatatcatctacatgtttattttgtcttaatccaaattcacatttaattttgttttcactctttttatcatgtatacttttttaattagctagccgagattatatatgttaaaactacctctatttctaacacacccaagcaatatatcatctttccaatatttacgaaagaagaaatttctatacaaatattaacctttactttgtgcaaaataggagagaagaaaaacaaaaagactgactgagatggccgatcaacagctaggagtgctaaaggcacttgatgttgcgaagacgcaactttaccatttcacggctattgtcattgccggtatgggcttctttacggacgcgtacgatctcttttgtgtgtccttggtgaccaagcttcttggccgcctctactacttcaatccaacgtcagcaaagcctggctcacttccccctcatgttgcggctgcagtcaacggtgtggccctttgtggaacccttgccggtcaactcttcttcggatggcttggtgacaaactcggacggaaaaaggtgtacggtatcactttgatcatgatgattctctgctcagttgcttccggtctttccttgggcaattcggccaagggtgtcatgacgactctttgcttcttcaggtacaatttatttagccacaaacctaatatcacatacgtcacagatacaagctcgagagattagtcactatttcgacctagattatggttacttaagatactgatatctagacgattatatataggttttggctcgggtttggcattggaggtgactaccctctatctgccaccatcatgtctgaatacgctaacaagaagactcgtggggctttcatcgcggcagtgttcgccatgcaaggtgtaggtatcttggcgggaggttttgtggcacttgcagtttcttccatatttgacaaaaagttcccatcgccgacgtatgagcaagacaggtttctatcaacgcctcctcaagctgattacatttggcgaatcatcgtcatgtttggtgctttacccgcagctttgacttactattggcgtatgaagatgcctgaaacagcccgttacaccgctttagttgccaagaacatcaaacaagccacagcagacatgtccaaggtcttacaaacagatctcgagcttgaggaaagggtggaggatgacgtcaaggaccccaaaaaaaactatggcttgttctccaaggaattccttagacgccatgggcttcatctccttgggactacctccacttggtttttgcttgacatcgccttctacagccaaaacttgttccaaaaggatattttctcggccattggatggatcccaaaggcagccactatgaacgccatccatgaggttttcaagattgctagggctcagactctcattgccctctgcagtacagtcccaggttactggttcacagtagcctttattgatatcattggaaggtttgcgatccaactaatgggatttttcatgatgaccgtttttatgtttgctattgccttcccatacaaccactggattttaccagataatcgtatcggattcgtggttatgtactcactcacatttttcttcgccaactttggacccaatgcaactactttcattgtcccagctgaaatctttccagcaaggctaaggtctacgtgccatggaatatcagccgcaactggtaaggctggagccatcgttggagccttcgggttcctatatgctgctcaaccacaggataagaccaagacagacgcaggatacccaccgggcatcggagtcaagaactcattgatcatgcttggtgtcattaactttgttggtatgctcttcaccttcctcgtccctgagcccaagggcaagtcccttgaagaactctccggcgaggctgaggttgataaatgattatgccgtcatatatgtttgtcattggttttgcgatgtgtgaattatatttgtaatggtgtactacttttacgttttacgttctttgcgatgagtgaattatatttgtaacggtgtactactttcgctttttgtttaaatgtgtgtgcaagtgcaacttgttaagatgtaaactcatgttatggtcatatcctagtaatgctataagtttggaagcaataaagacatgaacaatcaaacaaaaaatatgcttagtggaaagtttgaaatgaaagatataagggctagtggatgtaattctagggatcaatattgatagaactgataatacaaaaaatcagcttgtactggtatattaggttgaaaagataaatgagatattttagaactactgaactataaagattggtatattgttgttcatgtaatcgaaagattttttttgtaagattgtagatgaatttatcatcaaatgaactacaaagactagggactcccaagagtccaagaccctactcttcacttgtctaaacatttaagtgaagcaatgtcaaattaggagtatgatgcaacagtctatttgatatatttgaccagttgtactagactcaatttgatgctgccagtgtgccgtagaagccttccaaatagacattatagctttagtcaaagcaaatgaggaagccgagtggtttcagaacttgaaaatatttcgatgggagaaaccagtgttggcactacgtgtaaactaaactctgatagcaattatttattgttcgagcattgcgctcttagtttaatgttaaatcttgtctaattagaagacaacacaaaaaccaatagcaactaatctcaaatagtgtaatctcacttgattatatcaaatcggatgataacctatgacctattttactaaaaggtctgtcacaaaagtaagttatatatattcaaaacaaaaaaaatataagataaaaaataaaacgaagaaaaactgggaatgtcaaatatgataaatgatttaaacaaatatgtcatgacaagaaaaagaaaaaagaaaaaaaactgtcaccgttacaaaaaactgtcaccattataagtgttattatacttataaaaatcagcaagaacaacaaattttggtcatcataagaattcaaaattacaaatatatcgtaacataaaacattatagtggtcattccatcaattttgtttatcgtttaacaaatctgcgatcaaacgatatattttagtaatataatttcatctatcacaacataaccaattatgtcataactaaaaatactatattttaaaaacaaatatgttgttacatgaaaatattttggtaacattataaaaatctgtcataagatataacaaatctgctatcattagaggtcattatatttattagttttttgtacataaatttcttataacatgatagatgtttttagaaaattataaatctaccgagtcattcaaaataaaacagccagacactacagtaagtctgttataaactatgaaagtatgtagttgaataaaaaaatctgtcaaaaaaataaatatgtcaaaaaaataaatcagctacaattgttttagtctattgtaaccatattctaaaaaatctgtcaaccaaaaaagtctgccaaaagaaatatttacggacaaatagatctgtagtatataaattagatattaaacttttgtaaaattattgctagaattaatttgaaaggacatttttctatttatttttttacacatgagacaagtgtattttagacatgaaaataatttaacccaaattgtttttaaaataatctagtaattaaactgataatttatgttaatctagtaactttcccattattataatgataaattgttgagaaaatttactttattttagtgttactttgttctagagtaaaatcgaagaatacttagggagggacatagggtcagtgccggcttaacatggagaggagggagtgcaacaacgagtggcccataaagcaaaagggacacatacaattctttccttttgtaaacataaaaagaaaaagaaaaaaatatgtgcaaatataacagaaaattgcaaatttttactaaaaagctcatatatatttgcattccttttaaatataaggtaaaaaaaaattctaaatttattgggcccaaattatatgttgatatattttaatccaacaactctaatacaaatattgatttattgggccaaatctcttttgtaaaatgagattgttgttttattttattttaaatgatgtttactaagtgttttacttttgtacgaaaacaatttccaatatattaagggtccaattttttttttgccctaggacctagaataagcttgagccggcactgcagagggtcctaggatttttgtattttttactttgtaagtgaatgccatagcaagccaaggactgaagaagaacaacggaaaatatagagaatatgaatttgtgtgatgcgaagacgaaaagaaattatagaaaatcaactgaaattgatgacgtcgaatttgattgaggagaaaaaatagctacaaaataagaggaagaaaaaggaaaataaagaaaagaacgaagagaatgagaaggagaagccgaaaagggtctagagaagaggggtgttttttcatgaagacaagatactacgaaagaaggaagatgaagggctagttataagtagatgtagatctctgaatatatatatatatatatatatataaagtgtctccctaaaccggaaaaaacgatgggttttgatatgctgaacgggggacaaaacccgagaaccgaaatcaatttaaaagttcaccgatcactatacaactctgcacttattgaaaccgaaaaccaaaattctccgtttagacggttttggttcaatacggttcttattgaacgtcaatcactctatctactactatacttgaaaaacaaaattaaattttttgccttgacttgatccagagagatgttacgcggcggcgatgcattaatcgataaaatcaaacaacatgccacgcattgacttttgcaagaagccagcaactttatataaaacaatcgatgataattgtgatcgttacaactatgtaataatgcatatatataagctatgtattaactgtaaacttgatttaaataatactgatggggagtatataccttgatgcatagaataaaaatgtaaaatacgtatgaattactagcttagtggtagccttgttacttggattagtttagcaagcaaatatctagctctaattcacaagctaaccctaaaagttggttggacatatacatcgtcaaatatatcgaagctatatatatatatttaacatatttgtttttgttacattaaaacaaacaaaacaaaagaaaaaagttttttttgtgctcctcctttttaatatcttttatgaaaatggctgactgttatggaaaatgatgtttttattaatctaagtagtgcctttcaccaaagaaaaaaaaaaaccaaatatagtagactttagtacggagatacgtgaacataacttgttagattggttttcaacaaaagagtatagaatggaaaatcgttacatactgactctcatgaacaaacatattttgcttaatgaaaagtcaactcgatctttattatttatgaggataaaaatcaaataggctctgtcgacaaaacgaaacaatcagactaccctttagaatatatttaaaattaccaaaaatattaatcttttaggaaattacacatgatgatattttagcatatggcggatatttacctccaactccaaatgaggatattttagcatatggcggtctttattcgtacgtactattttgcaaatcattttatatgattgtatataccatagattataatcactactcttagtcccataatttgtaaataatagtaattcgtagacatagatgatcaaagttctttgtaatcttactacatacacaaaaagtaataaaacacaacatttttgttgtattaaatgtgcttgtccgttgacaaaaaagataaaagaatagctttgtttgtcctttctcgacaagtttgtattataatcgtctcacgttcatttcaagattacatgcagaatttgtcaaatgaagtctaaatcatcaaaagtaatttttccttatttgttctcacttgaatataaattaacgaaatatgattcaccataaattacacgaactataggatacgggtacttatttattcccttgcggtaatacgaataggtccaagattggaaatctcagagttgtcatgaatactaagttaaaatatgtgcagaccatacaaaacatagacgagcatagaaagagaagttgatcaagtgatggaaaaagattaaaataaaatataaatatggatatacccttaagattccggagactatgcttctccgatctcgtctataaatttcagccgtctcagccaacacaatcacaaccaccacctccctccctctctctctcttaatctttctgcccccaccattagcgcacaacggtgagattcgttagatgtttattatctatgcatccaaattcacatatagatagatagtacatatatagttgtttatatcaatagaaacttttgtttctaaattgtaatcgcttaaattatttgatttatgtataggtttaattataaatgttattctgttggttgtattggtactaaactaaaataatttagtagcatctttccaatattattataaaattatagttaagatatttatttttacttcatgaagcaggaaagacaagagaggcttagatggctgaacaacaactaggagtgctaaaggcactcgatgttgcgaagacgcaactttatcatttcacggcgattgtcatcgccggtatgggtttctttaccgatgcgtacgatcttttttgcgtgtccttggtaacaaagctccttggccgcatctactacttcaatccggagtcagcgaagcctggctcacttccccctcatgttgcggccgctgtcaatggtgtggccctttgtggaaccctttctggtcaactcttcttcggttggctcggtgacaaactcggacggaaaaaagtgtacggtcttactttgatcatgatgatcttatgctctgtcgcttctggcctctcttttggcaacgaagccaagggtgtcatgaccaccctttgcttcttcaggtacagttttcatccaattacaatattatatacacacatgattaaccaataatctaataacgaatgcaagttttaaaagttagtcacgcttcgaactgatttaggtatttttctttgagaaagtttttttatatataaaccattacgtaggttttggttgggatttggtattggaggtgactacccactttctgccaccatcatgtctgaatacgcaaacaagaagacccgtggggctttcatcgcagctgtcttcgccatgcaaggtgtcggtatcttggctggaggtttcgtggcactcgcagtatcttctatattcgacaaaaagttcccagctccaacatatgcagtaaacagggccctctcaacgcctcctcaagttgattacatttggcgaatcatcgtcatgtttggtgctttacccgcagctttgacttactactggcgtatgaagatgcctgaaactgcccgttacaccgctttggttgccaagaacatcaaacaagccacagccgacatgtccaaggtcttacaaacagatatcgagcttgaggaaagggtggaggatgacgtcaaagaccccagacaaaactatggcttgttctccaaggaattccttagacgccatggacttcatctccttggaactacctccacttggtttttgcttgacattgccttctacagccaaaacttgttccagaaggatattttctcggccatcggatggatcccaaaggcagccaccatgaacgccacccatgaggttttcaggattgctagggctcagactcttatcgccctttgcagtacagtcccaggctactggttcacagttgcgtttattgataccattggaaggtttaagatccaactaaatggatttttcatgatgaccgtgtttatgtttgccattgccttcccttacaaccactggatcaaaccagaaaaccgtatcggatttgtggttatgtactctcttactttcttcttcgccaattttggtccaaatgcaaccacttttattgtccctgctgagatattcccggccaggctaaggtcaacatgtcatggaatatcagccgcggctggtaaggctggagccatcattggagccttcgggttcttatatgcggctcaaaatcaagacaaggctaaggtggatgcaggatacccaccaggtatcggagttaagaactcattgatcgtgcttggtgttcttaacttcatcggtatgctcttcaccttccttgtcccagagcccaagggcaagtccctcgaagaactctctggtgaagctgaagttagccatgacgagaaataatttactttgtgatcaaatgtggagttgtttgtggtttgtttgatttttttgtttctttccaaattttttttttcctttccttgatgcagtaagaaatgtttgattgtgtggaatacttcagtcttactgccgtgagtgcaaatcttgtaatccacttttttgtgttctaattaacattgtcaaataaagtttcttaaactttgattctaactttccaaacactaacgaactctctgttgtgcgtttatgtttatcaatttgaagcatgaaaatttgattgttcatatgtttgctatatactgagaaacaccaaagaatagtttttatggatttcgattatctgatcaacacattagttggttatggtgttcaatgttcagtgtcttgtcatcactaacgttatctctttgccttatatcgacacattcaagtgggcgtagttgtagaccattagtcttgtgctctgtttgtaaataacgctattggttagttagctttctttttggttggtgtatatattctttttgggttgaagctctgtgtagcgtttagaaatgttaaaagttcgatcccaaaatgtagcaagatttgaaatttctttttggattgatgtaatgtatttaactggcttcttatgaatcacggtgcttattgtttgattaatgtgaactgaattgttctgtgcttgagattcaaaaagctcaagaggatctaatactaaatagtctcactaatgcatatgtttgatttgtttcaaatattgattgttctctctgacgcatttgtttgattattgtgcactacctgtttgggatgggcattctattggtctcactataccaaattaccaactttgtgaaactcaccataacttgtgtgatccataaaatcttagattaattactgttaagtttcatgaaattttaactcaaaacaatttggcaataaatagattgacattgtatgtccaaaaaccaaactgagtatttaacaaaaccaactatttccgaccaatgaatgcgtctaaaatgtttgtttccaacaaatttctgatcattgatttcgtcggaactaacacaaataataattcgcataatcataataattctcctaatcagttcataaacttgaatgacaagttaatttactcattttaccatgaccattaattcataaattgagtcacaaattaatatcaagatttgaccatgtcccttatgcaagagggggttggaaagcgatgggtctatagtgttacaattaattctctagtattcatataaccaaaacacaattataatattttcacattaaagataaattaaaaacatccatataatgtttcacatttaataatatacatattttaaatattttgttaacatttaaaattatgatttttctatcattttttttattttttaaactactttgaatcatcatataatacataacactaattaaaatctaattttttctggatatattgtgattcggatgtttgaaaacagccatatattactcacataatgaaataaaattatttgtgttcaaagtctcacatcagctaaaactttgtgtccaaaatctcataaataagaccaaattgaacccaaagaaatatgagtgagtaggaatcctaacttaacaaacatccaaatttaaatatttgttcagtttaattcggttctttagtcaaaccgtttaattataccagatatcataaattctaaactttttaaaaaattaaaatattataattgatctatttaaagtgtataaaaacttcaaaatattatcaacgtttaacttataaaaagtttaaaatatcacggtatgggttatatggtttgacgagtttgaatcttcattaatataaatttaaatatcattaactcggtggtacaacatgggtaagtcatcattttaatattttgttaacactagcaatattataatgatatgtcaagttaaattgattcaattatgattatgtattaaaacaagatatataagtattagttttctaggtatctgcaatattagaaaccagatatccaaaagtcacggatctggattgttaaagcacagttctgaatacttttcaaattctaggatatccggatccattctaccaattacaatcctgcagaagccttgttggccacacaatcgacacaagagttagctagccaaaaagtgccttcaacttaagaagatgcaaaccggaaagaaaaaaacatatctttggtccgaaggaaatcatgttttattatcaaatttaaccaccaacaactacaaaccaaatttacaacaacaacaaccaaaaataaaaacacatacacacaagtgatagcagcagacaacacaaaacataacaaaaacagaagcttcccaaaattccgaaattcaaaatcctctttaatttctcatcatatagtagtcgagttacgttggcatggtttctaatagttattatgcggagttttaaatcttcatcagttgtattctttcgaattttgcgaactcagaatcgactgcaaataaacatgtttaattagatcaaatggttagagattccgagcttgccttgtaacatgacatgacaacaatgatttggctataaattacttgtaagttactagtgagaaacatagcaaaccaattttcaagtataccacagtgttagttttgactaacattaggtctaattcggtgaagtcaatactaatccaaagtttcatctatcaatgcgaatagatttaaaattattgaggagcacaaacagattcaaaatgttaaatcattcaaaaacatttagtaatagagcaaattattatgcatttaccatatttcattttttgtgctacagtatatccacaaattaaaaagtgatgtgattaatacataccttcactttaggataagggaagctagttttagcaccacctctgcttccgaaactgaactttgatttcttgtcattagattttaagatctgaaaagagcaggtcaaatcctcagacacactcatcatcgcacctgcattgtcaaattccccacagtaattcggcgcagagaatatcgttacgagctgcttattcgcaaagaactcgaatccatcttcaacaacctgttacaaaatcgttgcttgtgtcaaaaggaaacacgttaaaaatgtttctttgggcacaaggaacaataaacaaacctggtgagccctacaaatgaggtcaagatcgagtcttttaagaaatccagaaactatatctgatccaaaagtgtaagaaactccgcgatcgttaggcccccaacctctaacatctttatcaggatcagaccacaagagatcacagagtaaaccacgatcaggaatatccgttggacgacgaatatccctaatctgcctcaagcttagcagctccggggagagcccaccatgcatacaaaaaatccgctcatcgatgagtgcagcgacggggagacagttgaagcaatcagtgaagattcgccaaatcttgacactgaatctacgtttacactcgtcatagaagccgtaaatacgattgattgatgcactttcatggtttcctctgagaaggaagaagttttcagggaacttaatcttgtaagcaagtaaaagacaaatcgtttcgaggctttgcttgccgcgatcgacataatctccaagaaacaagtagtttgaattaggagggtatccgccatgttcgaatagtctcaagagatccggatattgtccatgaatgtcccctgtttattatttgtttaaccaaaagattacataggagcacaatctcagaaaagagtcagagagaaacagagagaaacgtaccacatattttaacaggagcttcaagttccaagagatttggttgtctcaagaagatatctctagagacgaaacagagctgtttgatctctgtttcagacaactgaacaatctttcctggtttttctctagcttcaagcaacctattgatcaccgagtttaaagtaccaggatccatttataaaacctcaagaaacagagcaacaatgagacaaaacaacaacaacgcctagaagctttataatatacaaaagctattgacaatatggaataaatttaaaaagtatggagcttttatgttcttttatgcttgctctttgagaaaaagaatggtgattgtcaaattcaagaagggctttataaagccgcgtttaagaatatattcttcatacctttttagcaaaagtcacatgtgttcatacctacctacattgttctaacttcaactaaatcatataataatcagattctagctaatttagtaacacattgtttgtgtgtgtgttaagcttcacaggattgaatcctgtccggtacgtcatgattcaaatttaagatctttccgccggtactttgagtgcgaaaaacgctctttcttcttcttctagtatcgatgtttttggattcgtccgcgtcatattaagcaacttggctatttacaaaaaacatattcttcttcctttgtagccaaaagccatgggtaaaaacctaccctaattgttctaacttcaactacatctaataaccaaaaatgttagctatattttctcttttatggtcaaaacatattagctagtttagacactttctttgtgttgagctttttaggcttgaatctaatcgaattcaagatacttttgcgtgtaagtagagcacaaaaaacgttctttctccatcacagtatcaatgtttttggattcagagtaattcacaaaaccttgttcgttgatttgttcgcatcatcttaagcaacttggcaatgacaaagaacatattcgttatgaaactaccggatgtgagaggacacctcaggaataacaaggaaagagagagctcggagaatattagtttggcttttgccttttttcttctattagaaccaaaagatataaaggaaagattccaagtttaggaggaaacgaagagtgatgcctcatcttatgacttctatagatcatttcattttcttagctgtatcttattagacataggtacttagaaaaaaaaaaaaaacttaaacaagattcattcatgtactcacaaaatccaatatttaaatgaataaaacttctcagtcataaacagcaagcttctgatactcctcacctttaatggctaacaacatgacatcttcaggattcacaatcccaccttcctcaagaaacagagtcagtagattcttcgaaaacccgctaaccatagctacacctttctgcttagacaccacgggtgtagctgacgagtctcttaagttccaaaatacaatttcaggaacattctgaaaacccttctctttatacttcctctgaacaacttcataatccgtctcccatttctcaaaactctccgggacactctcgtagtcactctccaagttactcgcgtagtcactcatttccgaatggctgtctactcttgcatcatcaaactccatgtcactgaacacaaacaaccgcttgatcatctgttcatcggttaagttattctcgacagcaacctctagaatccgatcaaacaccttctggaaatctgtgttgattccaaaatccatttctctaacaaacttagtcttctctctcagactcgaacccgtgacaacatgaagctgcgggttttcgctaaaagtgataactttccctttccacggctcttcattaagttccgaaaccaataaccctaacgcaatacaaacattcataggtgtaccagccatgcttcccgagacatcacaaatcgccaatgagttcttcaacttccctttcttggcaagatcatcaaccattctcgcccattgaagctctgctacttcttcaccttcactatcattcaaaagctgactgataatctgatgaggaagcaacgcaccagccgccatcttcttcttcccggatttcacatcctccaaaaactcggtgaacctctcgctatcgtgttccgcaaagcgtgaactataattctgcatggctatagaaggaactctattgtacttcaacagattccattccttggcactcatagacacctctggcaactcaagagctttatgtaacgggacaagaacttcttttctcaacctatctctaatcctatatgcataatgcacttcttcgataccttcttcgtattcctctctaaggaacattcttctagcaatagcctcacatatcaaagtagtcttatcatacgaagaatcaacagaaggacaccatttcgaagctaaactaatcttgttcaaattatctgtattcaaatactccaaatctgatttcaataattccgcaaacaaatcggcaatttgatcaaagagtaatctgtaattagcatcagagttatacctatctagagcctttttcgccttttcgaactctctctgtttccgtaaagccctagccttgactttaccaacaggaccaccagtctcctccgcggtttcgagaatccgatcttccatgtcaccggatatggtagactttttctcactatcccctttgaacttcctctgaatcctcttcctccaaacccgagtcttacctctctccgtctgctgaccttccaagatccgaagcagaatctcaggtaaatctttgaaatacccaaaatcgacaagagtagggatattcaaagctagagtttttgggtggttcttgtaaagccacaaggcagctgtgtaaaacccttccttgtctgattttccagttcctctaacacctctgagattgcagaggagcttcaacgtagtcaaaggatcgtgagaccaagaaatggccagcctttggatcagatcatcggaaggtgtgtctgggacgatatggaagaagaaatcgagacatgggttcccggaggttagaaacgtgggcgagaagttttccgtcagacccatctgtggttcttctaggtttagtgtggcaatttgggagattacactgttgtcatcggaaactggtgtctccatggcggcgacggaaggtggtccgagaaggatcgcagtggaagaagaagccattgaaagagagagatttggtgatggtgattgtctcaagggtttttgactttgaagctagggtttgtgtaaaagtaacggatagctatgtcaatcaattggaagagtaagagaaaccctaagacatcaactttatagaaaagaaaaatacaaaaagattatgaattatttagcttggcgaccaagtaagctagatccttcaaatatctaaatggttataaaatatcatttttttagaaaatgttgttcttttaattgaagtataacctttttaatcatagacattattgtttttaatttgtatttttctatgttaaaaaaatgtatgttagcatgtatcaaaaactaattggggaaaaaattacatgtatcaaaaactaattggggaacaacttcttttatattgaaaaactaggtttccgtacaagaggaaaagagggtagcttttgcaagagcatcagcttgccgattgttttctctaagaatgaaattgaaagaacaacaagtgaaagtagaagataaagcaaggatgtcgtgtagaatcccgtgaagagttgcaattggatcggcccttactcacatctctttcgcttcagactcgttaacactagtcaaagccctcaattcgaagctccgatgttgaaagcttagtaaagcattcatagagaagacatggaaaccgatgtttgaaggtaattttgaagattaacccgaaatgttttgtcaatttttgtatggtgattgaggtaaaatatacaaaaacacttttgtcttttctccaggaaaaagaaaaattaagagtagtaatcattgtcttaattggcttttgtctttttcttcagggaaaataccaatttgatgggtcttgttttctattccataaggcaacaagacaggactgtagcagaaagaggcttaaaacttctcattgaaatgatataaagaacaacagagagaagcctatgacaggagctcaaagagatttgcctcataaagatatctctaaagacaaaacaaagttgtttgatctctgtttcagacaactgaccaaattctctctagcttcaagcaacttattgatcaccgagttttaagtactcattaataactgaaagagatcacataggtattttagaaaagttaaaacaagattcattcatgtcctcacataactccccaaatcaaaaaacagaaacatagaaaattttaaacttctttaactctttgcggtataattcaaatatggtataaaactctttgcggtagaaatgatgatgttacggtttaagcattgaagcttgtgtatgtgtatctcagtcaaaaacaacaagcttcttatactcctcacctttgatggcaatccacatgacatcttcaggattcacgatcccaccttcttcaagaaacagagtcagtagattcttcgaaaacccgctaaccatagctactcctttctggttagcaaccaccggagtagccgatgagtctcttaagttccaaaataccatttctggaacattctgaaaacccttctctttatacttcctctgaaccacctcataatctgtctcccatttctccttggaccgttccttcgatatcttcaatcggtcctccacactcagatggtaactcacctccgaatggctgtttgccattgcatcatcaaactccatgtcgctgaacacaaacaaccgcttgatcatctggtcatcggttaagttattctcgactgcaacttctagaatacgatcaaacactatctgaaaatccgtgttcattccccattccatttctctaacaaactgagtcttttctctcagactcgaacccgtgacaatatgcagctccgggttttcgctaaaggtgataactttccctttccacggctcttcactaagctccgaaaccagtaacccgagcgctacacaaacctccataggtgtaccagacatacttccagagacatcacaaaccgccagtgaattcttaagcttccctttcttagcaagatcatcaaccattctcgcccattgaagttctgcaacttccgcaccaacttcactcccactatcatcctccagctggttgattatctgatgaggaagcaacgcaccagccgcaatcttcttctttccggacttcacatcctccaaaaactcggtaaacctctcgctatcatgttcctcaaacagcttcttgtaattcttcatagcaacagaaggaactctattatacttcaacaaattccattccttagcactcatgaacaactccggaaactcaagcgctttatgcaacggcacaagaacttctttcctcaacctatctctaatcctatacgcataatgcgcttcttcgataccttcatactcctctctaggaaacatccttctagcaattgcctcacatatcaaagtagccttatcatacgaagaatcaaccgaaggacaccatttcgaagctaaactaatcttagtcaacccattcgaattcaaatacttcaaatccgatttcaacaaaaccgcaaacaaatccgcaattctatcaaacagtaatctgtaattagcatcagagttatacctcgttaccgcctttttcgccttttcgaactctctctgtttccttaaagctctagcctttaccttatcaacagaaccaccaatctcctccgcattttccagaatccgatcttccatttcaccggaaatctcagactttttctctctcttccctttgaatttcctttgaaccctcttcctccaaacccgattcttccctctctccatattctgaccttccaagatccgaaacagaatctcaggcagatctttgaaatacccaaaatcaacgagagcagggacattcaaagctagggtttttggatgattcttgtaaagccaaaaagcagctgtgtaaaacccttctttgtctgatttcccagttcctctaacacctctgagattgcagataagcttcaacgtagtcaacggatcgtgagaccaagaaattgctagcctttggatcagatcatcgggagatgtgtcggggacgatgtggaagaagaaatcgagacatgggttcccggaggagagaaatgtcggcgagaaattctccgttagacccattggtggtggttcttcgaggtttagtgtagcggtttgggagattagagtgttttcatcggaaatatgggtttccggtgaatggattggtttgatgatcggtgaatttccggcgacggaaggtggaccaagaaggatcgtagtggaagaagccattgaaacagaggaaaatgcgatggtgatgctctcaaaggttttgactttgaagctttagagagagatttttgcttcgaatcatgtaggagacgtggcatatttctaacgacgtggccatgtgtctttatttaactagtgtgggccaatggccatttcaccttattaaattagttaactaaaaaataccgtaaattgtaagttttctttctattgatatctttgttaaattactctttttctatgttttatttatgtaattttatccatttttatttttattttaaggtagtattcgcatatttatgaccatcaaaaaaaattattaaaagaatttattattatttttatttttattttttttgacagtaaatttatattttattccaacaaaattttttttatataaattaatttttatctttataatttcaatcattgtagtgaagatgtttttttaccacagttttgatattccgaaatacaaggttgattaggaatattggcatcaattgtatccataacatgtaacatatacacgcacatattacagcttaggtcgcaatacgctgcatcacattgacagttgatcctgcattcttcgtttgtcgcacagacatctccaaccgcaagattgtgtccttaaaataaaaaaaaaacatttaaaaaaatttgtaaaaaaaaaaattgagactaaaattttaagaacaaactacaattgatattaaatgtatactttcatttaattttagtctttttaggttcaattcatttgtaaaatgctttttattaacaaagattattttcaactttcaactattggtaaagagatatgtaaaattctagtggtttgtttgaaaatgttattgttggtaatgtatgtatacttacggaagacgacgacaagaagagatcacataataggagaagcttaaatgaaatgttatgcattttcgaagtaattgttattttgctttagatggtgaagttaagtattattgcatttcatctctttcttatagtccattccatctctttttaaaaagtaacgtttgtatcaagatttgacttaccaaatcttaccaaaacaaatcgttttatcaagatttgacttgccatttacaggtcgaaatattatctgtgtatttaaagatttgagtttgacttacaaattttttactattaatatcatggaaatctagtgaaagttaattaatattggaattagattaagaaatctaatataaattctactacacattttatgtttcagtcatcatctttctttcaataaatttattgcacatttcaagttttcatgacatgacgttgaaactaattttgtcaaatcaacataaaattcagtatttatgtgttaacgtgtaaaattgaaaatttatataataattattaagtattgttaaaagaaatatataaatattatatatatagttttttttagcgaatacttgatttcattctttcaaataaaatccaagtacaaagaaaagatttaaatatcccaaagtttgaaacattacaaagaatggcattctcaatgccatcagaaaattatattttatatgttgtaatttgtaagaatataagatatttaagtactagttcgggtacttaaactataagaaagattttaagtttgtccaaaataaaaataaaaaataagtttgtccaaaaaaaactataaaaaagatgatgatcatgatattgcctataagaaagtagtcctactttatttagttatgaatttataaaacaattttaaaaaatctaatgttttttctattagttataacatttgtaaataatttaaaaatctaatattattaaattagtgatttaaaattattttttagcacggttcaaaagttatagcagcggttcaagagtgtatggtcgctttagtagaaatatatcaatatggcgggaagaaactcatctaagaacttcctttgaaaaactgcagatgtagtggcctaagagcacccccattggaacaccttaattaaggattccttagaattttttattattaaattgtgagtaaatgaaagtttagagtttttgttgaattattgtattttttgttgtttaatggtggaatccttaagagggtttcttaaaaaaaatatatatatatatattatattattgtgtaaggagaatcacatttcaaaatcagacataactaatcaaaaccaaacatcaaacgatcacattcaaaagcaaatacagaagcataagaagaaacatacttcaagagtcaactcatcacgctccacatgtatcttcactggttctgtcataaacttggatgtcatctccaaaatctcgtgagaaagagttgcagaaaccaagcaaaaagaaaaaaaatagaaaaaaaatattggtgtttgagttttgattgcttgaaaagaaagataaaagagataaagtacacaagtttgatacattcttcataaacacattttgagaagctaactcaaagctaacaaagttaaactgaaagccatatactgattctgttttgccattcacaaaattcaaagccaaagttaaactcaaagtcgtattcattcattgagagcattgagagcaaagcgtgaagcttcctgagaacattgaccttgtccctgaggtaataaagtttggctcttcttactttcttcttgttcaccaccttaatcttcctaaggtttggagaatacttgtcaccaaacaccaccagttacatcagtattttcaatgaccaaggcaaaaaaaaacatacaaaacatggtggctcttgagctataataatgctacgagattctaacaagggaacagttgtaacttacactagaatcttttcctccatcgaaactaaaggcgacctcttcaaccataatgtaatgtttgtcaacatacacaaacaaggaacatggcaagcaactatacaaaagttattggattagaatgacaacaactataactgattatatctttccaatccaatcgatgaaacaatgccaaaacatcataaaactcttgcatttaaaaagtatatcattagagaaacactaaaagctacgatcattatagatcaatcatcttctcaaatcatactagtaactttatttgagatcaatgatcttctcaaattcctttccactaattccagaaaaatatctatcaacgtttaaatttcaataacaacatctgactttcaaagttcaatcacatcaacagaatttaaatctccagaaacaaatcaaacaaccacacaccaaacagatagcatcataccttcagaaaacgatttggttcatcaaagtctctgatttagttcatcgaagtcgcagatgttgagcaccgtcggaaaggggacgagtttcttcggtgatgtctaattaaacggttagattcatacctttagaaagcgattggaccatggcttcacaccaatctctgatttggttcacagtactttccgatttgcttcaccaaactcgttcaagttgaccaccggcggttgaaaggttgaggacggtggatgataaacgaattccatcaatataatggaatgatttgatgaacaaaaatgcgtgagttgatgaacgtcacagagctcaatcgccatcgcaacataaaagagaagagagagatcgagaaataagaagaaacacgggcgcaggaaataaaaattgtaatgtcaaaacagacatccaataataaatggccacatcatcgaactttaacaccaagaaaaactctaagcttaggttcgcacctaaccttatatcttatttttcatttaatttttgcctaattttgttaaggatttttgctaagaaatcatcaaggtcccccactggacctgctctaatgcagcatgatcaacacatcgctagagatattagcatgatccaaatgctatgatttgactcggatgagtcataggtcgatcatgttcgaacctattatgtatttaattgatttttatatattttctaacatcagtttctcttctctagagttggatttagctccaaactttcctcttgatattttggattgccactgtagtgaagaattctttacatctatcttttatctttatgtttacgtacgtctttttatttgttcttcatcatttttagtagctagtctttttattggatcatggttaatgttagattaggatgatttgatggttagatgatgatgatttttatgttattaatgctagttttgacatgattacctaaaatctagaatttaagcaattcatggtagaaaagtgttatatttatgaatttgaagtactttaacgacaattgaggattgtaactccgcagttttaggaatatgatagtgcatacagagaggtttaaaagaattgatttgaccacctattttcaccaaagtaaacttatcttttcgctcaaatgtcatgagagaactccacagttaagcgtttttaagttggaataatttcaggatgagtgaccttccggaaagtgattgtcagaactatacgagtgaggacaaagcatggaaaaagatcaagtggtgatttgtaggatcggtaaacaagtctttacagcctcacagacgtagtggaccgaccgtcgggcaaggatgagcccacatgaccaaatgaggacatggggctcactggtagggacggtcggggcattacaagtggtattagagctgaacccaaacgagtgtggagtcaagaagactcacaccgtcgggagtgacggtcttggtgtgcaacaagaacattgcgatctgttagcggggatgaatcgtaaaaccccggtttcagaaatatggtggtgcatgcagagaggtttatagaattgatttagtcacctctgtcaccaaagtgtgcttatttttttgattaaacgttttgagaaaactccacaattaaacgtgcttgggatgaaataatatcaggatgggtgatattccggaaagtgagaacaaaacctgaagaaagatcatgtgagtatttgtaagatcgttaaacaagtctttaaaacctcccagaagtagcggaccgaccatcggacaggatggatccacgggtccgaaagaggacgtggggcccactggtaggaacggtcatggggttacaaggattaggatgtttagtgaactaattaggattaggatgtttagtgaactaactggaattgttattaatacacattaattatctaatgatttgaaccgaagttatgacaattatgttgttactgaataaagtgattagtgtgtcacggaagtggaatagccatatctgtaagtttcatgcatgttccaggatggtgcttaattcaaccgtttgcatcattgtttgattgttaagaaacatcttgtgttcccttcaacaacctcttttccatttctccccgagcacttgtttatgaacttaaaacatgttcgattaaattttcaaaagttgtaagtttatgaaattcaaatcaaattttaaactactaacaaacaaatcattatacgtctcttcaagtgtaagcctacaaaaaaataatacatgtacattaagtgaaaagtataagagagctcgatcatctcgtgaaatggcaggagtcatagtctccacgaatttggatttatcatagacaaaaaaattgaggataaattttgtcccgcctgatgcaggatgctgacttgaaccgttcatgggtgtcaagttatttatactcacattgttccatgttcacctccatatcaacacctctatacttattatcattgatatgctctcctttctcaacattgaagcatcattctcattattaatatcacatcactgttcttataacacacttaagcatgtcattggttgagatttagtcaaatcttcctcccgtttattcttctatcttttatcatatccaggaacatgttttctagtgatatactatgggcatagcctttctacaaataattagagaagctatactaagaagattaaaactggaaagaaaaaacaattatgtaaacaaatcttttatttaaaaatcttaaaaaatattagaatataaagtaggaattgttaacacttccaattcccaattttcaaatgcagtattttatcatcatattattttgaatcaaactctcgattaagtcataatgtgtatcacctaagaaacaaacagtaatatgtatcacctagctagttcatcattgaccaaatctagccgggacttactctacttttatccatgaccaaatctagttgtattcctttttatttcaaagaaaatctagttgtatttcttattattctacaaaaaattgaaagaagaaaaataaaagttttgagtggtaaatgatggtaagacatataccattttagtagttgtcaacagtaataaaaaattagtagtattaaaagcagtactgtcatttgtttctattgttacctcttttaaaaatattttgatattgtctatcgttttttctaccagataaaaactcttattgctttgtatccgatcaataagacttgaaatgtgaaatatgtataattcactacaaggattagtaactgcaaatgttatattttattgatcatcatgatctgaaacatatcagatcatataatctacatatcaacggatgctctcatataatctcactattttcaattatgtattctcgaaaaacaattaagaccaccagtcggtcgatttcattccaaaccatagattcatgctcgaatcatgatcataagattattgcatataatttattttcatacatactaattatttcttatactttgttactttcgttagaaataatcatgaattatatctcgctcatttcttcttgcccttgttaggtttctctccttcctcaaggagctcctccaaaacactatcatccaagtactcaaattcaaaaacttgcctagaagaagaagaagcggaggcggaggcggaggaagatccagccatggcggtggaagaagagacaccactccccatgttatactcatgagggaagttaaggattgctgcttggcctctcatggagtaagcagcttggtcataggctctagccgcttcctctgccgtatcgaacgttccaagccacacacgttcaccgtgcttcctcgaatctcgtatctctgctgcatattttccccaaggtcgtctccgaactccccggtactttccatgctcggcaccgacacctcgacctccttgatccatatattaatgactttttgcgtgtttgtatgtgtttgtgtataggcgtgagaatgttggacaatgaacaaggattgttcttgcgtttcgtgttatctcgtagacgtgtttgtgtgtttttctgttacatgtgtttgacgggctttgtttgggaaatttataggcagggaaacaaatgtgggtcctaattagaaacctaatattggccctcgacacctctatataatgaaagaatataagtatataataactccattgagatcttaaatttttcttactcagttgaaaattcatcttttagattctgtttaaattcaaagaaatgctatgcttctggattcgtggtcatgtttacaggtaaccacatttaatttggtttattttgtatgtaattatttatatatatatatatatatatatatacaaattatttacaaccatatgtatatctttcggactcttcccgggacaggttggagaaaataacataagctcaggtcggaatcgctgaaaactcatagacaacaagatatacaaacgttatatttcgctcttagatttggtggccaaatgaacgaacactaaataaatccctataattcatatttttaggatttgttagcaaactcaattgggaaatttagtttttaagtctaaaatccgaacataaatggaaaccaaacttctattttgaaaccaccgatttggaaaagctgaatccaaaccaatttacgaatatcgttttggttcggggttgttgctcaagacctacatatagggttgggcagaaaaacctgatccgatatccaatctgatacccgaaccgtaaaaatcgggttggggcggattagggttttaggtagaaaattatttcattggatacagtttcagtaaacccgtgggtattgagtcggtccgtaataacccgttacccaaataggacccgaaaacccgaacataaatttagatccaaaatatttattattattaatcttactataatctaattgtctaagattatacttataaatctaaatatgtaaattagttttagacctaaatatccaaaacaactaaaaatatttaaaaattatttgttattgtttatcaaaagtttagaaaatatattcaaatataattaaattatttaaaatttacaaatttttaaagtttttttttttgggtatccgttatttgcatacaaaatacccgtttctatttttttggtatttctagggcctgaaattttgtatccaaaccgatccgaacccgactagaccagacccgaattgagaccaaataattagaaatactctattaaataataaattcaatacccattaaagctgaatccaaactggttttattctaacccaaatggattacccatatgtcgaaccctacatatgtacattaattgaaatgatggtgataaattcttttcttatttctgcacacatcttaaaacataatttaataaatctttattttattttataatgtaagaaatcttaacatcgtattttctggatttcttaccaaacatttacgtctcaaatgaataagaggaaaactataggtcgtggtgggctcacatacaagcaaggcaatgttggagaatatctttgactttgattatgcgcacgtgtattgactaatcaaaaggttgattttcatatttctttcccttggaccagaataattattttcttgtaaatgtgtttcgtaaattgaactttttaaactttagttgtggaaacaggtgaaacactaaaacacatcattaaaggtaaaaacaaacactataacaccataacgtgtaagaggcatattactcgtaccttagcaaaaagtttttttgccttttattggctgcttcggcgtccgagtcgtggatcgggatgtcttgtccgtacatatgcaacatgtttctttccttttgtttggtcgaaataagaaaacaaatctttgagttcctttccttttcattacaatacaatgattataagtgtttgtttgtaatcgaaaactttcatgccaaaaccaaaataatctcaaagatttaaatttaaaagataccaattcttacaaaaattttggtttcaagttaaacccaagtagtgttcgtctactagttgaaaatttattataacagaggataaattattatgatttcgaaattctgattatgatagtaaaatcagtaatgcccacctaaatacgtgagtatacgatattaatgtaaattttattgatgatatttaaattttaaatagtttagtcatccacacattattttggaattaatttagtaatttttgttttaaattaaataatttttgttaataaacatcaaaatggcaaaaactttttctctatttactgcttgataccatcttagtataaaaatgtaagatcgatagatctgacatgtatcacaataatgtgagttactaactgtgaaaaaatactttatataataagattaagaaatcatatgctataactaatttgggagactgcttcatatattcaaaaaccaatgcaatggaatggttacgtaatattttgattgatttgaccaattaaatgattaatgtaactgattatattaattaattttaatatgaaatattttatttttccagaaaaaatattggaataagtattaatttgcatattcatattttatttaatttaagtatttatttattagatcatataatacatacaaacaaaagaaacatataattctttatattttgttaaacgtaataaaaaatgtcatatgtaaggaattatttatatttacagtaatatgatccaaaatagttagtaataaaaaataaaataaaaagttagtttgattatcaacatgagtggtggcagagctgaataacaattgtggtgatatccctttattattaaaagggaagtacaaattgaaattttgtctaatttggcctcaattttgatttcaattttggattttgttctttgctattcaaaatcattaatggtaatttggtcttaacaatctcctaaactttatatgatccgattcaatctaaaccgttcaataaaattaattcccttcaatctaaaccgttcaacgaaaataaggaatctatgttgtttttgaaatcaaaatatgatcacattccatccctaaaaacactatattcaatcacgaaatcaataatcaataatatccaaatcatatattacgattcttcactaatcattagaaatttatatttataagtttaggatatcaaatttattcaaatatttagtataagaaccaaataaaccgattgctcgcggtttagttaaatcctagtgtaaacatatttacaatgtcagaggatctaataatatttattgaactaacataaaggtaatactagtagtcgtactttagaattattttgatcatataatgaaatgacagaatgccgtttctcatgcatcataaggggagatgaatctacaaaaccaaaagaaaataataaaactcatattaaaacattcatttgtatggaaatgaaaaataaaaccattatgtggatgagagtgaatatgaatcagaatctcttttgatgagtgtgtgtgtgagagtgagtatgagtgctatcttgagattggggtcaccaaaacatacactgcaactcttatagcagtcttcattcacgaaccgaaacaaatataataacaaacagaatttgcaaatgtatagccgtcttgggtcccgcataggtcgactggtgattttatgaaattaaaatcatatctaaccctttaaatacgtggttgccgcctaaacactttagaaatttctacgttcacttttttcattattgaaaaactattaaaacgtaagttaaatggtaaaagatttcacgtgttctaaaagagttcttttatgtaaagcatcaaatttgtacatttatatatttctaccaccaaaaacatttattttcaatggtccgataagccgtctagcttaatttacactaattatattgtaaaatcagtttcttttcaccatttaaaacatctacaatctgaaaagaaacgataatagttataattgtagaaaaaacacaaaatacacaattgttcaaactaattaaaaataatttgtaaacgtaataacaattagtgtcatatttggatttatgcgattctaagaactctttttgtgcacccaatttttttttgttattctctttcactgtaaaaaaaaaacttctcttaactctatagaaccaaacctaagagtttacaaaaagaagacatagcaactaaaaatttggtagctcccaggcacgacactcgatgcaggccgttagaagaaaagaattttcaaaaaaccggatcttacctaccattacatcctaaaaacagtaagaactaacgatttttacccaataatggtacgaaccaacggtccgacgcctctctccggtgactttccttccttttcaccggccaaatcctccctgaagagctgctctgtaaccacacttcttccttccggtagtctctctactccctctctgtaacttgctttgtaacccttttcaaatttggtaaacctgtgtaaccctttgaaactttaaccaaagactggaaaccctaacctgcaacccaaccccttaaccccttactactgttgcaccatgagtacacgaatccccaaccacctcaaaggcaaagaggttgatagaggctgctctccaccaacccgtcgcagaatccgagcaccagagttagacacctctgctcttatagccgccaactctcttaccctgatgggtcgtttaacgaatccggcggttcaaagactctggtcactattccctttcatgaccaaccgttaggatctaaaaggcaatgctatagggtcagatcttggtagagactgctttcaattctgctttgatttggaggaagacctgcaaaaagttcttgacaacagaccttaccactacgaccattggatgatcatcctgcaaagatgggaaccaacaatctctgacaccttcccctcaaagatccctttttggatagatgtccaaggtctaccaaaacactactggcaaccggagatgctcaaagcaattggaaaagatattggagaatttttgagcatggagatctccaacacctcagcaaagatccggattttgattgatggtctgcaacctttggtctttgatactatggtagatttccctgatggtagtgaagccctcataattctggactacaaaaaccttaagagtttctgctcacactgcaaaagattgactcatgagaagaggttctgcccaggcctttcaggagaaagcgaggccatatcgcactcaaaaccctcagagccgctttcagcaccccaggaggtttctagaaactactatactccgaaggataattttgctgcacctagagataaaaacatcagaccctccaattctgcagtttccagagaagctagcagtattcatgagagggagatcaatacctggaaggaaagacataaccctcaaaaccctgcccaggatcccctagagaggagatatcatagtggtgaatcaagatctagacgttttcactcgacctctgatagatttgatgcttctcggagaactcctaccaaaagatactctgctagatcccaagattttaacaaagatacagcaagaagaagttaccctcgtagagagaactctaataagagctactatcaatggcaggaaaaatccaaaaccagcgtttcacctagacactatggttctgactcctcaaaatctaggagaccacccctagaaagaactttctcccctgctgaagttactcctccacctcctccacctattcccaccaatgaagagattatgggagatcttagagatgtcacactccaatacatcagttgcgctgatccaactgagagtgctgcaagaaagcgcagagttatccaaggagaagagagaggattaatggcagaaacagcgtcacatatgttggaggcagctatcagtacctcccatgcctttctggcgatcgagtcaggatcccaagcagctctagatgctgcacctcccaagtttgatcccccttcaactagtttgatccctacaaaaaagaaaagaggtcgtccccctattattaaacctcaaagcaaagcccctgtcccactcttgggagcaaaatccagtaaacgcaacaaaagcctgatccagaattctcccaaaagaaagaatacaccagagagatctaccacccaaaagcagcctggaactgagcgtggcagaaagtctaaagccaaacaacaactaattctccaatgtggtgaaccttctaaccccccaggacaagatgcaccaaggattaacctgattcctgcaaggtcgaaggcaaagatggattttcacaatccatcagctcagcttccttaaaagtgttgagctggaactgttgtggacttgggaaccccacaacaggccagcggctgcgtgagatgcactccaaaatctcaccagacctcctctttctaatggagaccaaaaatccagatgctgctactctcaaatctctcagctggatgaactacccttcccactgcttagttccccctcatttcccagggggtggaggtcttgcccttttatggaagcaaaacctagaagtcacaatcctgtcaactagtcagaacttcatagactccaaaataaaggcagaaggaaaatctttctttgcaacctttctttatggagagcctgatagaacaaaaagaaaggaaatctggaatcaacttaccgccttggggactagcagagaaggtgcctggtaccttacaggagacttcaatgacatcatagactcttctgaaaagcaaggtggtccagagagacatgaaggaatctttgtagacatccggtcctttatggcagagtgcgatctctttgaccttcgccactctggtaacttcttttcatggagaggcaagagacatgaccatattgtccattgtcgggtagatagagccatgtctaatggagtgtgggcagaatcttaccctgccagtcggtgtgtgtacttgcggtttgagggctcagatcatcgtctccttctcacgcactttgatctcacaaagaagaagaagaaaggggtcttcagatatgaccgtcgattgaaaactaatgaagagatctctaatctcattcttgaagcctggaatctcaatgatgaagaagatgttaaggcgaagctggatagatgccggacagagatcatcagctggacaagaaataagcatcaaaacagtcaaaaagtgattgaagcaaataggcaaagattagaggaagctatgtcaagtcaggactctaatcaggatctaatttctgatatcaacattcaactcatccgggcttatcaggatgaagaggaatattggaaacaaagaagtcgacacttatggcttgctctaggggataaaaatactggatatttccatgcaattacgagaggacgaacaaccattaataagttctcagtaatagagaatgaggaaggtgtacctgtttttgaagaagaaggcatcctcagcgtcatcactgaatacttctctaacctcttctcgtcccaagttggtgacaaggcaaacacaatcaaagaagcaatccatccttgcataaccccggataccaacactgttttaaccaaaatgcctacagaggatgagataaaggcccttgtttctccattcatgctgacaaagcgccaggtcctgatggcttttcagccagtttctttcaatcaaactggagtactgtaggccccagtatcgttattgaagtccaatccttcttctcctccgggatcctgcaagtcaacattaatcaaacacatgtccgcctcatccccaagatccaaagtccccagcgaatggttgactatagacctatagctctctgtactgttttctacaagataatctccaagctcctggccaaaaggcttcaacctgtgctgcaagatattatttctgaaaaccagtcagcttttgtaccaaaaagagctataaatgataatgttctgataactcatgaagttcttcattatctaaaggtctcaaatgctaaacagagatgcagtatggcagttaaaaccgacatgagtaaggcatatgatcgcctagagtgggattttattcaactagtcctacaagctatgggatttcatccaaagtggatcaattggattatgcagtgtattactacagtttcatactccttcctactaaatggagctgctcaaggatcagtgactccacaaagaggtatccggcagggggatcctctatctccctatctttttatcatatgcagtgaagttctctctggactatgtcttaaagctcaacaagatggcagcctacctggtatccgtgtgtcaaaaggcagccccatgataaattacctcttattcgcagacgacacaatgtttttctgtagatcagatgctaaaagctgcaaagccttgatgaccatcctgcagaaatatgaagctgcgtcggggcagatgatcaataagaccaagtctgctatcacattctcctccaaaacttcagaagcttctaaagcagagcacaagcaatcctgggaatccaaaaaacaggtggattaggcaaatatttgggacttcctgaaatgtttggaagaagaaaacgagaccttttcaatcaaattgtagacagaattagacagagatcacttagctggtcctctcgcttcctgtccacagctggtaaaaccaccatgttaaaggctgttttggcatccatgccaacctataccatgtcctgctttaagctcccagtgtctctatacaaaagaattcaatctgctctcactcgtttctggtgggactcttctgccggccaaaagaagatgtgttggattgcatggtcaaaaatgactaaatcaaaacaagatggagggctagggtttaaagatatttcaaacttcaatgatgccttacttgctaaggtgagctggcggatcctcaagaatccatcttgcctgttggctaagactctcctgggtaaatactgcagaacctcctccttccttgattgcccgacgcgaaactcagcttcccatggctggaagggcatctgcttaggcagagacctcatcaagtcccaactaggaagatcgattggttctggagctgatactctgatttggaatgcaccttggatctccctctctgcatccgtcaccccaatgggacctcctactcacgagacacaattcatgactgttaaggatctaatctgtcctatttccaagacttggaatagagaaaagattacaacttaccttccccactaccaatccgagatctttcagctcagaccgagtcgtttcggtgctagaggtaaatttatctggatccccacgaaatctggggaatatagcaccaggacgggctactacgcagctgaggctttgcagaggcttcacagagatgctccacctcaacctgtgactttcaattggaactcagagatttggaaaaagaaatgctccccgaaaattaagtttctcctatggaaagctttgaagaatgctttacctttaggtgccaacttgaaagctcgaggcatcaaccctacagctgcttgcccatactgcagtgcagaggaatcaggtcttcatctgttcttcctttgtccttttgctgcacagatctgggagcaagcccctttcaaaaataccctttcgaccttcacctttaccaatcttcagaggggctttgaggcggctaaacatctgatctgcttaccaccggtaggcttaggtccatttcctctgttcccttggcttatttggtcaatctggacctgtagaaacaaaaaggtctttgaacagaaacacctatcgagccgagatgtcatatctcaagcaatcgtggctgcaaaagagtggttcttggctcagcctttacctcagggaattcagactctgcctcccagcccttttgagccggttgttgaatcggatgcaatcttgtgtttcacagatgcagcttggcgagaggactcacttgaagcgggattgggatggatctttgtggataattcaaatcattctgagatccaggatcatgcagtggcaagggaggtttcttcccccttaatggcggaggcgatcgctcttttctcggctatccaacaggcgtcaaatcgcggattcaaaaaacttgttgtagcttctgactcgcagcagcttgtcgaagcaatcttgagggagcttcatccaaaggagctccaagggattctacatgacatcctttttatctctctcaatttcgttgctattagctttcaatttgtcaagagagaaaacaattgtaaggcagatgcagttgctaaagctgccttactcgcaatcaattctgtaccggtttaaagttaatgtaaaccaggattttcgaaaaaaaaaaaaaaaaaaaaaaactctatagaacctctttctattaaaatttcaaggtaccgaacttatttttgcaaaacaaacaactttcataattacataaagagaataccaactaatattttttatagtttatatcttattaaacttttaaatatctttgagggtattttacatttgtgttttttcaccaaatcatgtaagaattcgttttcaacaatatcctcccaaatcttctaaaagcgagacacacaatatcaacatctgtgctaaatcatgtttcatccattgttgctagtttgctatagactagctttgtgcaactaaaaatggtctttcctcctttacttgaaatcaagcaatttgccattttataagtgatggtcaatatattgtagaatttgacatgttgcacacgctcaaaatgcagtttctgcttcctccaaggatcagttgcacactacgctacatcctcctttgtattactttccaagccactatgtagtatacttggaaagaacggactgacatcactcatcaaaatacacaacactcaatcaatcagctcactaggtcaatgacaaaacaatttggaattgaattactactggaaaacacctcaaacttcaagtgattcttcagctatggttttgagtacacttacggctacttgtgctcttttttttttctcttttacctttgttttgcttcgtagtctctttggaagtatttttttttagattctttttttctatattctcctctctcttttttgcacccatgtaaatattccattaagtaaccctaattataacactcgaacaaaataaaataacaatacgtcctatactttttcacatttgtaaatccttatacggaatttacaaccggtctctttttgaatgagatttcaatgaccatttcaggtttatctcaattacagatatttttataataaatggatagccaatctccttttttgtatgatattacgttgattaaaagatgataaatcttttccaccgaaattaaaaaaaaaaaaaaaaaagaatcaaaattcaccgagtttgttaaacaaggaagttttggaccttacacattcgatacagattcttgaacgcttacatttttggttaatggctatgaatagaaaaaatatctcggcccatataactcagatggatctgcgaattacaaaaacctaaggaaaagcctttagcattgttcattagcaattaattcgagctaacatgcatgataaatgtcgtcattgaaattttatttcaagatttttgatttgaagatatctaacttgttcttgtttaaaattgataggaaaatattacgtacctatgtttcataatttcattcaagtgtcatttggaatttacacatagtaaatatatttttttttttttttgattatactattgatgactacatcaatacatattttattcaatttaataaattgaaataatatgtaaaaatatacattaaaaatgcaaagcaatactttttgtaataaaaaaaaacaatcttacaatgcgttattataaaaatttaaaacaaaagaaaaatcatgagtaatcaaatcgtactttctacgcacgtgataacacatgtgctagttgaccggcttagggttttaatctttttaatctcactaatcagtaatcactgattaccttcctttaattacaattttattttataagattaatgtaactacttaactagatatcctcaaataaagagtatatatctctcgtgtgtggtatgtgactgtgtgtatatgatcggatgtactcacgtgacacaccagtgatcacgttctagttgctactaattccattcatttgcgtataaaataaacgtcaaaccaaacgcaagtcgtggaatgatgataccataagtcccaagtcaaagtcaattgggattaaagtcaaaagaagatttagtttgactttatcaaccatttgttacgcgtggttcctaatagataacgttgtaatttcttataaagcaaaaacataagcacataatattaatacatgtaggattatgcaatttctaacaataaagagatcaaattgtctaaatatgacacatatcatataggattatacagttttctaacaataaagatatcaaattgtctaaatatgacacatatcatatgatttatcaatgagactcgaattgaaataactcttgaagtacattcactatgctactataaatatagaatacttttttttgttcaaataaatatagaatatttactaattcatatttcagaagttgtaatgtggcaatcatcatgtatattatattatggtagggaattatcaagtgaattttcttcttcttctaattaattaatgtgtaaagtatggtaatatataatggcttttcatgacgttattggaaaatactttgacaaatttttcgtcataaaaattattagcggtgaaaaaatcacacaccaatatttttttttgctaaagaaatcacacaccaactatacaaaatgaattcacgtagcttcgaacacttttattttattttcttaccagattaaaaaaagaaacactattatctatattatttgaaatgtagacaaataaaattataaatatgtcatgactcatgaacaaaccagtgatacaagggcaacaatagtgaaatgaaccaagtttatgataaacagatttagtcctctccatgtggattgtagcatttgcaatgagcatgagcatgagttgtaattgatgaaatttgtgcagttctctggattgtagcatttgcaatgagcatgagcatgagttgtaatcaatagtacaaaaaagacacatgtagctatgcctatataataacacgtacatataatttgtttaccaacaaatgtttgatggaatatttgtatacatcattatataatatttatctattatagtttttaatacgtatggaaggtacacaattttatttattcatctctatttaagggggaaaaaacatattcccgttgcctaagtaatttgcatgcaattttaaatcctttgctagccagcctaagccgatcccgaggaaaggggctaggtttaacagttttggtagttgttcacaaataagagaaagtgagaaacaatgatatattacgactctccttgtcaccttgactagtgtgaaacgaacgaaacaaagattccgttgccaaattattatataagcaaaagtttaaaactattcttttcatttcattttaaaggtaggcgtaggccatcaattttttatttattattattgtcttatgtgaaaaagatactaattattgaataatataattacacaatcgtcaacatacacacacgaatacacgatagactacggaagcagtgtcggtccatattctatttcattctttcttttgctttttgtggtgaatgtaatagaaaatatggtgaaaaatcaaaaaggaaacgaaaattggaatcgtgtgtaagatttgacttttcttcgggatttttccaaaaggaactaggcaattttatggtcttccattttataccccaccatgaaagttacttgaatgttttcttatcggcatcattgcagtaattacgaaaacaaaagaaaatagttttcatatatatttttcttaaaagttatagtatccgatgtttagatttttgttttattttccaatacgcttatgatatataaaaatactattgatgtagcagttaatttaaaatgatttttcttatgttggttgtaataaaaattgaattttcatataaaaaacatcataactattcgtttttttattttttttttattttttaacactcttcgtttgttggtgtaagagtatacttttttcttgtcaagatgaattgagcaagatatcaaaaatttattaaagacaattgaaatcaacaaaagttataccaaaatgatatttatcttgcagctcaattattagtaatttttacatgcagtgtatgttgtatatttacttagttttggtgtatacatattcaaaaatttacattcaaattctaatatagttattgtactaatacaaagcaatagactacacataatatcatcaaaacttggttcttcggctaggtacgtatacataaattaccgaaacaaatgtcagttgcggaggctcaagggcttctacatggacaatggactgtattcaaacattggatttcaagaatatcatctttgaagtagattgagttgtgttggttacatcaaggtttggatcgagttacgatatcattcaactctaaaattttaagtagatgtatcactatttgatggttttgagtgtgtaccaaataagccgtctcaaaaattcggtgaacaatgttgacttttaaaaaatgccatctcatttacttaactaagcatcaatatgaaaatatagtttgcatgtataaatgtattatagtataagctattatgtgaatacaaaggtatggtggaatgcatgtgcgcctttactttttattttttcccttcttttattgaatttgtaattagcaatgattaatctatgttgactagaaatggacgtgttataaaagtcctactaaactttttattttaaaacgtttccaatcattagtctatgcctcaaataaaattgtaaaatcctaattttaacctcttcaatcatcttcatctctttaagcttttattcgtcgtacctatatatcatattagctatagactagaaacgatataatcgaattggatacttacttattttgttgttaagatgaattggatgtttttttttatactgtttctgatgaattggatgattaaccagtctcacgttgtcataaataaaacaaaactaaccggccactctcatcatttaagttattttataatataaaatatatatttttacaaaaaaattcttaaatagtatgggtgacaattaatagttaacaaagaaaaacaattaatagttcttaaattttggatgacaaaaaaagaatggtaacatataaccctaacgtattttcaaagttgcgtttttggtgaagcttatactgtatacagtactagaaaaacaatttgaaatgatcaatatttaaaagaagaaaaaaaatgtgtacgtgagatttatctgaaacttgaaagattctataatcggtaacctcattactacaagaaagtctacaactaattattaaattgcaaccgacaatcatatagtgttagatcataaatcatattcataaacaaatatatcgattttaataattgctaaatggtatgttttagtgacaaaatttatatcatcattacatcgcattaattaaaatttcaaatttatatctacttagacgaaatttcactatcagaaaatatcaaatcaaaatgaataacaagaatcaaaagcaacatcactccaaacccaaaaggtacgtagataaaattatataatcataacaatcaatgcaaacaattttatatataaaaaaatcctagttaatgcgaatatatgtcaggttttttcttaaataaaaaaagttccccaccactagtacataaacaaacaaattttcaattttcccaccaatcaaatttaacttgtatattcaattctacttttaaatcttgatataaaagaattcttgtagtaaacgagtcacaccgatcaagaaaaatattaatataatcatataaagagcccaagaaatctcaccgaactttcattttactcaatccctctctcctctgtttttcttctataccaatcttctttcttcaagaactttcaaagtttactctttagttctccattagaggatgagattcttcttataagtcagataatggatctatcaaaccgtcgcaatcctctccgggatctgagctttcctcctcctccgccgccacctattttccaccgtgcgagctctacggggacgagttttccgatcttagccgtcgcggtgatcggaatcttagccacagcatttttacttgtaagctattatgtttttgttatcaaatgttgtctcaactggcaccgaatcgacattcttggtcgattctcgttatctcgaaggcgacgcaacgaccaagatcctttaatggtttactctccagagcttagaagccgcggtcttgatgaatccgtcattagagcaatcccaatctttaagttcaagaagagatacgaccaaaacgacggcgtttttacaggagaaggagaagaagaagaagagaagagatctcaagaatgctctgtttgtttgagtgagtttcaagatgaggagaagctgaggattatcccaaattgttctcatttgtttcatatcgactgtatcgatgtgtggcttcagaacaacgccaattgtcctttgtgtagaactagggtttcttgtgacacaagttttcctccggatcgggtttctgcgccgagcacttctcccgagaatctggtcatgttaagaggtgagaacgagtatgtggtcattgagctgggcagtagcatcggtagtgacagagatagtccaagacacggaaggttacttacgggacaagaaaggtcaaattcaggttatctactgaacgaaaacacccaaaattcgatcagtccatctccgaagaagcttgaccgcggagggcttccaagaaaattccgaaagcttcacaagatgacgagtatgggagacgaatgcatcgacataagaagaggtaaagacgaacagttcggtagtattcagcccattagaagatcaatctcaatggattcatcggcggatagacagctttacttggcggttcaagaggcgattcggaaaaaccgcgaagttctggtggttggagacggaggaggatgtagcagtagtagtggcaatgttagtaattccaaagtgaagagatctttcttctcttttgggagcagtagacgttctagaagttcctctaaattgccactttattttgaaccctaataagccgctttgcttatttgttttattttcttgttcctttctacatttgatttctattatttcattttcaaatatttttgagatggatttttaaaattatttggtcggtgaggtaggagagaatatagacgtgtttagatttagaagtcaaaaaagttgagttgtattatgtgtgacagagaaattatggacaagtttgaaaaacttaaaattatttcttttaaacataaaactcatggagggcttcacacttctacgtcaaaatctcctcctcatataatcaatgatatccaaattacaaagaaaccataatctccttgaaaacatctatctgatgttttttgttgtgttaaagcaaacatcatataaattcatcttgatttggatagaacattcaaatgccaaaacgaaaaataccatccatgatttttaaggatttaacaaacttggtaagtctctttgtactaaatcagactttactagtgttgttgaagtaatggactctgatccactaagacctattatggtatgttgtattgtatgacccattttttcaattatttttttcggcctaaaccagccttttacagaagcaaaaggaaaaactgaaacccgagacatctaaaccggattaaaccgaataccatgccatttctttttgatgagtcatcatcaccatcctttagatccagaaatcaaaattgcttactgcttcatttgttctgctgttcccggccaatgaagattctcgtcgccgttaaacgtgtcgtcgactacgccgtcaagatccgagtcaaacccgataaggtacacgcataacccatctctaaatctctctgtaaccattgaatcaccgttaaatttgattcctttatcgttgaatcagactggtgtagaaacccaaaatgtgaagatgtcaatgaatccattttgtgagatcgcgcttgaggaagcgcttcgaatcaaagaagctggttttgctaaagaggttattgcagtgagtattggaccttcacaatgtgtggatacacttcgtactggtttagctatgggtgctgatcgaggaatccatgttgagaccaattctatttttcttcctttgacgattgctaagatcttgaagagtttagctgatgttgagaatcctggattgattttcttagggaaacaggtatgtttggctctgatttgcttgtcaagttttgaactttggttgtgtatgcgtcaaatctctagatcttgttttagtgtactgaatcttagctaaagttgaggtttttcaggttttagaatgcaaaagattcgtgttttgactcgtgtgttgtggattgtttaggatgatgaacattgatctttgtaaattcttgaaaactgtcttaaaatgtcttgaataatgttgagtttgcataatgttttgatgaggtttgatgtgaaggttactgatttataacgttattttttttctgtaggcgatagatgatgattgcaatcaaacaggacagatggttgcagctttacttggttggccacaagcaacgtttgcatcgaaggtaacagagtagttccctcgactacaatcatatgttatcttttgtctctgctctccaagttgtgagtagttttttatgtgctctgctcattgttgtttagtaggttgtgttggataaagataagaatgttgcaaccgtggatagagaagtggatggaggtcttgagactcttaatgtagacttacccgctgtgataacgtaagttctagattcttagatgattgtgtcatgatctctctcgagttgaggtttatatatatgcatcaactaacctgcatatgtcaatttgttcactgcattctttgtggaactttttttgtgatcactcaaattattaagcaaactagcaattaagctttaatagaaaggtgcaacaactcttgttttgtttgtaacagctcttgatgttacaatgcagaactgatttgaggctgaaccaaccaagatatgcatcactccctaacataatgaaggcaaaatcaaagcctataaagaaaatgacggtgcaagatctgaaagtagacattaaatccgacatagagatcttggaagtcacggagcctccaaagaggaaatctggggttatggtttcttcggtggatgagttgatagataaacttaaaaatgaagctcatgttgtttgaaggaagaaacatttgtctttttcccattctgctacacacttctttcttcttatctacgttgctgtttcaggcatcaagtggaagtaaataaataaatcaagtgtggatcttgttattcagtaattcaatgtcttcactgtaaaaaattctttcttattaacaaaatagttgatgtcctctcgagcgagaagagagcagcaaaacacacatatctgtttttaactaagccatacaagtaatttcttcatatccggaacttagacaaatgcgattttccatcgaagatgcttgctaggtatcctacagtgtattctggtatagtgatgtctctgtactttgcagggttttcatcagaaagaagctcttttatcggtccataaacagtggaatttggaaacactcccgagctaacgaagcaagcaactgaaatccgcggtccatctctgtttgcccgtaccctatgctccatacttaagaacttatcgtttgtgatcagctgcaaaacaaaatgactcaagtgtattgataaagaaagactctgttttgagttaaaaggaagcatcaatcgagcttgcctgcatgaaatcaccgatactgatgacaagagctccaggaacaggagttacatcaacccaagaatcttgatgaagaacttgaagaccaccgatttgatcttgaagaagaattgttatgaaggaattgtcggtgtgtttacttatgcccaaagttaggtcaggttgtggacaaggtggataataatggcagagcataagcaaacccttgagacaatccatgttcttaagaatctcagagtctaaacctaaagcttctgagagaagttggaagagtaaacctcctaattccattacatgcttcgagtattcaatcacaacatccctaagataatatcatcgtttactcagaatcatcaaaacactaataaagcgaaatcaaaattgctaaacctgtttacctgcaagctagtgggatttcctctggctttagaggatcttgaggacaagtgtagcaagtgaaagagtctttccaattcataggagaagaataatgaatatcgaagttggtgttgtaagcaaatcttgtattgaaatctgtagcaaaatactgtttcttgacctctggatcttcctcatgaaatcttcgaacaccttgtttgatatctttaagaacagttaaaggaataccatgattgattacttggaaaaatccccaattctcagctgcttctttaatcttggaaacgaggacgtttcttgcagcagatgtgttaccatctccgaggtcaatgattgggacagtgaggtttaagccaaagatatcagaaggtttgttgttagataaagttgaagaagaagggatatggaagattcgaggaacttcggttattttggtatcgacaagtcctttcacacctgcttttgtcgatacaaaagccttgagttcgttcaaacgaacgagttctgcagatttttctgtcatgatgttttgtttttttctgtctacgtacgttgagagaggaagtaaagacagaagcgtagtcgtgaagataagaatttttgaagttagtggtggatctgtgtgacccattttgtagatattttgttcgttgactgtgacttgagtgaggtatcatcgaaagcgacttgtgcaaggaagaataagtttcaaacttcaaaggtagcaatcattttttgcaaccaatgccatctccttcgtgggctagggttcttctgtattgggcttgagccgtttttagattttccagtcttaaaatttcagtttttatttttgcccatgtattgttgggagttgggactatggccttttgtttgtataaccgaaagaacaaaatactgctacaaatatgaaaataaatacaatatttccatgcgtgattttgtattttatgtgataacattcttgctagccgatttggctagcttttggactaatgtcattgtctacttctgactcttacggctcaaaaactaagcttttgtagtttgaaaaagataacttatagtttgacttgttagctacaagcctagaatgctgttttaagcatgaagtagaaaacattttttcttattggtacaatggttgaggaactctatagcgggtacaaagaaaatgtagcgtaacatatgcaaaacgcacaaatatatattttgcactcggacaagtattttcttcatatcatgtaattagtcaaatacgacttttcatcaaaaatgctcgcaagaaatcctgcagtgtactctggtatggtgatatctttgtacttagcagggttttcatcagacaaaagatctttaatcggtccataaaccgtggaatttggagaaagactcgagctaaagaagcacgcaactgaaatccgcggtctatctttgttcggtcgtaccctatgctccacgctcaagaacttatcgttcgttatcagctgcaaaacaaaatgtctcaaattaattggtaaagaatctgtttttttagttaaaagaatgcatcaactggacttgcctgcatgaaatcaccaatgttgacaacaagagctccaggtacaggagggacatcgacccaataatcttcatgaagaacttgaagaccaccgatttggtcttgaagaagaagcgtgaggaaagagttgtcggtgtgtttacttatacctaaagttaggtcaggttgtgggcaaggtggatagtaatggcagagcataaacaaacccttaagacaatcaatcctcttaagtgtctcagagtctaaacctaaagcttctgagagaagttggaagagcacagctcctaattccattacatgcttcgtgtattcgatcaccgcactcctaaaatcatcatattaagaattaaaacactagaaaaggaaattgtttacttgaattaaaattgagataataaaatcgtggaatcatttgaactaagtaaatttatgttaaacaatcacataatgctaaaaagttttttttttggttatatatgaaaccaaattgtttagaaatagcataaacacaacaaatagtataatactattaatcactatatataacatgtacctgcaagctagtgggatttcctctggattcggaggatctggagcaatataacaagtgaaagagtctctccaattcaaaggagaagaatgatagagatcgaaatcattgttataaacaaatctcttgttgttatcggtaggaagatattggttcttgacaactggatcttgttcatgaaaccttcgaacactctctttgatctcttcaagaacagttaaaggaacatcatgattgatcacttggaaaaatccccaattctcagctgcgtctttgatcttcgaaatgacaacgtttcttgaagatgtgttacgatctccgaggtcgatgattgggacggtgaggtttaagccggagatatcagaaggtctgttgtttgataaaatagaagaagggacatgaaacatgctaggaacttcggttatttcggcatcgacgagtcctttcactcctgtcttcgtcgagataaaagtcgtgagatcgtttaaacgatcgattttttcagaattctctgtcatgtttttttctttttttctttctttcaagattctgttttttgttgttgttctgaagactcaagaagaagaggaagattcaatttaagacggaactaaagataagtgtcgaagtttgtggtgtctgtgattgagagcgacgtgttgtgttgtgcaaggaattcaaagtattaaaattgacttttaagatattccgacagaaacaaaaacagaattgataagagggagattcagtttaagacagaactaaagataagtgtccaagtttgtggtgtctgtgattgatagcgacgtgttgtgttgtgcaaggaattcaaagtatcaaaattgagtgttgtgcaaggaatttaaagtatttaaattgacttttaagagattccgacagaaacaaaaacagaattgaagactagaagattgaaaataaattaaaagaaaaagaaccttaaaaagaaaacaataaaagtggagatgcggggtatcgatccccgtgcctctcgcatgctaagcgagcgctctaccatctgagctacatccccatgaattgaacgagtagcaattatataatatctaacgcgttttgtaaagtatagtagatcaatttttcatgtatcttatattcttattcagtaccgcctttgccttgttggttgtaccaagtaaccaacatttgtatggatctttaaatacttaatgattaaaagatgtttaattattattattttgttatatagcttagtgctctaaaatgttcatgaaaaccaacttgaaaaatattatgatagctagtttgtattcaatttaatttgtgtttgtaaattatttttcattttctttactattaattttgttttatttaccattttattttacgggaccaaatccgactacctacgaatgttagtaaatccggttccgacaaaattacacatatataaactttttttttctgaaatatggttctcatatttaaaccaagattctcaagttaaaaatattgtcctaatatttaatccaagattcccaagctaaaaatatggttcttttgtcgaaagtaaaaaagtacatattcttctcggagaaatgaatcgatcgtgtaaaatatagtttctcgttgggagttaaaatttaataaatttgataatgtttttttttcttttttttgaaatgttaataaataaacctaaaccaatagaaccgcagtttttcctcctcgccgaaacgaagaagattctccttctctccgtcagacaaatctacgaacaagcgagcctgagcttaagaccaaactcatagagatgggtttcttctcttttcttggaagagttctcttcgcttctctctttatcctctccgcttggcaaatgtgaggcctttttcttttttctccattctcgatctgttctcgcgtctcttcgtgttccttgattgagatttcggattgttttccgatgcttaatagtgaattgcttcgtgctagatctaatctgggaattgagaagctttataggctctttttgatatctagggtttcgtgaaattggatatttatctgaatctatcacgatttgattttgagtacttgttatgtttcgatctagatttcttactgttattgatttgtattttgagcttgattttaggttttggtgatctggtcactttagattaatcaaagtttgaatatttatgtatcttgtgttatcaatcaatgtatgatgttgtttgatcatggttgaatctggcttgggcttattaccgcatttagggcacatataattgttctctcttatattcgtttatagatgtctttagctctgttgttcatatggttagacgttgaattggtttggttattccaatgtttagtggtctagagacaaagcatcatttactctaaatggaagatgatcgataaatgtaaaataagattgttctcgtactattcgttagtcgttactaggattttagtttgtttacttgatagctcaaaatattatcttcctcttttgactatattactaaattttaacaacgcttatttgggggaatttgaataggttcaatgatggtggtcctgcagctaaagaattggctccaaagcttgatttggttaaggcacatttatcttctagattaggagtaacattgcccaaaatagaggtaatgacctggttatgatgttcttgtctcttgttcgcactctttaaaagtgtctttttatgacttggagaatgaatttttataggtgagacaagtcgttgctactattattgccctgaaaggagtcggaggcttactctttgttatcggaaacaccttcggtgcttatcttctggttaggcttcttcttgttcaacttacaaataagggattcaaaaagcttgctatttgtatgatctcttaaaatcttaatcttttttgtttcaggcttcctacttggtggttttcggtcctattctctatgatttctacaactacggacctcaggaacgtcatttctctcttctgttgacagagttcttgcaggtttgtccagaaacttattatcaattatcgtaatcttaagaaacgcagctttgcacctttaaagtttcagccttgtaaagccaagagatcatactgtttatcacaatggacaatatctcgataaaaatctcatgccttttgttattgcagagcgttgcactctttggagcgttactcttctttatcggaatgaagaactcgacacccgccaagaagaatttgaagaagaggacacctaagccgaaagctgcctagtatcaatattagttttcttctggttttgccatgagcaagcaataccttgccttttccttttttcccgacaaaatctttccttagaacttttgttttctttctgttttaggattcttagattagctcatgatcttatactaatactgtgatttgatattggggatcttgaagttttggtttgttgaaactggaaccatgcagctacagaacaatgatttcatgaccttggaatccaaacagctaaaacagaagtttattcaaaaaatggcttcactaacgcctcataagaaccatgttaaagatcaagtctctctctcgttaaattttaaaagctcggctattccaattgagtagtgttgatgtcgaagctccacacatagattccatattccttccacttaaagacctccagatgggattacaaacatacgggaacagaactcggttggttccatgaaagcagtgaatcatcaggttttatgttcgtatttaaccaactcgacttctattcctttttgggctactagaattgtaagtttgaatagggttggaccaataatatgaacgaaaatccaccaatctgaactgaaacctacttctttaattaaacaaagtaaatttgggatcttttacaaaaaatatcgaaaataacctataacattgtaagtccatgcactgttatctctgttgttactagaaggcatggtcttgtttagttgttcatcggaatgttgtgaacatattggcaggtgaagaatattgcaatggagatattagatttctatgaaaaccatagactgttcacagaagagagagttcacgccgccttcaacaaacttgctacaaacccgtaaagtttcgaccaaggaatctttctcttcttgtctgtgtgatttgttcccctgagaaaatataatgttttgccagaagttttggaaatgagattactctgtttattgtacatcagttttgctcgtcttgcttcaaccatgtcttgcctatgcttatacacagtcaaagaggtgcaaaactaacaaaacgtcaaaaaaaaactgacaagatttgatggtgtaaactgtaaataaagcttacaaaacgaactgtgttaaatcacaaacgagaaagcaaaacatataatatccaaattttacacaaacacaaaatatccaaattttacaacaaacataaaatatccaaattttacaagtttcgtttctccattttgtaaaagagttctcaagcatgttccatgcatccacatcaaaaacaaacaacaatataagcattgtttctataatatagttctgagccgcacaacataacgatgcactgaaaaagcgagagctccaagactggaaacataatcgttaatacttgagaatctgtattcttcataagcaataccagatattcttcggaaaaacctgttgatcagcagatgactctgttgaagcagcgtctatatctcccaatataagagaatttggctcgcttcttggtctttcctgcatcttatttcaaagatgatcgatgttagaacaatgtataatagttgagactgtccacatgactttcacacgaatccaacaacaacagaaaaaaacaaagtgaacactatacaatttattttttacctgctactggtcacagttgataaattgaacatcgggaatgtgttggactttgtagtaatcttctccacctggtaccagtttctccttccactccctcttcattccttcaatcttcagttcctttaaggatgttatgtacttgagtccatctggaagttccttcaactttttgcaatcatctatagtcaaagtacgaagacatggcatcgacccttcttctactatccactcttccaactctgattctttagatatttctataacacataattgaggaaatccgccttttgagcacaccattctgctccctaggaatgccttacgtgctaaacgaaccgacttcaaatgaagcaacttttctagaattggcattggatcctcttccatgccgcaataaattagaaataagtgtacaaggtggggagggaattgatgttgatcaggaatctttgacatacgtactgccaatcccaactgttttagatgaataaaatgatccagaacaaactctcccatataatcaaccatatatgtttcgagcgaaaaaaggaaattaagcgtctcgaggtttcgcaattcgcggagagatgacgatagagtttcaaaattgcacctttcgctcaaagatacagcgagataccggagcttagtcatacggaggaggtctgtcacactactgtgttgcgttgagaaaccatacaagtactccaggttcactagatcacccaattccaacttggttttatcatccattttaagaggtagggaaaggtacctcaactgtatcatctctttcaaaacatttggcacgtgaatcggttcctcggtatcaacacgtaagttcaaatagagcagaagctttaggttccgcatagtagaaggtagatgagataccttagcctcgtataaactcaagtatctcaagtggatgagccctccaatgctacaaggtaacttccctccttcaaactttacccaagaaagatccaacaccctgagcaatgttaagttgtggaagactgaagctgatcgtatccaatagtcttcctcgaatctcggaactataagagatctcacctttgtcttgtttttgtgtcccaatatatgaaaggctttaccactatgtatgctgagtctgcgagatctactaggagattgagcattgatggtagaggtgcaagtagggtctatgataatttgtaggaagttctcttctttggctttagataaacatacttctctcatcatgtcatgcatttgacaatatttagattgccaactcaaatagttgtcgtctgcaataaccaaatttctcctcactagctcttctaggtagtattctccactatcttcgatggttgatccatcgtaaatcccttctgcagcccagtaatagaacaaactatacgtagatatctcggaatcttcggggaaatgggctaggttaaggaagcaatgctttaaatgcgttggcaaatcttcataactcagagacaatattcggtaaaccgaattgagactgttgtcatctaaccacgatcctcctactatttgagatccaatattgtcaaaaactcttttccactcaggaacagtatgtttattagctaacaagcctcccaacgctttaacagctaatggtagtcctccacaatgtgtgaccatttcctttcccatggcttccatttcttcatcaagccttacttctgcacaatatcacaagctaatacatttcaacatgtgagctgccaaattaaaataatacactagattcttggtcttagtattctatttgaactttattacaaggaatcgtgtaatcacgggttaatcaatacatgtttctttcaaatttagttgattttattacgttaaattttaatcaaaccaatcatgaataaaccataaaagtagataattcgatatttctaatttgaataaacctataaaaaataggaagaaaaaaaccaaaaccaattttcaagattcgtaattactgacttactgtactaggattaatagttaatttttttaattgttatccaattaaattaatgtttaataattatattgtccttttgaaccttaacaacactcattgttcatgctaattaaattaattattttttggtcaaaatcaagattaccattgacttttttttttatacatgcctaaattagcatatggattaccatacgtttttagttagttgttctaatagtaaggaaaaaatagcaatatgtatacaaatattactttttggttaaggaaaattaaaatttataaaataatataaatatatacatgtaaattagtatatgtaaatgtatttttcttaaaagttagagaaactaaacattatataataagatatgtaccagtttcatctctcctagggaatactattctctcacagagcttccaactttcttcagggttaaggatgcttgctctaaaagttaaacatgttggatcagcatgtatcccaacaccttcatttcgagaagtaagcagcatcttccaacctgcaaaaatatttgtgtttctcatgctagggaataaaaaaggcaattattctatatatttcttttttaacaatcacttttatgaattaagaagaaaaagtgcttcatgtatgtaccataagagctcacctcttttccgtggaaacactgcttttattacatcccagtcttcttttttccatacatcatcgaggacaactaaatatctaccggcctctaacaattgaaagagtttacgctgaagtgcatattcgtccatctgtaaaatatccccatcatgtggctgaagttcttgcaagatcctctgccaaacatgtttctgtgtaaattgttgggaaacacagacccatgcgaatccatcaaagtgacgccggactaagtcatgatgaaagacttgtctagccagagtggttttaccaataccgcccatcccagctatagaaaccacttgatgaacatcattctccaccaaatgaccaaccaattctttaacactctgctccaccccgacaagatcgctttcagaactgtcaggatacgtttgtcggatctccctctgcaccctttgtctttcctgaagagacagcgaacgaccaccatcaatgatttgttgtatcccaaaactctgcatttccccaatcacttcagagatcctcttagtgataccctcgatatctgaagcaaccttgtggcgatccgtcaagaagcaagcaagtcgtctcacatgcttcttgaccccttttccttttccactaagtttgttcagaacataggattcaattatatcctcagcatcaaaaacaaggtctttgacatcttccaagaaattcctcaccctatcacttccatgtttcttggcatctgcatctttcaacaacgactgtaaacttctcagctgacgctttagtccatcaagttgcccatcaattccctgcaatcgctctgattctcgactcaggagatcccaaagcttctcaagtccaaacgacacaaatgcttcagccataacaactagtcgtcgagaatcatctacgatgaaccagtacaagaacgccaagggtacagattctctggaaaaaaatgagttaaaaacgtttactatattaaatgaagaaagctataaggaagaagttgactccaagtcaaccttatctatctagctaccaatctcttggctgaggattctctacaataatgtaatgattgatcaaataaaagatattttatcacaatttatctacagttatcgaaccaaattgaagaagcagtttgcttagttgtcagaaccttcacgttcttgaactattgactcagtcctatcattgcttatattctccagctcatttacattgctgcctgaactctgcaaacagtcatatagagctcgttaacacttcagagactatattttcaagagaggaacacaaaaccttgcactgttgaaaactatttagaggattgataaagctgtaaccaaattctcatcaggattccacgagcatatatatatatatgtacagagtaacaaatatatcattttgagagaaacacacacgaagacaccttaactcactgtaagtcctctaataatagttaacacatgcctaagtattacaaaaccacagaaactgtctactatagtaagcagggcaggacagtaacagattgatcagttaataagcaatatattattgtaacatgaccatatactgatgaatacacacgaatctaaagagaataaaggtttaccgtttcagtcgcaggaggtagccattgagagaggagacagcaacaacaagcttatcaaaagacaagaccaccacttcactgtgtattatagaattcagtatcaagaccacaaggcttctttgcttgatatcttgttctatcattaaagggtaattctcatcagtaaaaaagcacttagtgaaagtaatttcccaaaagtctctcctacgcatttcatcgtacaccttcgctgcattgatcattagagtaaccaaaaccaaaattgctctctcccatttagtgtgaaaaccaatctctcttcaccaaatttgcttctgagtgaggaattcgatcatttgactaagatcattgaacctaactgaagttggtataatacacccgtaaacaagaagttacaagatgtccggaaacgattcaagtccatggtttgaaacttgaagtaagagaccgatcttttaagtcaaatttatgaaagatttaacctttaggatagaaatgattgtatttactaaaattatacacaacattattaggcatggagctaggattggctagtgatcattggtttattcaggatttggtacaatagtattcctgagaaactcgagactatatactctatggttataacggaaagattaaagatctgtgatgctaactttcttccgtctccacgcccagtaacacacaaagagccctactctttctttttccattctctgtaatatacaaactttatccactaatgttgatgatgcaagcagggaatcaaaattgcgtgcagaacaaaatgccacacatatccttgtccttataacacaacatggtgtcaaacaacaatcaacttctctataaacttactctacttacatcttcctcattcattcttttcccccacccatgcagagctttgtgggtgttcatattatgggcgtgtataacatatttgatccctgctcataaactttggggagccatggactgctgtgtcggtcttctgctgcaaagtggcgttgtgcgagggatagttcttctcctcagggattgtagcgtaggaatatagtcatagctaaaatggaactacataaggaagagctgtgatatccgcagactctattctgaaagcttggttccagacctgcaaggattcgccagaatctggaggatctgttctcgccttttttaatttgatacccgactgaccaagtagccattcttggtcatcatcaatctctggcaacagctcccttgtaggtacatggagtatctgattgagatactttaggtcaggatgaggcggctttgcggatggttcaccattttccttgactttcactttcattgttgcagccaaagggcttggtggacagactttatgcttttttccagagacagtaaaaccattaattctaacttctttaacttgtggcttgcaagttgttccttgcacctcagaagcaggcattggaggagttcggggtgcacctaatgttattccattttccacagatggtacacaagcactcagcttctgtaacttgtgtggcgtggttccattttctgcgaaagaattaaagactaatgttacaacaaacagttaataaactacattgttaacatttcagaccaaaaccaagaaatacggatcttgcatcattactccaaaccaacaaactaccacaccactcagatacccataaatttaaaaaatcttttaaggtaagaaaacatatcatgattggatgaaactattagatgcttctaagtaccaaaccatatatcatacgatggttaatatggcaactacactcctcattcaccagacagagaattggatcagagaataactcaccatacaggaatccttatcggtttatttatctcatcgcacatttgaaatcaagaatcgttaaatataaaatacgaagataagtatccacatatataccaaatcactacattacttttgaagttttttatagaaaaaaatctcggaagaaattttatcttatctgtttatttgttctcaccgcacttttcaaatcaggaatcgttagtatcaacacaaataccaaaatcactacattagttttgagtctcattatagaagaagatcttgaaagcaattttatcttatatatcctactttttccactatactttaaaacggaatcacaactttgcgaaacatatcgctttcgctggtttcagttgccagcgataggcaaacgaacataatcataaacttaagattctaacaaagtaaagttttcataagcgccattgcagcgggcttacgaaaacttttaagaaaacttctggaagcggaaagcggacctccgacgaaatttccaaggctacgacgggccgcgcgcgggttatttgggctttctcagttcaaacctttgagttacccgctctctcttcttgctccaatcaatcttcagtccacaaaatctgaaatccactttatctattttagattattaggtttgctatctctttgatccaagcttttatgtatcacaacaaaaccctaattctacaaattgctccagcgaagaacttagcgaaggaattgtgcttccaatggtataatctttttctctttttttccaggttcactcaccattttcatggcaaaaccaaaatccaattctcatctctcgtggcaggattacttgaaaactgttgcccccactcagattttgtctgaacgaggagctaatctcgttgtcatcaacttaggtgattcctctctctcaattcgaaatttcaattcgaattaagggttttaagctttagggtttatggaatctgattgctgttgggtttaattttagggtctgctaatgtaagagtaggattggctatggatgagaaacctttcaatgttcctaattgtattgcaagatacattacacaatctgggaaaccaactgttgttgatcaggttttgtccaatttttgttttgatttactttgttttcttttgaatgaattgtaaaggtgtgttctttgtatattctagatgcttaacactgaggtcactactaatcaacatgttgaccgtgagagagcttataattctgtaagtgtttcactttgctgcttctttcaattgaatctacttcttggtgttgactgatttcttttacttgtgtttgtttatactgaaaggcggcatcgctgttgaagatactgttcctggatgaaagttcttcttctggctctgcatctcgcaaggtaagtagaatagtttgttgatgctaactgtttttgcttaaatgttgttacagatagtatggttttgatttatcaatttgagtaatgcgtgaaaactgattgttcttgtttttttctttgcttacaaacctctgaaagtttatgcagatggggaggatcgacggatacaatcaagcgagtacgataaagaaagattcagtctttacttggactgatgtgtatgaggatgagaaaatttctcttgcctcaccagcaggtgtcattctaattcattattcttgtgcttcaacttccctccctgtcgtagtaggatttgtatttgttacgtatagttgagtaaaatttactggaatggtttttatttggatcctccccaatttttatacatgtttatgctgggtttcaatgtttatacttgttatatatcaattgtgcagaaacttctcctgataaaggtgatgctagtgcatctgaagctgttcctgatgttactgactctaaagatactagtgagagtaaacgcaagtataggaaaatgatttttggtgaagaagctttgaaaatatcgccaaaagagccatattgtttataccatcctattcggagaggtcacttcaatgtttcgccacattattcagcgcaacgggtatgtatagctccaatatttcttccaacctgtctttgtagaagggattttctggctactgagttgatacttctttttttttgttcaggtttgtgaggacttaactgctatcttggactggattttattagagaaacttcatataactcacaaggagagattctcttttcatgctgttattgttgtcccagaaacatttgacacccgcggtaagcttgttatgcgtattccagccctttttcacagttcaatctaaatatattcttgatcgatgtgaactcgtattctgattttggcttcatgatattatcagaaataaaggaaatgctaactattgtgttgggagagctatactttaactcagcagttgtccaccaagaaggtctatcggccgtttttgggaatggtttgacaacagcttgtattgtgaatataggagcccagacaagtacagtagtttgtgtcgaggtattatcagaatacgagaaattatcattttgttattataactgttttatatatgttcatttgatttggtttgcaggatggggtctcattgccaaatactgaaaagattttaccttttggaggagaggtaagtatatatgtatcatttctctgttttcatattctcttgagctacattgcatactgaaagttctatatctacatataaattttcaggatatatgtagatgccttctatggattcagaggcattaccaaaagtggccacaaatcaacacagatgttttggcaaagccaatcgatatgctgatgcttaatcaacttaaggagtcattttgtgaaattagagttagttggattgtggtcgtcgttttattcttttgataaggaatattgaaactcatatattttttccattcacaggcaggagaacttgaaactgttgcaacggttcattcttatgaggaaggcatgccagctgtgcctcacaagacaaatctcacctcccttaacgtaaacaaaagacaagatcaagccattttgctgtcaatgctcacctatgattttagtcttgaaaatcttttgtttggttatgtcaggttccaccaatgggtctgttttatcctaaccttttggtccctgaaatatttccccagccaccacgtcaatggtcagagttaaaccttcttatattcttctctttggtttagttgtcgaccgagagatactcatttgaaacctattgtttaggtttcaagactacgagaatatgttggaagacacttggaacatggactttggaggtggtggtaacatgggattaccaatgtgggatagttttgcattttcgccttcaaaaccaaagaaagaagagaagattggtctcgctgaagccattacaagcagcattctctctgctggtatatgttgtgatgcaccctcctgcattatataaaaatcaacacctaacaaaaacgttatccttttcttcttcctttgcttgtaggacgcatagaccttagacggaagcttttctccagcattcaattggtagatcctgaaaacctttttttttacacactcaagttttcgccatgtacttccttaaaatcatgtgctaccatgtaactcttcatacatgaatgtgttaccttggaactctctctctcttttggcttctcagattggtggtgctggtttgacgaaaggtcttgtagcggcagtggaagaaaggtttgctcgtttcctttaccaaacatttcgttttctaacatccagaaggcacatccaactaaacagagtattttgttcaactaatgtttatgtccctctctcctttgcgtttcagagttcttcacgcgatacctccaactgaagccattgatacagtgcaggttctgccatcaagaacggagccacaattcgtaacttggaaaggaggagcggtacgtttgcatttgtttgcatcttttattttcttaccactcttgattttgtgtatttatgtactgaaatttgagacagatattgggaattctggactttgggagggaggcttggattgagagacatcaatggatggtaaatggggttaataaaggtggtctaaagaagtacaaagactcttatcaccttcaaggtcaagcaatgtacttcatcaacccctagtttctgtctatatcttaagctttctctgtttcttatcagaatacttttacttgtcataactcaaaaccaaaaacaaaaattctcagagtaaatgttattttgctaagatattctcagagtttggattgattcgaggcatataagaatttaactgatttggtcatctttaagatcataactattaataaggaatccaaaagttatttaaggttttgttagaaaagcaagataggcatcatgagttagtatatatatatatatatatatatataatatagaactttttgattttttttaatcaaactatattatatatatatatgtcttagttcctaataaaatgtaaacttcaatagaatttttgaaatataaagttttaaacctgtaattgtttgcacttattagatgtatattactatttataccaatatataacagattttaataactaaacaattataattttttaacaaaaacaaacgtaataggttactgaaatttactttataacaaaataaaacgtttaaatgaaaattaactctttatataacatatttatctacagagcctataaatatgactaaatattgctttaatactccagagcaaaacaaaagaaaaacgattcacaataatatttaatatattttctttgtgatattggttaatttctaccaagaaatgaagttgcctattatattcttaactctattaatttttgtttcttcatgtaagtctaaattatttaattaggataatgtgtcagtattataatcattataaaaactgtttaagaatttgatatatcttttaaaaatttgataggtacatcaacacttataaatggatctagtgatgaagagagaacatattctttcagtccaacaacaagtccttttgatccacgctcactgaaccaagaacttaaaattgggagaattggttactgttttgattgcgcaagagcttgtatgagacggggtaagtatattcgtacatgtagttttgaaagaaaactttgtcgttgcagtattagtgatattaaataaggcattgtaactttgttaaacattaataaaaaaacaaattatattactgtttaatgttcatccatgctcttctttttacaataatgaaaatgtataataatctaaaagttttgtagtgtgcacttaacatgaaatttattggagttaataaaggctgtctaaagaagtacaaagactcttatcaccttcaaggtcaagcaatgtacttcatcaacccctagtttctgtctatatcttaagctttctctgtttcttatcacaataacttttacttgtcataactcaaaaccaaaaacaaaagttctcagagtaaatgttattttgctaagatattgtatgttttgtcatgtatttgattgaaccctttctctctacacaacaaaaccaatttctaagggagttttattttagatttatgatggtttaaagagagaaaaaaaaaaaaaaagtagttacagttttttgtcccacatcggcaatacgagagggaaggagagcagagaagggcttatataaagaagatgggcctcaccgttagaaattaaaaagggtcggatggctatttatgccacgctcagcctaagataaggggtgagtgctgtatggcaaaatcaagacatatggccgacattatttctggaacaacccatgggttggctcgctcggccgaccctccaaattacaattaaaaataattaaaatttgtttatcatacgttcggcgtaattgtttactataattagataaagaatccattttaattccctcaactaaagtattattgacaaatactttattctatatacatttaaaactccaaatgactatcgttaaatctatatcattttgatttgttaaaatgcaatttttttttgttttaaggacaacattagaaacatgatgtaatcgattgggaatataaaacagtttgtcaatataactatgactaccattaataatttaaacctaacaccttgctcacatacaatactccatgcatattgcataggtcgaatcaaattaaaccaaaaatctatatattttgtgatattaattctgaccgatcattaaaatttactgtatactgtatttagtagttgtcgtcaacttgtttacaaaatgtttaagtgatcaataattaaaaaacaaattgaaatcaaaataattttaccattcacaatttaaacttaaacgctttgctcacatatcatattgcattgctcacacgctttcatcacattaccattcgacaggaaagagtaaaagtgttaaatcaccaccacccgattgaggaacaaaattctacatattatgaaatgttttttttttaacttttataataatgaaaaaacttaataccaaatcttcttaataatcaggttacaactttaaatacttttgtttctaaaactttttaaaaataatttgtttctatagataaaaaaatgaaaggtgtttgttcaaaacaaatatgaaataaggtgatttaaagaattttcttattaataaataatttaagcaatttataactaaaagatatatacatatgtagaaagagtttggattgattcgaggcatataagaattaaactgatttggtcatctttaagatc

SEQ ID NO: 823 - DNA, 60476 bp, Arabidopsis thaliana
ataaatattaataaggaatccaaaagtaatttaagattttgttagaaaagcaagataggcatcatcagttagtatgtatataagattttgttaatcaaattatagtatatattatgtattagttcctcaaattaaatattttaaataaaatgtgggcatcaatagtaatttttaaatttaaagttttaaaccggtaattgtatgcacttattagacgtaggaagatttgcaaaagtaccatttttctactacatcatgcaacaatacctttttcaacaatcttttgcaataataccattttctgttgtccatttttaaaaatactcattctcttgaacaaaataaccaaattaccctcatttaatgagaacacataattagaaacagaaattttggcgccaaagtttttttccccccaaaatggttttccctccaaaaaaagtttcccaccaaaaagaatttcccgtaacaaaatttttcccaactaaaaacttcatttaaaaacccttgtaaatcattttaaaacctcttaaaatctttatacaatctttaaatacatataaaaatactttaaaaacctttgtaaatcattttataaccttttacaatggttttaaaagatttacaagagtttttaagaagttttaaaaggattttaaatccttttaaaatcttattaaaactcttataaagtctttaaatcatttttaactttttaataaaatttgtaaatatttttaaaaatttgtaaatattttaaaacatttgtaactcttttttaccattttaaaagtcttgtgaacccttacaaaaggttttaaaaaatttacaagtgtttttaaagggttttaaaaccttgtaaaccatttataaatcttaaaaaaaaacttgtaaaccctttaataaacttttaaccattttaaaagtcttgtgaaccccttacaaaaggttttaaaaaaatttacaagagtttttaaaagattttaaacttgtaaatcttttaaaaatccttgtaaatcctttaaaatctttgtaaaccctttcataatttttgaaccattttaaaagtcttgtgaaccccttacaaaaggttttaaaaatttttacaagagtttttaaaagattttaaacttgtaaatcttttaaaaatccttgtaaatcttttacaatctttgtaaaccctttaataatttttgaaccattttaaaactcttgtgaaccccttaaaaaaagttttaaaacgatttacaagaggttttaaagggttttaaaactcttgtaaattccttaaaaaaaattttaaaaccctcgtaattttttaaaaaatcttttaaaaccttacccgctaaatttgttttttgtgggaaaattttttttggaataaaaaatttggcggaatattttttcgatattactttggcgggaaaatgtatttcaaaactttttgtggcgaaaaaattattttaggaatattttaagtggaaaaatcaatattttattttgttaacctaaaatattttccaaatagaggtaaaatggtcaccaaaaataaaaaaaaggtaaaaatgaaaatgacaaacaagaaagggtatacttgaaaatgggtaatgttgaaaccgcattcttagcaattattcttagatgtatattaatatttataccaatataaaacatattttaataactaaattattaaaatttaaaattgaaaacaaacgtaataagttactgaactttcctttataacaaaataaaacgttttaatgaaaattaactcttttataacatatttatctagagagcctataaatatgactaaatattgctttaatactccagagcaaaacagaagaaaaacaaaattcaaaacgattcacaaaaacatttcatatatttttttagtgatattggttaatttctacaaagaaatgaagttgccttttatattcttaattactctattaatttttgtttcttcatgtaagtctaaattatttaattaggataatgtgtcagtactataatcattacaaaaccagtttaagaatttgatatatcttttgaaaatttgataggtacatcaatacttataaatgaatctagtgatgaagagagaacatattctttcagtccaacaacaagtccttttgatccacgctcacttaaccaagaacttaaaattgggagaattggttactgttttgattgcgcaagagcttgtatgagacggggtaagtatattcgtacatgtagttttgaaagaaaactttgtcgttgcagtattagtggtattaaataaggcattgtaactttgttaaacattaataaaaaaacaaattctgttactgtttaatgttcatccatgcccttctttttataataatgaacatgtataataatctaacagttttgtagtgtgcactaaacatgaaatctattgggaaacataagtccatgacaactaaataaatatttgaaaaaaaacatattcaacataaccaagaaaactgttagttttttctaaacattttacatttaaacaaatttctttagctcatttttactataaatctattttattatataaaatatggttttcaaagttttgaaagggtcaaagattttaatcacccccacatctcaacatagataaggttccaatatgtttaattattttgcatatttacctaaaaccttctgagttatgatagacaaaattaaagaaaacaaatcttcaaatcagcttatattttttcttcttcttcatattgcaaaataaacaacatacacacgagtgtttatgattaaatccacacaaataaacaagaaccgaacaagaaagagtaatatatctattgtctcaactaatatactttgacataattgaggtttaaattcttccattagtggtgttttacaattattcttgtgtcatggtgtttattatttcttccatatcactataaagataactccttacaaaaggaaaacgttgctagttaatgataaaattacctattaaatttttttttttaaatctattctcgaatcacctaaaagagatagaaacatgtaacattgcactagctgatttcctctttaatttggaaattactacatgattccttattaacaacttagagcactcaataaaaaatcctcaacattaagattgtgagaaaacattggagattttagtgggctgtgcaaacaaatttgtaaccctaactagaccagctattatgaaatctctagatatactgatgtcaacaactatcacaaaataaaaatctaggcatgggtgttttgttcgagttcgggtacccgaaatatcgaatattcttataaaacaattggttaaattttaaaaaactttccttaaattttgataaacataactaagaatgttcatataatttggttatttttggatattttagttattttgatctaaaaaataattaatatttttggatttataattgtaatattaaatcattggcttacatccagtctaaaaataaggattttctgcaaaataaccctccaagtcaatatcgtttgcaagtttaccctccaagtctgaattatgcaagtcaactccaccatctctaaactcacccgcaatacaaccctcccgagtatcgatgacgtggcactcgataactccgtttgaaaacattaggattttgtgcaaaaaaccttcaatgtaaattttattttgcaagataaacctccatgtcaaattaataaaagtcaaaccacaatctgaaaaatctcctacaacataactctttcgtgtatcgatgacgtgacagtcgataacccatttagagattttataagtctatggaatatattactttaatgcatataatttaattgaggtattggtttaagttttaaataaaataaaaccgaaccaaataaccaaacggttaaccaaatatccagaaacttagaaaatatccaaaattaatacccataactataagggtaactataattataaactcaaaatattaattattcttagaaaaacaatcaaatactttaaataatcaaaatatccaaatattgttagttatatttgtcaaatttaaatactcttatacaaaataaaactaaattttaattttcttattaatattttgttctttgtattatttttgttaatgtcggttaaatttggttaattttaattattttgaaagaaaaaagaaccagaacgaatatgataaaattttggttagttacagttatcgattcaattttttatttattttttatttgaaattacgattaacatttatttaagttttagtgtttacccattgcatattgcaccttaaataaacaactcataatatctctatccattgcacatgctctaaaatgagtatactgtatctctatccactgtcacgtcattgatacacggaagagctatgttgcaggagatttttcagattgtggtttgatctgtatttatttgacatggaggtttatcttgcaaaaaaaaaaattacattgagtttttttttgcacaaaatcctcatgttttcaaacagagttatcgagtgtcacgtcttcgatacacgggagggttgtattgtgggtgactttagagatggtgaggttgacttgcataattcggacttcgagggtaaatttacaaacgagattgacttagagggttattttgcagaaaaccctaaaaataattaatattttgtatatataattatataataggtacccattcggtttgtggtttggattcgaatcttcagatatagaagtgtaggattcattgcgatatttcttagtgcttggtttggggtttagtatatagataatatagaaattattgatcttttcaatcaaattctattatatacaagtattagttcctcgaattaagtattttaaataaaatgtgggtatcaatagtaatttttaaaatctaaagttttaaaccggtaattgtatgcacttattaggtataaattattctttataccaatatataagatattttaataactaaataattataatctatatatacatttttgcagccattttaacaaataaatcctgaatttggatttatttacaactcaatgccattagcattaaatcttttctccaaaataactaattttactttaaatttttgatttaaattatcaaccacattatcaatcaaatttaatccaaacaaacttcaaatcaatcccttaaaattagcataaacatatttgttaacaatattttaaaacaaagttttttgttaaaacaaatattattcttactaaacgttttttgtttaaataaataaatcatgtatttgaacttatttacaatgtcatgacactaacattaattatttagcaattaaagatttaaatcttctaaatccttgttttagagttattatatcattacctaaaaggctcaaaatataaaataaataaatattattatttatatatttaaactttatagaacattattaatatttaaacttataaaaggtttaatatcataattgtttaacatcattatataatatatagagtttaaaaaaatctcaattcttccgttatattttgtgactcgaaattttaaaattgaacatatattaaccaattggcgaaaaatgtgtgagttcaacgtcccacatcgactaaaatatttagacaatgattcataaacatatcataaataagattaacatgaggaaaaaaaaaaaaaagattaacattaataaaataatggtatttttacggaacgggtttggcgggacgggtttgacaggacgttacttaataactattgtaaactataaaataaaaataatttatagatagatacaatttgcaaaattttatatatactaactttaaaatagaaattgtccccgctgtgtaccgcatgttaaaatctagtttaaacataaaaacaaacgaaataagttactgaactttcctttataacaaaataaatcgtttaaatgaaattaactcttttataacatatttatctactgagtctataaatatgactaaatattgcttaaataatccagagcaaaacaaaagaaaaacaaaatccaaaacgattcacaaaaatatttcatatattttctttgtgatattggttaatttctaccaagaaatgaagttgccttttaattcttaattactctattaatttttgtttcttcatgtaagtctaaattatttaattaggataatgtgtcagtattataatcattacaaaaccagtttaagaatttgatatatcttttgaaaatttgataggtacatcaatacttataaatgaatctagtgatgaacagagaatatattctttcagtccaacaacaagtccttttgatccacgctcactgaaccaagaacttaaaattgggagaattggttactgttttgattgcgcaagagcttgtatgagacggggtaagtatattcgtacatgtagtttcgaaagaaaactttgtcgttgcagtattagtggtattaaataaggcattgtaactttgttaaacattaataaaaaaacaaattctattactgtttaatgttcatctatgcccttctttttataataatgaacatgtataataatctaacagttttgtagtgtgcactaaacatgaaatttattgggaaacataagtccatgacaactaaataaatatttgaaaaaaaaacatattcaacataaccaagaaaactgttagttttttctaaacattttacatttaaacaaatttctttagctcatctttactataaatctattttattatataaaatatggttttcaaagttttgaaagagtcaaagtttttaatcaccgtcacatttcaacatagataaggttccaataagtttaattattttgcatatttacctaaaatcttctgagttatgatagacaaaattaaagaaaataaatcttcaaatcagcttatattttttcttcttcttcatattgcaaaataaacaacatacacacgagtgtttatgattaaatccacacaaataaacaagaaccaaacaagaaagagtaatatatctattgtctcaactaatatactttgacataattgaggtttaaattcttccattagtggtgttttacaattattcttgtgtcatggtgtttattatttcttccatatcactataaagataactccttacaaaagggaaacgttgctagttaatgataaaattacctattaaaaaaaaacttttaaatctattctcggatcacctaagagagatagaaacatgtatcattgcactagttgatttgctctttaatttggaaattactacatttttcgttattaacaacatagagcactcaataaaaaatcctcaacattaagattgtgagaaaacattggagattttagtgggctgtgcaaacaaatttgtaaccctaactagaccagctataatgaaatctttagatatactgatgtcaacaactatcacaaaataaaaatctagccatgggtgttttgttcgagttcgggtacccgaaatatcgaatattctgataaaacaattggttaaatttaaaaaaactttgcttaaattttgataaatataactaagaatgttcatataatttggttattattggatattttagttattttgatctaaaaaataattaatatttttggatttataattgtaatattggatcattggcttacatccagtctaaaaataattaatattttatatatataattatataatggtacccattcagtttgtggtttggattcgattcttcagatatagaagtgtaggattcattgcgatatttcttagtgcttggtttggggtttagtatatatataatatagaaattattgatcttttcaatcaaattctattatatataagtattagttcctcgaattaagtattttaaataaaatgtgggtatcaatagtaatttttaaaatctaaagttttaaaccggtaattgtatgcacttattagatatatattattatttataccaatatataagatattttaataactaaataattataatttaaacataaaaacaaacgaaataagttactgaactttcctttataacaaaataaaacgtttaaatgaaattaactcttttataacatatttatctactgagtctataaatatgactaaatattgtttaaataatccacagcaaaacaaaataaaaacgaaatccaaaacgattcacaaaaacatttcatatttttttttgtgatattggttaatttctaccaaaaaatgaagtgtccttctatattcttaactctattaatttttgtttcttcatgtaagtctaaattatttaattaggataatgtgtcagtattataatcattacaaaaactgtttaaaaatttgatatatcttttgaaaatttgataggtacatcaatacttataaatgaatctagtgatgaacagagaatatattctttcagtccaacaacaagtccttttgatccacgctcactgaaccaagaacttaaaattgggagaattggttactgttttgattgcgcaagagcttgtatgagacggggtaagtatattcgtacatgtagttttgaaagaaaactttgtcgttgcagtattagtgatattaaataaggcattgtaactttgttaaacattaataataataaaaaatattgctgtttaatgttcatccatgtccttctttttacaataatgaacatgtataataatctaacagttttgtagtgtgcattaaacatgaaatttattgggaaacataagtccttgacaaataaaaaaatatttttgaaaaattaaacttattcattataatcaaggaaactgttagtttttttctaaacattttacatttaaacaaatttattttgctcatctatactgtaaatctattttattatataaaatacgggtttgaaagttttttaaagggtcaaagtttttaatcaccgtcacatctctagataaataaggttccaatatgtttgattatgttacatatttacctaaacctcttccgagttacgatagagaaaatgaaagaaaacaaatcttcaaatcaacttaaattttttcttcttcttcatattgcaaaataaacaacttacacacgagtgtttatgattaaatccacacaaataaacaagaaccaaacaagaaagagtaatatatctattgtttctttatttttggaaaccatatttcgcaaagaaaaatatcaatattcataaatatattcgtcccttcttgatcaccaatagtatctacgttttggttcatcccacagatcaagtgcagcattcctcgcatcattctcaatacgtgcctctagctgcatagccgccatctcgtcttgcgccttcatcaacgactttatcctagaagctggagaactcgcttctccttcttcgtcttcatcttcttcttctttcccttggtcttcatatgccgcacatgagtgtagatgtgttccatagtcacaatccttacagtaatacatccatagatcttctgaaatagtttcatcacaagcgctgcaagtgaagtacgtgtcttcacgtcctttacacggtgtgcaataaagaagagtgagtggatgttcatgatcttcacgatctacggtttcagggataaacgcacatcccacatgaagactgtagttgcagtttgagcaatggtaagaaaatccagatccgtattggtcacacgcgtcacacgtgtagacagaccgatcatctggtggggaatgaagcaaggtcagagggtggtcctggtgagacttgttattggtctcactaggaaggtcgaaacatgacttgtgtaagaagtaatcgcactctgactttatacatttgaaagcttgcccggtcagctctagctcgcagccagagcatgcggtctcatcctcttctttggctttaaagacacgcagcggatggttgtgacttgggtgcctcacagattggcgattaaccggtttggcctttggttttcttgaagccatttagtatgttattgatttgtgtttggttttggttgttttgagggagaagggtgtggaactttatataccaaaaactgcaagaggacttcattataattgtaggtttaatgagtatgcgtttcgttttattgattatattaatcaagttgtcattgtattatgctatttcgctaattataaggtttgacatctgtataggagactttgacatttgggattcaaagtttaggaaataaaagtatttagacgcgctttggtgtttattattctaagattaagataacttgtagaaataaatattctaattaacatccgagttttatagcaactagggcatatccgcataatatatatatgtgtgtgtgtagagaggataaggtttaatgaggtcaacgtctctaagtctatgctaattattatctaatttatcttgtgcaacttccatttgataaggttaattggtttaatatagttttgagtaatatattgtcggttgtctcccctcttctcaccaaaaaaaaaggttaattggttaaccatagttttaagtcttaaaacaaacgaaaacttctgtacagatcaattccctaccaaaaaaaagaaagcaacaagaaaacaacatgcatagatcaaataatgtgaatataaacattcaagtggtgcttcaagtgatgatgtagtgagtattctatataaactacatgcaagcatcattatttatttatatttttcttaaaactgtatccagttcaatcaagggaaattaagaaatgctaatatatatgcaagatctaaatttcaaatatggttggaaatttgatcatgtattggaatattattaaaaactttgacggtttaaagatagtgtcatccccgttagaaaagtttcaaatctatgcagtttcaggtatatatctttaaaagtcgaaaaattctttttctgatttcgttatacaagagtctccaagtttatcatcatttattactaatttagatattgaagatgctgcacaaaaagtaaaaaaaattgattaatacttaagggtttttgtcacttaaatctcttagttaagggttttttcattaataatatagctgagggctttaaaatggatttatcgatacttgaggggtttttttcgtttaaatctcaaaaacttgtttttttcttttttttttggtaaaacaatctcaaaaacttaataccaaatcttattaataatcaggttacaacttaaaagacttttgtttataagactttgaagaataatttgtttctatagataaaaactgaaaggtgtttgttcaaaaaaaaaaatgaaataaggtgatttaaagattttcttattaataaataatttaagcaatttataactaaaagatatacatatgtagaaagagtttggattgattcgaggcatataagaatttaattgatttggtcatctttaagatcataagtattaataaggaatccaaaagtgatttaagattttgttagaaaagcaagataggcatcatgagttagtatatatataatatagaactttttgatatttttaatcaaattatattatatatttattagttcctcgaattaaatattttaaataaaatgtgggcatcaatagtaatttttgaaatctaaagttttaaacatgtaattgtttgcacttattagatgtatattactatttataccaatatataacagattttaataactaaaaaattataattttaaaacaaaaacaaacgtaatatgttactaaattttactttataacaaaataaaacgtttaactgaaaattaactctttatataacatatttatctacagagtctataaatatgactaaatattgctttaatactccagagcaaaacaaaagaaaaacgattcacaataatatttaatatattttctttgtgatattggttaatttctaccaagaaatgaagttgcctattatattcttaactctattaatttttgtttcttcatgtaagtttaaattatttaattaggataatgtgtcagtattataatcattacaaaaactgtttaagaatttgatatatcttttgaaaatttgataggtacatcagtacttataaatggatctagtgatgaagagagaacatattctttcagtccaagagcaagtccttttgatccacgctcactgaaccaagaacttaaaattgggagaattggttactgttttgattgcgcaagagcttgtatgagacggggtaagtatattcgtacatgtagttttgaaagaaaactttgtcgttacagtattagtgatattaaataaggtattgtaattttgttaaacattaataaaaaacaaattatattactgcttaatgttcatccatgcccttctttttacaataatgaacatgtataataatctaaaaattttatagtgtgcacttaacataaaatttatctggaaacataagtcattgaaaaattaaaaaaatgttgaagatgacataattggcgcggatcctcatttgtaatgaccagttagagtaaaagaatccaaacctaaaatacaaatcaataatcaaatattggatgttatacaagctatggagcaattaaagaaggcaacacgaataaaatatttgggtcgaatccagtcctttggattgagaaaactgaagcgaattaaccgaaaactcagaaatctaaaaacattaactgaatttcaacaaaaaaaaaaaaagaaaaaggtgttggtagattttatttttatttaaaaatagcagatatccgaaccaaataattttttatcataatttcggtaagatttttgaaaaagcaaaaaaatcgattaaccaaattcgcttacctaattttaaggtttgcaaaaggaaatactctaaatatcctgcaaagaggcaaaattttacacataaatttggtaaattaacggcgagatttacagtaatttcggctccaaaaaacaccccgccaattttattaccaaacccattcacttcaattcgcgccaaaactagaatcccaaaagaccaattcctatttaaaacccctacgccccccactctcatcctccattttcgcctctctcttccctctcctcctttcttcccaaatggccattgttgatgacgcagagatgcggttaaccgaatccgaagctgtttcgagttccgatgatcgtaagatcgttgcagatactcccgattttatagacgaatcctctctagtcatcagaacaaccactggagtccgaatctcagctctaccggcggagcaaagccttgttgactccgatggatctaactcggaggttacgcttccggcgaaagacgaggtaattagtgatggttttacttgtgtgaacaaagagattgtagaatctgattcatttagggagcagaatctagagattggagaacctgatttagatgttgagaatcgcaaagaagcgatgattattgattcgatagaaaattctgtggttgaaattgtttcaagtgcttctggtgatgattgtaatgttaaggtagaggtagtggaacctgaattgcttgttgagaatctggtggttgctaaagaagaagaagaaatgattgttgattctatagaagattctgttgttgaaattgtttcaactgcttcgggttgtgattgtaatgtgaaggttgaggtagtggaccctgaattgtgtgttgataatctggtggttgttaaagaagaagaaatgattgctgattcgatagcggaatctgtggttgaaactgtttcgagaggtttagattatgagtgtgttgatgtcaaggtgaaagaagaacctgatttaggtacaaaattggaagaagattctgtttttccgaatgtgcttgagaagaaggatgaggtaatcaaagtcctggaagaccagccaagtgagattaataagaagctagagcaagagaatgatgatctcttttcgtctggagattcagatggtacatcagccaagagaaggaaaatggagatggaatcatatgcaccagtcggtgtggaaagctgtatcctggcgccgacgcctcttcgagttgtgaaaccagagaagttggatacccctgaagttattgatctggaatcagagaaaagttatactcatgtgaagatggaacctgttgaggaaataaaggtggaagctgttaagatgagttctcaagtggaagatgtgaaatttagccgtgagcagaaatctgtgtatgtgaagaaggaaccagttggagcaagaaaggtgaaagtggaagatggagattttccggtggagaaagattggtatttggttgggaggtcacttgttactgctacttctacgagtaaaggaaggaaattagaagataatgagattgtgaatttcacattttcttctgttgcaaaatggaaagtcccaaacattgttcgtttctctaccaaaagatgtggagaggtaagttgtttttgatacttaacgatttgtgtttctgtttcttaagattctgacatctttcatgttgtgagatactgaaaatttgtgtagttttaaggaaactaaactcttccagtcatacttttgttttggtttattaaattgactgcagttttttggctttatggtcttatagattggtagacttccgatggagtggtcaaattgggctgtgagccttttaagatctggtaaggtcaagatgttaggcagatgtgtagcggcgccaccatttcttacaatgatgcaagaaattatgctatatgtcaggtaaatattgtttcgtttgtgttagtttgactgatagttttgtttgaaacttatatatggcttttggattgcagtttttacattcacagctcgatattcactgatgttagcaaatccacttggcggattggttcttccccaaaccttgagtccacccttcatcctcttctccagcttttcaaacacttgacaatcaaaccttatcaaaaggtatgtgccacatatccatgttacaatagctttatgggattagaatcatgtttcatatccatcacttgttagtttctcatttatatattttcaaacaggcggagtttactcctgaggaactcaactctcgtaaacgttcactgaatttggaggtatgtgttccacttcagtccctccttgaaactcatttaatgtatgtaggataattatgccgttacgaatcttaagttcgttgttcctttggtggaaaactaagttatgcatttcattggtcaggatgactatgatgaaagagcagcattgttggccatagcaaaaagaagaaaaggttgtcaacagtctctggagcagaacaaagatgaagaagaggctcctgagtcatatatgaatcgggttgtcggcgctgccgattcatacaaccttgaggtatgaaaatattcaccggaaattttttcttgtcttctttaaaaaaaaagcttattttaatgtcattttctcttgtcaatcgtttaggaaatggaagctccaagtacactcacgtgtaacctgagaccgtaccagaaacaagctctctactggatgtcggaatctgagaaaggaattgatgttgaaaaggcagctgaaactctacatccttgctgggaggcttatcgaatctgtgacgagtatgtactatctcagatgttcagaacaaactgcaaagtgtatatgttatctaatcttttaacgttgattcgtatgcattttattcaggagggcaccttctatttatttgaacatctttagtggtgaagcaacaatccagtttccaacagcaacgcagatggcaagaggcggagtatgattcttgatcacgctgaaccttcattctaaaacatgtgttcctctctagaggcaaatattatctgcttgtgaaatttacaaatatttgaacttttttgtttgcagatattggcagatgccatgggacttggtaaaactgtgatgacaattgcactaatacttgcacggccaggccgaggtaacccggaaaatgaagatgtcttggtggcagatgttaatgcagataaacgcaataggaaggagattcatatggcactaacgactgtgaaggcaaaaggaggcactcttattatttgtcccatggcattgttaagccaatggaaggtgattgccttgacagttgtgtcttcttaaatgttttttagttttttacacaagtctcatggattttcactttattttcaggacgagcttgagactcattcaaagcctgacactgtgtctgtgttagtttactatggaggggataggacacatgacgcgaaagcaatagcgagtcatgatgtggttttgacaacttatggtgttttaacctcagcttacaagcaggttagaataatatcatgtgttaattttgtgttccaaaacatgtttgttttctgtttagttgaacttaaaattctgagattcatgacatgcaggatatggcaaacagtattttccacaggattgattggtataggattgttcttgatgaagctcacacgatcaaatcatggaaaactcaagctgctaaagccacatttgagttatcttcacattgcagatggtgtctgactgggactcccttacaagtaagatagtaaaaccaactcatggatagatatacttttttggcacttactgactccctatctctttaatgcagaacaagctcgaagatctatacagtcttctatgtttcctgcatgttgaaccatggtgcaattgggcttggtatgatcagacttcatctaaaatcgtgctattcttcggtatataattcttttttatttgacttttactcgtgtattgtatatgtatatataggtggagtaagttgatacagaagccttatgaaaatggtgatccacgaggactgaagctgatcaaggcgattttgaggccattgatgctgagaagaacaaaggaaacaagggacaaagaaggaaggttagtttttttctttgttttagtcccctttttctcttttcttttgcttgtcttatgcttaactttccactaccttttctgcaaattctcagtctaattcttgaacttcctccaaccgacgtccaagtcattgaatgtgaacaatctgaagcagaacgtgacttctatacagccttgttcaagagatccaaagtaagtgttatcaacttatagttataggcttcaagctcaataaagtctgttataagattgattatgatctgttgtaatggttcttgatgctttggtaaatgcataacattctcctttattttggaacaggtccaatttgaccagtttgtggcacaaggaaaagttcttcacaactatgcaaacatcctcgagctcctcctccgtctacgccaatgttgtaaccacccttttctagttatgaggtacaaagcaaaaaatcattcaataaactcttttatttccattgaaatggattcttatacctggaaataaattgcagccgagcagattcacaacagtacgctgacttagatagccttgcaaggaggtttcttgataacaaccctgactctgtttcccaaaatgctccttctcgggcatatatcgaagaagttatccaagatttacgcgatggcaatagcaaagaatgtccaatatgtctggagtctgcagatgatcccgttctcacaccttgtgctcacagaatgtgccgtgaatgtctccttactagctggcgctctccatcttgtggtctatgcccaatctgcaggacaatcctgaagagaaccgaacttatctcatgcccgacagatagtatattccgtgttgatgtggtaaagaactggaaggagtcttcaaaggtttcggagctgctcaagtgcttagagaagatcaagaaatctggttcgggcgagaagagcattgtctttagccagtggacttcatttttggatcttttggagattccattgcgaagaagaggatttgagtttcttagattcgatgggaagctggctcagaagggaagagaaaaggttttgaaagagttcaatgaaaccaaacagaaaacggtaagtcattgtctaaatttctaactaactcttgtccaaatcgaacagagagcttaagatctttatgcttctgcttctgtgatgtattacagattctgcttatgtctctgaaagctggaggagtcggtctgaatctaactgcagcttcaagtgtcttcttaatggtaccatctctcttcaagctttgtttttttaagtcttcttgatgatgatgaattgatcatttggttatgtttcttgaaatacgtaggatccatggtggaatccagcggtggaagagcaagcgatcatgagaattcatcgaatagggcagaaacgaacggtattcgtcagaagattcattgtcaaggtaacactataaactgcaactttctctgagtttctagcatcgtaagcaagatctcgtaagtaagtaacattgtgtttgttttggatgattgtgtgcaggatacagtggaggaacggatgcagcaagttcaggcaaggaagcagaggatgattgccggagctttgacagatgaagaagtccggtctgcaagacttgaggagcttaaaatgttgttccgatgagagacttggagaaagtcttctttttaatcgtcttttgaagttagagagtcttctttttgttttttttcatgtaaatattggtacaagttatttatctttctcccctaatgagttataagtaattttgaacactgattgtctcgatccacatattgtgtatatgaacagttgaacgtggattatgtaattttgaaacatcagttacgatcagaaaaacagacaaaaaaaaagaaaccagtttggaaaaagcagcttcagtggtttagatcagtgggtcaaagaaagatgtggcaacaaatctggtcaagtttttctcaccattcctctgcttctgcagatgagtaactactaaactaagtgccgtaacctacaagcaagattctaatgattttgtcttatattgttccgtaacaaactacgtgtaaaatacggcactgccaaagctacataatcaaatttcagaagccagatttttcctatgcaaatattgtatgagtatgatatagctacaatctacataagctacttaacaaatatgttaggttttgtcgattttcgtctatccgatgaatctagtcatgaatcaaaaagtactagtgtatacaaatatatttgcaggttgcaaccaaattatatagagagacgaacatccagcctggaaacgtaatgtaagaaaaaaggaaaaaaaaaatcactaaagtaacaaaaagtgcaccagccgggaattgaacccgggtctgtaccgtggcagggtactatcatgccactagaccactggtgctttttgcggaatgttgtggaactaggattctaaactaatgatggaaagcagaccaaacccaaacaaaccggattaggtgtacatgtaacgtaatcaatcaatgatgtggcagtaattaaacgaatcagtgtactcgagttgcaatcaaatgacatcttcattttttcgagctgtttaatcaagaaaatactatttacgatcacctaagctaatatttatttttagcccataaactaaagtttagttttgtactctattatgtctatgttatctttatctctttgataaatttttgaaagtttatgacttatgaattatgataattcgttttcatcaaaatattgtttttgttttagtaaaaaatgatcgttgtgatattttgtagtagaaaaagtaagcagtcaatcgagacctaacttttaaaaacgttttgcgataaaaggttagattattacaagacaaacacaaaaggaatattttataaattaaaatataataacacgattgatttaaaccactcccttgccttttaattgtcatcatttcttgtaattttgtggactaattgaagagtttagttgaagttgatttggatttcagttaactggattaatgtgaggattggttttatctgatttataatcaaatctttaatttgttatgtctctttcgatatatattttgttttatgttcgttgctttgtgtttatatacgagtattgtattgtaaacaaaactactagagacgatagtaaatattgttttactgattaaaaaatcataatcttataatttattctacatgtgtatttttgttggaaacaaaactgtaaaagttttagataattgtgagatcatcactactcacaaaataaatatattttttcactgatttactagagaaccaattgaataacatggtctaaacgtaatttttgaggagcaataccttctagtggtataaatttattttgcctcttagatttagctatataaactttctattattagcaagttaataattaataataggctacatttataatctagatataaataatacatgagaataaataaataaataaatccttcaaatacggtgatagttataagaaaaaattggtacataaatatacgaagaaagaaaaagccaaatcatgtcttccaaacatataaacacacatcaagaaaagtattattagtcttatatataaattttgtttcctctatcatataaaccatccttatatgcactcaacacatttgacaactctttcatctttcatcttcccttaaagtcctatatttcgggtatcaatatttcttcaaaatatatatccctcgatcgatcgaggcaacacacacatatatatatatatatatggagtgtgagagatcatcgtcgtccacgtcatcagaaaccggagcagtcaggcaccgtcgtacgtcgtcgtcgtcagtctccaccgtgacgagacgaatgtacgagtgcactttctgcaaaagaggtttcacaaacgcacaagctttaggtggtcatatgaacatccatcgacgtgaccgtctcaacaaggccaaggtgcaaaacgatgctgacgtggcactctcgcaaactcatagatgtttccacgtggcgtctgaccttggaggctacgagcaagtagactccgtcgtgttgaggacgacgacctcgaactacatccaacacttacgaatcggctcgatggctacaaggagagaaaacgtcgtcgttgaaggaaatgaaatcgatttggagctgcgtcttggcttatgatcatcaacttcttaccctctatagatgtataataatacgtttttttggtgtatattatatggttttcgaggttgatatatgtaatctaggaaagcgtatatgagactataatatgtcaaggtaagatatttttggtgggtatttatttatgcatgttttgtgatctatctatgagatatatataaatcttttatcttatatcatattattttcattatagtttttttccataacatagtgaaatctgtcccataattaattaattgtccagatcttcgcattctatatataaaaaaatttggcaaatagaaaatctgtcccctgtaaacggattaatatgctgcacccgtggttctaggattgcggtttttaatcccaccactggcggtttggtggtattgccccatgttaaagccaacggaagagacatctacacacgtctcggatacgatcctgtcgatgatcaatacaaaattttgtgtgtgatgatgttccttaagtgtgacgacggccatagacaatacgttatagaacaagagcatctggttttatcactaacatcacactcatcgtcgtggagaaagatcgagatctcgggagatgcttactcctacttagaaggtgggatttgcatcaatagtgctatatactatggtgttggacatacaaagatagctagatttaatattagatccgagaagataatgtttattcaagcaccagaggattataatgcaatctcatgttattcaacccttacaaattacaaaggaaaattagcatgtgtaagctatgactcctattgtgaatctaagttgcgtgtatggattctacacgatgttgagaaagaagaatagtcaagcatcatgacttgtgttgtgccttgtgacaaggagctatctttgtgcagtggagagagtcataacaacgaggttgtagtggtatctagatgcttaaagtcatctaagcacttttttgtttactatttcgatatggtcagagagagtatcatcagaagaattgaggttgagattgatggaatcgccgattatgagtttagacatatcaatggaattggtaaacatgctcctaggattttgtgtttccctggtcacattgagaatcttatgtacttgtaagttctaagttctactctaccataagttcattagcttctattttcatttttagccgtttcaaatcgttttttgtagtttggttacttgttcatggactccttttagccgtttgttttctcgaacgccacaactacgtctaccattagtcatggactcatggtgatcacctaatgtaaatgaagcacgagtttaccaaattacaatgactgtaaattaatattttcattcagtttgaatggtcaacgcaaatacggcatttctttagatgggcttataacgataatgggttacgaacggcttatagcccattcaaagttcttatctttcaatttcaagtaatttgctttcaagcccttcgaatctaccaaattccaatgactgtaaattatttttttttcccctcaaaatacatatttacaaatattaatttacttatgtatacagacattaaaaggcactaaaataagctaattatcatgatataaaagtaactcaagaggaaaagtaactaagcttacatgtaattcataattaggtgacatcaaatttactattttttaattttctgctgaatttttttatttattaaatatacttattaatatcgagatgtctaataaatatgagagagtgtttaaaaaagagtttagacatcgacatgagacaaacaaaaaatgaaaaatagtggtacaaaatacagatatataacttgaaaaaataaatataatttatcaacacaaatacaagtcctaatctgttatttataaattaataatctcaaaatattactttgatataaaatcagtgttcgtgtaatctatcatttatgcgattttttaaagagataacaatttttttttctttagtgaaacattaatataccgtttatttagtatgttaagtactttaataaaactctttaacaaaacaaaacaaagttaagtattttttaatatataagatatttctctgcatgatccaggtggaatttttttaaaagttaacaatagttttttttttatagtaaaacatgaattttgtttgattattccattagataacaactatttttcttcttgacaaaaaagacaaattttttttaagtaaaacgttaatatctcgtttgttttattccgttaaataattgaaatatataaaatattttcccgcatgattcacgtggatttttttaaaaggtaacattttgttttcttaagtaaacatgaatttcgtttggttattccgttagatgcttttaatgtatacataataattatccgcttgatttatgtaattttttttaaatgtaacaattgttttctcttaagtaaaatatgtatatctcgtagatttattccgttagataattttgatatataaaatattttccgcaaaatttacatagaatattaagaaaagatcacaaaaaacagaaattttgtttgtttattccgttatatacttaatatgtaaaatattttcctcttgatatacatatttcaaaacgctaatatctcgtttggttattctgttaaatactttaatatataaaataatttttctcggatatatttttaaatatacataaaatttctcttttaagttttaagtaaaaaaataataaatctttcgtttgcctttttatgaaaatatagattaaactaattgatgacaagaaaagacattagttttcttattaccatattgatgatttcatctctttctcttgtaatacaaaatggataaaaaaagaacagagcagaaatgaaaacatgaacgttatatataaatatgtcatgaatgaaaaaataactattaaaacaaattaaatttaaggttaaaatttgttctctctgtttcgctgtgttttttcttctttcttacaatctctccatttctctctcttccgtctctttttttatctctctctctagaatcttgaagagagcgagcttccattaaaatctcattctaacgatctccaagctctttcttcaatcatctccaggtttgcttcgatctacacggcgtcgtttacacgtctccttcaaatctttcttccttacttctccgatttcaatttcgtgccgttttttttttgagttttccgatcgctgatttcttcaaatatttatcgaattttttttcaatgttttctgtttgtaaattctctgtaattcaattaattgaatcgaataattttgtctctcttgcatttcctcagctccagcttttgttttattagtttctaagattgctttttgtttttagggtttattctcaattcttatatagtttttgaggtttttggtgtattgatttgattcatgtgagtgagtgattgatttagaatctttgttgagctgtgactgtgatttagatttgattcacttcagctataattctttgttttgatgatgattatgataaattcgtaattttgagcttatttgaattcattaactaatttagtatgatgaaatcttaatcaggggaatgtcagagagtactaatgaagatagtggagcaggaagatcatcactggaagagaattcaaatggacaaagaagtcaatcagaagaagcaatcgctgagtggcgttcttctgaacaagttgagaatggaactccttctacatctccaccgtattgggacatcgatgatgatgacgattttggatcaaaaccatctcaactatttgggaaaaatacttggacgattgagaaattttcagatatcaacaaacgagagctccgcggcgatgtttttgaagtcgggggttacaaatggtaagaatgatcactaaaccttgttgagtacttttccttaacaaaatgtttgatattcctcttgtggtggtggtgtaggtatatattaatttatccacaagggtgtgatgtttgcaaccatctctctttgtttctatgtgttgcacaccatgaaaagcttcttccaggtgagtatattgtgttgtctatttagctacacactcttgaaaccgggaaccttatcgtttaggtttatctttgagacaggctggagtcattttgctcagtttactatagctgtgtcgaataaagatccgaagaagtcaaagcattcaggttacattttgcatcttttgatttctttatatcgtatttacgcagtcgaactgaacagggttttcttacagatacgttacaccggttttggaagaaagagcatgattggggttggaagaaatttattgagttacctaaattgaaggaagggtttatagatgattctggttgtcttacaattaaagctcaagtgcaggtgatcaggtaaatgcaagattgagttttagctaaagtcatcatgtgtcagacatcctcccattaacatacatctacacgtgtttaaaaacgttcctgaccaaatatgcacattgcaacaaaacttatgctcgcttcaatttatttgattttatttgtcgcattgtggataattctgtaaattgattcttgcagagagagagtggaccgaccttttcgctgccttcattataaatatagggaggaacttgttagggtgtatttgggaaatgtagagcaaatttgctggcggtttgtggaagagaaaagaagcaagcttggtaggttgatagaggacaaggcaaaatggaaaaggtattccacatttttacactcaactcctccaaattccagaaatgaaatcaaaaatagctgtagagactgggttgattccaatctagtgtagtactgcacttttttttttttttttttacttcttgctaatcttccttcaaagtttgaggtgtttgcatgataaggaagtgattgttatttcttggtgcagcttctgtgctttctggatggggttggaccaaaattcaaggcgtcgaatgtcccgagagaaaatggatgtgattctaaaaatagttgtaaaacacttctttgtcgagaaggaagttacatctactttggtgatggattccttgtatagtggattgaaggctcttgaaggccaaaataagaacaaggagagtaggccgagactaatggatactgaagaatccacagctccaattgttagcgtggacaaagattcgtttgcattagttgatgatgtgttattactcttagagaaggctgctctggagccattgcctaaaaaagaggaaaagagttctcaaaaccgtacgaaggttagtttctttgttattgtattttattgattgaagttcatgatttactctcctgtgtggtggtgctttttgactttttgttatacatgtaaaaatgcttgaaacatgagcacttgtccttatctaggatgggaatgctggagaggaattcagtagagaagccgttgagcgtgatgataggcgtttaactgaattgggtagacggactgtggagatatttgttcttgcacatatcttcaggtaataaggcataatttttcctctttgtttttttatttggtgcaccaggcataattttgcctttgctttaaaatttccatacaagtgaatcataagcacataatttgtttacaagctaagacatgcgtgacgatcttattctgaaaccgctgatagtgtttattttgtatttctggtcttctggtattgtgtgtctttgtgttcttagctgtacctcatgtatagcactgcaatctttctgagaaatgcagcaacaaaattgaagttgcataccaagaagctattgcatggaaaaggcaagaagaacttattcgtgaagaagaggaagcgtggctggcagaaagcgaacagaagggcaaaagaggagcatctgaaaaagagaagaaatctaagaagaaacaggtccgtccttacacttctgttacttccaaaatagataatgccattaacgactagttggggtgctaatggagattcttattgttttggaactcataggcgaaacagaaaaagaacaaaaacaaaggaaaggaaatgaggaaagaagacaaggtgagaacccaaacagaagaaagggaaattgagaaagaggaatgtgtgagagcgatagcagaatcgtcagctgaaaaacctgacacacttggagatgtctctgacgtgtctgattcagtagatagttcagctgaaatacttcagcttgattcagaagatagagagagtagtcctgttcattgggaaatggatgcctcagaggttcatcctccttctgcaggagacactagcagaggaagaggcaattctttttctatacctaatggagttgcagaaagaaagggtctgtccacaatggatgatagttcttcaacctgttctaatgactcgattcaatcaggggtagccaatgggtcatacaaagggaatgtattaaattgccaaagccaaaagtggtttagcaagtaagtaaactttttttgaactttcctttaagttatttgtttgttccacatccggataacataccttgtgatgtgcagtggaaaaatacaaccaggaaaagtatctgattccaacagtttagccagtgaaaaagagcatcaaccttcaagacttgcatctgaccctaaaaatcagagccattcttctgatatacgcagagttggtgaagctgacatagttatctcccacattcaaaaaccagagagccctaaggaacgtagtcctgttagcaaggtggtttactctttccttttgaagttgcaatgttggaacttggaagttatatatataaaagagggaagctaaattccaaagaattcgtgttggtttacctttcaatccattttagagtgatatgcttatcaacattgaatgactatatcttattttgcaggatcccaacatgattcagatgaaagagaaaagtgctgcggtactttccccatccagagctgctccttggaatcctccgtctccagtgcaagcaaaaccggagaaaaagggtgtttcaaatgtagaggcggttccaaacaggaaagtcatatctgttaaatcaccttcatcacatcatgcatcaccatctcgtgaagctcagttgcaaacagtgggtcctagagctgatatacagaaaatcgcttctccgaaacctgtggaacaaccagcacctcctatgtcaaggcctttgagtgctcctataatccctccaacgcaagctgcacctgtaatatctgctgttcaaacctcgactgcgtcccttgctcgttcaatgagctcaacagggcgtttaggttcaccgacacatagccaagcttacaatcctcaatcctacaaacatgccatagtgggttcatctggtttcacccacccaagctctcaatcgagtggaacaagcacattgccgccttattcacatccgtctcctatctcagtatcaaatcagtctggtttccctatcaatgttggctcttgggatgtttcttctggtgggctattgtggaccggtggttcgagttcaaccagagatacaacaacaaccatcagcgggaatcacaaaacaaacacttacaacgcacccgtagtaactaccagcatcaggcctactaatgttcagatagggagaacggcacagagtctgatgaccgatgagttccctcaccttgatatcatcaatgatctgcttgcagacgaacacggtacaatggataatagcgtataccgtgtaccacaacagttcaacaaccagtactcatatcatggcggtgcggatctcgggatctctagcaggtctaggagttacagtgatgatggatttcaccagtcttacggtgaatacatgccacattctgcttcttcctcgccatatggtaatgggcaaacacaatcgcaatggcagatggcaaatatggatttctctttaccggctatgaggaaccaagacgatgtatcagcatcagcaacagctacttactcttactttgatttagattcatcaaacccgaatttgtctggaatcaacggctatagggacttcaggccatcgaacggacactgaggtttgggtttaaagagtggcattgcattgtaatgtttattatataaagatggaaagcaaaaaacatttgtgtaaagagagttttcgtcctcttcgtttcaaatgaatccttttttctctataggttttattttctttaataatataacaatttttaagttaattgatcctcaaattaaagtttcagagtcagcttatcttcatttggagtatttaaatgtgcgaatgcaaatgcggttgtggatagaactatgacgaacaaagtcaacttgaactattcatatatgaatggttgtctttttttctttccacaaaaatattcaatacaaaaaaaggcagaagatatatatgacctgcatgacatcgaaacactttttttagatgaaagacttcaccacggaaaaatattatgatttgtatataaaatgtataactaaaagatagattgtgtggaagaaaacttagggcaataatttcttacgtaaaatggccaccaatttcagaaatatacgctagattaattcacgagagcctacggtctacataccgtaatcaaaccacccacgacttgcccgattaaacattatcatttttttcctgaaaagttattaatattatagttatattgttcacacattttcatgtgtcacatgtcctttatctatctcggatgtgtatctactatctaaagtaggtgaaaatgttgacaatatataattgaaaattttgaaaacaatatcacgttgggtcaaaagcgtacgaatctctctttctttctccacgttttcatgtatacatatcttacagaaagtggatagccaccacgtccacatgaattctctataaatagccatttggttttttacaatcttcataaatcataacctcccaaagaaggaagagagagaaaaaaagagaggaagagaaatgtcggacgtttgccaaagtattatagatatacaccatcatttaacatgtatatatagtttatattcgaatagaatttcaattttataaagaagtaatatacgttttctatttgacaaagtgtaatatatttttttaataggtatattttggaattcctaaatttctattactttcttaacacatcaatatatatatatatatatatatatatatatatatatatatattgttgttgagacgattctgatacctatttatttatatgttttaactaaaaataatgtatttatttatacgtgggtatgcagcatgatgagcttatatttatatgttttaccgaaataaagaagtatttagctataggtttaacaaaaataatattcatagatattcactttggaatttctacattttggaattcctaaaatttgtctttatacatagatattcatgatcatgcatgatatttgataatcataaatacattttggtattcctaaatatccattaaaattttgtaacacattaaaagtatatatgtaatataaggttgcccaaaattaaatttacaaatagtttgatatgtatttatttctacgtatatatatgcatgcatgcaatgaatcatgatagttgataatcaatcatagtcatagagcgcgcgatcatagaaaagaatatcataatttagtaatttatatgtacagatactgcaggagaagggatgaagagctcatggcctgaattggtggggagaagaggagaagaagtcaaagagatcatcgatagagagaacacgaaagtgacggccaagattatatctgaaaatgcagttgttttggctgttgtaatttgtgatagggtttatgttcgtgtcaatgaccaaggcattgtcacaagaacccctatttcgttggctaatttaattgttatatatatatatatatatatatatatatgtgtgtgtgtgtgtgaatcaattatggatcttaatatgtaacgtatgtgtgaaataagatatgcttgttttaactattaagaaacgtggcatatgcctcgatcgatttgtatgttttttttctatatatatgatcatattgttatatatgttctatttaattaatggaatgatcaaattaactttgaagtcaacttttgagctgtttttataaagtcaacttttgatatctacctatatgccgaacctaatgtatacaagagttggctttcatagataaactggaatagagtggttcaatttcaaaacctaaaacaaaaatgtttggttgaaagaatcaaaggatcattaactaggttttaatgaaaatatattatcaaatggcatgataactgaataatggtcggagttcatatatatacagtataaatcattcaatgaagttcaatcagcacaactgttagaagtagaacataaatatagccatggataaacattaatcctagttacaaaatataatataatcacagctgagagctgacaaaacaaaccacaatcttcagttttatttatgagaaagcacatgatcataacaatctcgtcattactcactgtaatatgaataaaagcttatttatagtgtttatattgtagagtgcataacaaattttaaataaatataattaaccgatgataggaatttgaacaacgattccgcaatcgttgacccaaacgtaaacacgagagcaaataaagatctccggaacaactgttccatccaaaatgataactgctttcatttttggattctctctctcgatcacttcttttgcatcttctccttttgcccccaaaagctctggccatgagctttttcctggatctgttcatttattaacacacatcacctttatattggaccaaaacttctggattagccaccacgttacaatctaattttctttttcgaatatctctataatagccgtaaggttacaatctataagtcaaattttagcactcaaatatatatccatactagataattggtttgcaattttatatatactttttggaaattatattaataaaaaaatccaaagtaaactgaatagaaaaatgatggttaataaaataattaagtatatgtctaccttcgcatatgcttgccatcttttcttgaataaatgtattgatttgtagatttttgtgatttgagttttgtattgggttcttctccacaatgacaaacatggtatttataaacttcgtagattctgaagattaatcaaagttgacttcccaagttattttaatcagaatataaagtcataaaagccacccgaatatagtaataatataaacgtaaataagacttatcgtatcgtattcaagtcatccacaacttactatatataatatgtatatactgaaacgaattctaatttataaagcaaccatgttttagttcatcacaactaatggcatataatatacattcatgagatggtgttctcatctatatgatctggccaactggcaagtaagtccaatgactaataggtctgaaactctagcctttcattttttcctaatttgcggtaatagcattttttatttgttttctccatgtgttttcgttaatttagatctactcttgcgcaatgaataacgtcgatatatagttggctttgtcccgtagggaagtatcttttattatttttcacgttttcaaaaacaattccagaagacaaaaaataaaaaaggcgtaaagagagttcgccgagcaatccccacaacacaatatatacgaaatgttttgtttttcttttcttttcttgttttcttgattttgtttttgttgggttaaaagtgcaagtagattttttcacacaactgaagaaaaacacacgggttatcatcgatctgtcattcatttttgttatcgatcttttaggagtttgacgaatcatcaatcatggtcttaaatgtcttgttccttaatttcttttcatccgagagaattttcgcaaacctacatggacaagatattcaaacgatgagattgattgatatccaagaaaccatcaaaaagatttgaaaatttgaatcaccttttgagttcttgatcattgttgacggttttaggaataggttcatatgtataagtgtcgaggttcatacgcatgacatttgtgtccagtaatttctctccaatattctttaaattctctaagttcaacgtctcggagtcatccataaagacttcatcttttttcaatgtatctgcctgagataaacttgcacatatcaataatctcatctagttaatgatagataacacattaaaatgttttaagtatagcttcttacgtcgattcttagatagttatcctcggactctagggcttgaaacagaaccgaggtgtggtactgaaccatgtctcggcttgattcaaagataatgtctaatatcggagttgttttatgcttccagttgtacgcccaattttcgaatccccattttgcagcctctactgcactgtagtactcctcccttttcgccgatcctgtccctatagatatcacgatatacttttcgtattctaacggcttgaacccatccatatcaggatgtttgattatagactttctagacatagctgtcatgcctaccagagtctatgaacaaccaaacacaaaacatacaagacaattagttgatgatcatacaagaaggagtaatgagaaaatggtacgaagattgtgtattaccgggtcattagcggtaacaccaccgtctatgaggttaaacgttctcatcttatcgttttcgggaaatttataaggaggtaagtaaaatggagcagctgatgtgccaatgcatatgtctgataacttggcgttcaaactagggtcaactgatgccttcaacaacacgtaacaaaagaatacagagcgtgttagtatgttagagtggttaaaatgctacgttaattatggtttaagaacagcggggtggagaagaacatggtatgaggagaagatggtgggttgaagtttcttgatgtcgaaggtaggtatgacaacatttgtgagtgtctggtcaagttttgtctctccaagaatctctcccaatcttgtatgcagatactctccgttgtactttggacgaaacagtgcccataaagcagacggatcccaccatttcgatctacattttttcaggaaacaaagaattctatattcataagtaattcactaatcatctccacatctaatgacaacttgatttttaaaaacaaaacctttagtaattagttctttttacatatcatttaatccttttcgttaaacgaaacatacgaattcataattgtgtgtttctatattttagaccctaatatatatatatcaatctataaattatgtatacttaagaattttcataaaaaacaactatgactactactttctttacccataaaatattttaggagattcttctaagtaaaacgggacaatgtctttggcagcataaagtggccggccggaatcgttcggcgcagtcaacatggccgtcatgaggccaccggtgctggttccggctatcacgtcaaaataatcggctagcctcacgctttcgtcattatcaatttcctattgaaacaagaatctcacacgtcaaactcgtttacacaatgatatatatgttcaattactactatatatcttacaaataatcgagtagatccgctagcatatatatagatgcgcatatgaaatttagatgataacccttactttctagaaaagagttttgatcaaaatacaaaatgttggggattcaatcaaaacaaacatctataattataatatgtaaatgtaaaaaaactgaaaacaaatattcgctgcactagtgaaaggttttatgtataacctgaagatgtttttcaagattagcaaggatgactcccccaatgattcctcggactccgccgccgtcgaggctgaggatggttacaaggtttccgtatttcggcggtttattgttcttgaacatcgaatcatcctttataaccaattcttctttttctgagaactgattataactttcgttagaactcaatctagccctaggaattccaaaattttggattttcttcccactgaaattgttaatagtggctaattttgaaacacagtgaaaagcatttgatcgatgatatcgaccaacaaagcgagtcatcaaccactggaccatacttagttaatgactcgtttttcttttgagttgtaaaagtttaaatctaaaaattggtttagaaaccaaaaaaaaaagaagaagatcaatgcaataattctatacattttcgtcttatatacacatgtgtgtgtatattataaaaatgcacaactaaatgagtgggagattcgaaacgacaaattttgggatcgataagactctttcttaatacattcgtgctaaccgtgattttagtttggaccttttctttgttattaattattataataaccttggaacaactagttcttgagacgaagtcgagatataaatctatattttaaaataaaagattactttaatgtttatctaaatcttttgaagaatctattgaaaatgacatatcattatagtatgactaatttcaaatggtggatgcaaaattgcaaatacatgtagaaaaatttgcagacgagttatatgacttataaagctagtgtatcatattttttagtttataaaaacagcatatgatacttttatgaaagatatgttttttcttaaaacaatcaggaacaaaatattttgtatgtaggctctatgcaataagtaagatatgattaacaattgatccaacgaattgggcttttcagatgatgaaacgggcctctatgaaataaatgatggatttttttccttctaactctctaatgatacaaaatacaaagattccaaaacatataaactttaattcattttttttataaaaatagtagtattttacatatgagatgagatcagaatcaatagagtacaacaaaacactctgtcagattcccacttagttttgaggattccccaaaaaacaaatttggacaatgataacgctcaaaatttaattaataagtttccccaaagtataattaccaaattatgaatgaatagtattgctctctcagaatcaaaacactgaaggagaaaaaaataaaaatggaatctttgaaacgtttcctctgctctattgcgcttcttcttatctcccttcttctaccttcaagcttagctcaacaacaacaacatgaatcaatcagaacaatggaagatttttccggatacccaattcacgaaccgggtcaattcggttccatcaatctcgcttcttcactctccgttgatgctccaggactgcaaaaccaggttcaatttcttaaagtggaacagtagataactaaagtttagaactttgattttgatggatgaagttcttttgtttttggttttagatagatgagctatctagtttctctgatgctccttctccatcagtcaccagagttctttatactgacaaagatgtctcggctcgaaggtaatttgaatctgtttacttgattgagtaatcataaagattagattttgtgaagctaagttgattggttttgttaggtatgtgaagaatttgatggcacttgctggtcttactgttagagaagatgctgttggtaacatatttggcaaatggtttggttctcgctctctgttgctaattgtttcgttaagaagataggtttgattatgttatccatgtgaggtgtgttgttttgacttctctaacttagggatggtttagagccaaatctgcctgctgtagccactggttctcacatcgatgctattccatattccgggaaatatgatggtgttgtcggtgttttaggtgcgattgaagctatcaatgttttgaaaaggtatgaaggatctttggataatggaaagtaaagtctaagattgtgtttcctgatggtttttggtggatatttcttttgttttcttaaggtcggggtttaaaccgaagaggtctctggagataatcttgttcacatctgaagaaccgacccgatttgggatcagttgtttaggaaggtaccctttgtgtttatctttatgaacagagaaaaaatccttgttctgtttctttttgtcttacttgtacatgttgttgatacagccgcttgcttgctggaagcaaagaacttgcagaagcactaaagactacagttgttgatggccaaaatgtgtcttttatagaagcagctagatcagcaggatacgcagaagacaaagatgacgacttatcgagtgtgttcttgaagaaaggaagttattttgcttttctagagttgcatattgaacagggacctatacttgaagacgaaggtccggttaacttaccttttctgcgtggaagaattttgtgttttttctctctttcattatagttaataagatcatttttgaccacaggtttagatatcggtgttgtaaccgccattgctgctccagcaagtttgaaggtggaatttgaaggcaatggaggtcatgctggtgctgtacttatgccatataggtgagctatattatgcaactgaaccatctgtttaaccactaggcactagtatactgatcactgtataatgactatttcttagaaatgatgccgggcttgcagctgcagagttggctcttgccgtggagaaacatgtattagagtcggagtcaatagatactgttggaactgttggtaagttttgcctcactaatttctaaagaacttactctcaatagaacgtattcacagaatgaatcattgtggtttaaggtattctggagctacatcctggggcaatcaacagcattccaagcaaatcccatcttgaaatcggtaattccttatgtttcattacacatactaatagagaaagtctggtaaatataacgtgctttatctgagctcttgaggaagctgagagtagtcctatttttttttggtttgatcgttggactaagttctttttcttgtgttctttcaaagatacaagggatatcgatgaagcgagaagaaacaccgtgatcaagaaaattcaggaatctgctaacacgatagctaaaaaacgaaaagtgaagctatcagaattcaagattgtaaatcaagatccaccagcactctctgacaaactagtaatcaagaaaatggcagaggcagccacagaacttaacttatcacacaagatgatgatcagccgagcttatcatgattctctcttcatggccaggtaccacaaagtttgcaagtttcatcttcagaatactaccctaaacttttaaattagagcatcctgaaccctgataacttttcaacatacaataactattgaattattcccctgcagagtcctaactcatattatagagttatagtaattcatattgaaactcttaaagttccttgtccatttctctaatcgccatatcagaatccgttagattcgttagctactttgaatgttcttgcttagagtgatgctgaactttgttgtattttgctgtatccaggatatctccgatgggtatgatattcattccgtgctacaaaggtatatagatgcgaatcaattagaccgtgatcttaatcaaatctgcatcccccattaaggtttttattggttgcgtgatcttttgcaggatacagccataaacctgaagaatactcatctcctgaagacatggctaatggagtaaaagtactctccctcactctggctaagctctctttagactgatgcaaaccctctttctcatccagaagctttgcacattctctaccttttcttcagtctttgtatctttgacaatgtaaagaaaattcaataaatgttgtggctatcacttatcaagttacagtcacagttttttttttaaaatctgttgtaattatccgagttcatatacaatagtggttctgttacatgtaattaataaaatatgtttttaagttaagaatttgacgtttattaaaagatgacacaagttgtgaaatgttagttagctcttagattgtgacagggaactaattattctgcagctaatagtattatgaatggttgtcaaagaaactttttctttctttttgacttgaaaacagaacaaaatctaaaaagtagagaatgtgattgtttaaatgggaatacgtctttatttgacataccaaacttctcttagtttataaattctggtctttaaagtaatgatgtattagttacagatcatacatatatcttgaaacttatgtataccaaacttctatccatgcttttccggataccttaaattggaatatctacaacaacaaaaaaaaaaaaagaattgtatatctgtaacctaagtttttacaataaaaaagagtggtgtttgaatttaattaatgaattaagatctaaaattggagcatatagttagtgcgtttttgctttttggtgagtagcatatagttagtgttagtgttgtctttgtgtcaatagtgtaaagaaaaatattgaactgaaataaactaacgtaattaaatagaaattaactaggtaataaaaaaccaatttattaagaaaaaactaccgttgtaaattagtgagagaggagaaaacaaaaaacagtctccaagctacttggcctaataaaagagcatatctttagaagaaacatgcatgaggccgtaactaaaagaaagttcagaagagaacttctccctcttaatcatctctcatctttttctcattctctcttctctctctgtctttctgagccaaaagttcaggtgaatgatgcctggctcgagaccattcaatctcatgatctcatgattataacgatgatgatgatgatgtcggaccaggcttcattcccctcaacttacacgttttgcttctcaatcttcaagaccaatcgttagccgatcacctaattctctagtaagccaagaaagatgaacataaatggtgtatccgtgtatatcatctttttttgtatgtatgcgtctttcatcatcaatccgcagcaatgtatataatatggtgtatatcaaaaacacattaggcatatctattaaaattgtttccttaatatatctgttaaaccttgctgattaagagaaataatataatcgaaatttcttttgacatgcatgcatatatataagagtaacagatcaccgagtaaagttgaggggaaggaagcctggtttaaaatgttatcaaatgctatattttctgaagaatgtaaagcatgaaaaaaaaaacaagaattgatgatgcagcttgaagctgagttggtcaattttgtatatatattataggatcaataggtaatcaaaacttcaatactattgttttcttaatttgttttaacatcgtactttataatatggacttaattttaggtctaaattaattgtaggaagaaaggtatcgtatcgaaattaaagtcagctttaattagtgaagggcgtctctttttatctttaccaatttcgttgaaatatcttgttgtaatcagtgtggaaattggctaaaaataactgtttttcctttctttctttttgactatttagctttcaacatttcgtatgtattatttccacttgtttctagttgattaatcaagaattatcctcataagattaattaatgtagtctatttactgaggaaatagttaaacttttcaaagatatatcttacggtttaatatgatatgtaatgtaaatactatatagctaaaaaagtcttatataaaaaatggtcgatcaaatttgtaatcatcagaagagaaaataatcactgaaatttgatttttcgtgagaatgtgaaaaacgttgttaaactgaaatgtgacgagacaaacaaattcattacacatgataaatacaatttaaatatgcaataattagtgtatttatggttaaattatagagccaaacaaaaaggccgtaacatatattatggatgcctgcataattatttctaaataaatactttcactttccttttcttacttgaccgcataattattatattttcttttgctttctctatggagcaaaagatatgcaatgtgttcatagatatactccatgctttggaagagcttagtatacaaattgtttagaaatcgaaactgtgttttttttttaataatgtatctttctcgaactaggttactaacctcgcgcttagtgttcaaaattcatatattcaataaatctataaaaaattattttccttatatatataatatttgaattgatattgtaagaagaaaaaatgaccatccacaaatgcatgccgccgcaaacactatgggaaaagaaattttgaaatatagcgatttaaagtggtctgaaatggtttatagcgatttgagtgatagtatgttgttaaacgctaatctgcaaccacccacaaatgtaatgtttttgagtagttgcatagaaccaatgtaccctttaatgacatttctctagtttcactaattatattattattgttattcaactagcattcactacttataaatctagtttctttcttcatcttgaataccagatgatcacaaatgtttttttattacaatatattaaccttgttggttgttcatcaaaaaggtcgtttccatttgcacaatagcattatgttactatgttacaattagaagttttgaatataaaacatgacctgaaaagaagtaacataatcaatcagtctccaccatgaaaacataaaaagcttgatagatttattgttcaaacatggatagagttctaatcaaaaacagcaatgttgtcaaaaaacaatcaggtcttctgatgaaaatgagggagactgattcgccggaaattggtcatcacccaccaaagactcattgatatcacattcttggttcatgatattggtcatttgattttgctatatttgggatgtagcttttgtaatactgtctaaagcaagactggatgagtactcttaatgctgtagacatattttgctgttgagtacaaaataactttgatgagtacaaaataattttgggctgtggaaagactttacagcaacaaccaatcatcccttttgttgttgttttttagatctcctgttattcaactaataatttctaattaaatatctttctaaatcctatgttattaaacatgaaatttatttaaagtcattcaaaaccatttataatctcttgtaattcaattaaacatttataaaagtcatactacataaacaagaaattgaaaaatctgtcacaatctcaaaataaatgatataaagataagataataaactaattgcggttatattaacgttagtcttgtcattattacaacaatcctataaggatatatgcgttatagcattactataaaagatttatttttccaaactattgaaacacagaacaaaaacatctatagaaatataagtctcattcctcttcttcaccttgtctttaagagacaagcccagtttttttcatctcctccctcaccaacaccaaacacaacctctaagacaaggtgaagaagatgagtgacctccaagcaaacaaagatgcagcggctgtgaatagacagtcttcctcgtcgtcggcggatcttaatgggccatctccgatgagaaagatgatatcggtggcttctattgccgccggtattcagttcggttgggctcttcagctgtctctgctaactccatacgtgcagcttcttggagtcccacacaaatggtcatctttcatatggctctgtggtcctgtctccggcctgcttgtccagccatccgtcggttacttcagcgaccgatgcaagtcaagattcggtcgtcgtcgtcctttcatcgctatgggcgccttacttgtcgccgttgctgtcgtactaatcggatacgcggctgatttcggtcacagcatgggagacaaagtcgacgaacctgtcaagatgcgagccgtagttatcttcgctctcggtttctggatccttgacgtggctaacaacactctccaaggaccttgccgcgcattccttggtgatttagcagctggagacgctaagaaaacacgaacagcaaacgcatttttctccttcttcatggctgttggaaatgttttgggatatgcggccggatcgtacactaacctctacaagatcttccctttcacaatgactaaagcatgcgacatctattgcgcaaatctcaagagctgtttcttcctttccatcactctcctcctagtcgtcaccatcatagctctttggtacgtggaagacaagcaatggtcgcctaaggcagattccgacaacgagaaaactccattctttggtgaaatctttggagctttcaaggtgatgaaacgtccaatgtggatgctattaatcgtcacggccttgaactggatcgcatggttcccttttcttttgtacgatactgattggatgggtcgtgaggtgtacggtggagactcaaaaggagatgacaaaatgaagaaactatacaaccaaggaattcacgttggtgggttgggattgatgcttaactctatcgttcttggattcatgtcacttggtattgaaggtattagtaggaaaatgggaggagctaaaaggctttggggagctgtgaatatcatcctcgccgtgtgtttggcaatgacggttttggttactaaaaaggcagaggagcaccggagaatcgccggtccgatggcccttcctactgatggcatcagagctggagcattgactctctttgcccttcttggaattcctcttgctgtaagtccaacatgtaccttttatccaatttttgttattattatcatccatgatttattatttgttaaaatcaataatccattttttggtatctttttatagattacatttagtattccgttcgcgctagcttccataatctctagcagctccggtgccggtcaaggtatttttacctctcttttataaatattatttaaatcttctgtaaaatactaattaaatgtgtgaatacaaaaagctaaattaaatcagagatcggtttccaattatctctactttacgtttgaagattacaatttttttattacgtttttattatttataacgttgtaaatttatggtgatatctgttatctactaacttaattagattgattaattgatattcttacggatttggttttcgttaaccataaggaatttgctatatcaatagaaaacagtaatcgttttgtgtaacataaatattaaagtgtcaaattaaggatgtgttctttttgttgtcatcgcaggactctctctaggcgttttaaacatgacaatagtgataccacaaatggttgtatcatttggagttggtcctattgatgcgttatttggaggtgggaatttaccaggatttgtggttggagctattgcagcggcaatcagcagtgttgtggcattttccgttttaccataattttttttgcgttttatttggtatatatggacatgtttaatattattgtagcactagataaggacccatacatgtatacttgaaattaatttaaatttctcctgttaaattactgaaattaatttaaaatttatggcagttcttacaaataacacaaaaaataagttaattccaaatttagcaaatcatctccaaagttccaaagtaacacaaattaaatacataaaacttttttttttaactttatggatgaattaggaaaatgtcgcctaaagataaaaaaacaattctcttgaaaaaaaaatattcttatataccacggtttaaaacattttgttccaaattgactcttaattcccacaaattttctttctctgatggtagattatatgagtcacaaaattatcattattcggtagtaactattattttctttgtttcttattaattaattttttagaaaaaaaagtttgtttcatgaagcaattttttaggttttctatacactatttattagttattattgatgaattttaaacttcaagacaaataattaaatatcagtagtttaaaattatataaaaatgtaaatcacaaaagttaatacatttataatcaattttaacatgttttttttaatctatgtatttttttctaaaaaatgaataattaaaacatgactaaattttggcgactttctatatcgttttggctagtttaattattttatattttaattatttacaaagattgatattactgtcttcttttcttttctatttttgaactatatatcactcgtaaaaacttcatcttacacaaaaaaagaaaaaaaggtgatacatacgaatctaaagacctgactgcttgagaatacctctcttcctggcatcaaagggattgaaaagaatgaaaattgcgctgaccaacgtataagcaggattgttaaatttactgcactaggttattaaaaggccatacctcttcttcagatactttgtttaaccactcgtcttgctgattccatttgcgtacaataaccttgtttagtcaacaaaagatagtgaatatatattcacttacggtttatacagttccatggtgctactaacaggatatcacagagaccagagaccagaacattactaaatgacatttgaggaatttgataaaagttcaaattcgataaaagctttaaactttgaagaagtagttaacaaacctgagtatcgattccaacaagcgtatgctgaggaacatcgagaaagagaagcgtagctccatgctttacaagctctagtgccttcttagaatccatagcttccttcttcaaaatagagcggaacaacgactatattccagaagccccattaaacaggcccattaaaatattgggcctataaagcgtggcccaaaacatgtgacaacgcgcgattcacgcggtttactttatcaaccgacataatcacataaacgtttatttatagagaaacctatcttcctgcctcttcagattcgttttatttttcaatcgtttcaatttctaaaattctcaacgcgatcaccccaatccaaatttagggtttcttttgtctttctgcgatcgatctctggtaactcataacttgttgttgaatcgcgaagatggcatcaaacggatccttctctgctcagagaaacgcaaacgctggaacaacgatgaagagacgaaacgacaatcgcggttacggtggcggaatcggatgttatcaagaggagaggaaccgttacgcgccgccgcaaaaacgtttcagatcgcaactgcaacagcaattccgatctggtcataatcctctgtatcattatggtagtaatactaataataacgtgtctagggtttcttctcagtcatataacaattacggtgttgatgtgattgcttctaattcaagttttgctttacctaacaatgattctaacaccaacaattatcagaaaccctttgttgtttatggaaaccctaatccccaaattgttcctcttccattaccttatcgtaagcttgatcctttagattcgttgcctcaatgggttccaaattcaactccgaattatcctgttaggtcatcgaattttgtaccaaacacacctgattttacgaatgttcaaaatccgatgaatcattcgaacatggtttcagttgtgtctcaatcgatgcatcaaccaattgttttaagcaaagaattgactgatttgcttagtcttcttaacaatgagaaagagaagaaaacttcagaagcaagtaataatgattcattgcctgttggattaagctttgacaatccatcatcgcttaatgttcgacatgaatctgtgattaagtctctgtattctgatatgccgaggcaatgtacttcgtgtggggtgagattcaaatgtcaagaagagcatagtaaacatatggattggcacgtaaggaagaacaggtcggtgaaaaccactacaagacttggtcagcaaccgaagaaatcgaggggatggttagcgagtgcatctttatggctttgtgcaccaacgggaggagggaccgtagaagtagcatcttttggaggaggagaaatgcagaagaagaatgaaaaggatcaagtacaaaaacaacacatggtgcctgcggatgaagatcagaagaattgcgcgttatgcgtagagccgtttgaagagttctttagccatgaagctgatgactggatgtacaaagatgcagtctacttaaccaagaatggtcgtatagttcatgttaagtgtatgcctgaaccccgacctgctaaggatttgagagagccgtcgagggtaatgtctgttacagttccatcggttgcgaaagctatactctgctgattgagattttttatatctctgttttagtcattcgtttttttaaaagtaaatgtacattacattaatcaagatgtaacacaaatacagttctatcaattgaatctcctattttactcttatcacctctttacttttaatccggagttatagagtctgttttattgtaatccagaattatagtatagattgttccggattaaccagtgaaatctcacttgattcccggtttacataaaccagactctctataccaataaaccgaaacaaggaaaccaattcctttgtgtaactctctatatttattctcattctaatgagataacacattcacaatctataagtataatgatgatgtctgatcttccggtggctttggtagaagagatactctctagggttccattaacatctctaagcgcggtgcgatctacttgtaaaacgtggaacgctgtaggattaacatctctgtagacttatattggtatatggtttatgcgtaagatttctcttttaaaccttttaaaagaagaatcttttattttgttaggtaacccctcgtcggccctttaagtttcttacaccacgtgatcggttatcctatgtatatactacgttcgtgaatgacctattgggtatccaatgcaaatcacaaggttagactaatactgtttggccccatttttaatgactctctaaagcacaagcttcacagttgcaactctatcaattatagtgatactttacttagggttgaagtcttgaagaggctgaagtagagctacatgtgtccacaatcaccgagaggtaacataaaccatagagtcgcacctgtgaatctacatgtgcccacaatcttttttcagcaatcttaaaacttctttcacactgccatatatatattctataataaccaatatgaaatcccgaaacaaatcaggaactaatggagacccaaaagccaaggtgactaggattctattacgtagttgacataaacaagaggtcggtataatacccataaccaaaccattaactatttgggacctattgctagctgttttcaatcaagcagctttcaactttaagtttataaattcttcaccaagttaatacaacctcttatttttatttatttctgagaatattaaatgggctacaagaaagatttgtgacttgtgagtgatagatttttttttagaaaatgaagacaaactttgagacaaggtctttatgatgaaagaaactttattagtccgtgatgtttcaaccccaactgtttcattgttttctttttttttcccttcttcttcttctttattttttggatcataagaaattaaggaatctattgcataaggttggcatgttgtagatatataaattaattagtctccatatatatatatatatatctaggttatatcttcaaatttgttgttgcagacgaaaaatacctacaacattcaaaacttcagttaattgtttaagaaaaacacagatatgaccaaaaaaataaatatagagataattaatagaataatcttatctacatatatatttattaaaataatcgttatagaaatgttcttttgttcaattacaaaaagaagaaaaatatttatttcgttttataaattaaaatatttattaatattctctaaatctcgcatggttattgaactacaactgtaaaatacaattacaaaaagaagtaaaatcttttgacgaccacctacaaaatgatacgacggagacacacaaagcgagttcaactattaacattaagctcagattattgaaccaaactagaataactcaaataagatatgttttcgattcggcaataaaatttgattcgagatattttagaccaactaatttactatccgacaactgagtttggggtaaaaacccgtaatttattaaaaacattgaaataaataaaatcatttgatatttctattttctcattgttcattaattgtaacatgaaagctcataatcttcattttatagactcaaatcaaatgctctttcaaactaacccaacaatgtagtaaaaaaaaaaaaaaaaccaacccaaaattggaaatcataccatgttttagatagtcaaaaacaaggctaaagaacggaaaaatccaaaaaaaagaagaagttatttatgaaaaaaaaagatagaccgacgttaatggaaagaagaaaagacccaaacatgtggcctatatacccatgggacttatacatgattaagattggcatatacatcaatgtttttcttggtaaaacatatacatcaatgttatgccatcaacattaaattattttaaatagaattttttaaaatatatgatattaatttcttctaagctaagtgaaaaaaatatcaaagcagccgtacagttacagaatcaaacaagaacttgacagcgtaagaagacataactcatcatactttctttttttttcaaacaaaaactacatttacatatttacgtaattttcattattattataaaaaatttctaggctcataagatttttaggataaaagagaaatttgcaaagaagaaaactagtgtattaatttatgtatatgtttgcatttgaatgataagaaaatatctcgcatgactacaaatctttggatatcattatcttactatttatacactaacttctatatatcattttatcgttttatagccaaaatcagaaatattgcaaatcttattttttaatatggtttttaatatttgagaggcgggaaatgtatggagaagaatgtgtacacgtggcggtctggggaccttgtaacaaaaatgcaattaaaaagcttttgaagcaagttagccatagccgcttggcgctgtgtcgtcttcgtcttcttcttccttcttcttcttcatctctctctttcgttttctcagtaagtgaaggatttgcagaagtagatgattgaatatccatggaggtaatttatggtttctaatttggttttaattctttgaaagtttgatttttttatgttatgagatttctgggtttttgattctcaagtttttatggattttagggttttcagtaattgcaaaactttattctgaagattgagtgattgcttgagatataggttatcaatttcctttatccctaatattccaaatctcgaaatttcaaattacttctctaagttgttctatgagtttatgatcttagaaaataaatctagtgttttgattactctgttttgcatatttttgatgggtttgtgttacttgttttgtaagctaagtgatattcatttttgtggttgaggtcaatagtgtatggattctggttctttatgtctcagggtgattggtttcaggaggtatgggagatggagatgagcaaagtaaagagttaggaggagtttcgtcttcgagtcgtcgttgttcttccggtactgctggtgctgcaaatgcagaagcaagaatgaagtttgctgctgttgatgctataacagaattagtgtggtctcctagcaacggtctaagcttaagatgtgcagatatcagtttcacgggaaaggcaaaattactctctcctaacttctttgatataggactaactaacatggcgattcactcaaatagcacaagtattgaagaccaagaagatcacgtagatgtcgaattgagaaaccgagatcaagtgaaccaagcaagtaatgaaatgaatagaccattttcaggttgctatatgataagttatcttttttgataatgagagttcttgtgtgtttgcagtgattggtggttctgttgaggatatgaaacctgaaatggttgaggataaggttgaaaccaatgatgatataaagaatgaagaagcaggatgttccaaaagatcttcaggtaaaatggttatatcaagttaataatgtttgcgtctcttccatttatgacaactatggattttgagttggtttcttcgtcttttgtgcttgttttggttatcgagtagatagtccgaaagctatggaaggagaaaccagagacttgttggttaatgaacagttgaggatggaaagtgctggatctcaagaagaaggggataaggcgcataatagagttgatcgtttagaatcaatggatgagaacaacctcgcaactcttgctgttgtagcatgtgaaggtaaaggggactatttgccggagggtgaggctggacctagtggttcctacaggcgtcgtgagaaagcaaaagggaaagagaaagctttatctgatgaaaactttggtggtgatggtgaagatgaggatgaggagagttttggtagtgtagaaagttgcaatagtgcgggtttgctctcaaggggaaagaaaagaccaggctttgaggagcagctgatttttggaagcaaacggctcaaaacgttaaatcaagaatgtttggggtcaacttcaaagctcaagcaagatagttccttcatgaattggatatcaaatatgactaaaggaatctggaaaggtaatgaagaagacaattctccttttgtagctcttaccaccacctcaaatgctaatggtcatggccaagtcaatgccatcgttgaccaacaacaattgagtccatgctgtgtgaaggaaaatagtggatgcagaaacaccggtttccagtcttttttccagtctatatattgtccgaagaaacaaagtcaagatgtcgtcgacatggatttcccgaatgatgttaatgctgctcctttgcaggaacttccctggattcctgaacattgcgacatttccaaaggggatgacttgtcttcatctggtaatgagattggtccagtggctgaacccaacatttcatcaggaaaagttgtatttaatcagacaagcaaaacacagtcttcagagaacaaacgtgaggacaaagagccaaacatctcgttgatgtctcttagtaagtctaagccaaatgaagagccaaaaacatgcggtgaagctgatggaaaggttagtccatgtttaaccaacagaaactctggtcttaaaagtttgtggattagtcggttttcttctaaaggttcgttccctcagaaaaaggcaagtgaaacggctaaagaggccaatgcttcagcctcagacgcagctaaaacccgtgattcacggaaaatgctggcagacaagaatgttataagacccagtatcagctcggtagatgggcccgataaaccggacactgtccttcctatagtttcgtcaatgagaatagagtcttcagaagcaatggcttctttgtttgctagaagattagaagcaatgaaaagcatcatgccctcaggttctttagctgagaatgcagaggaggaacagagggatctaatttgtttctactgcggtaaaaagggtcattgtttacgggattgtttggaagtaactgatactgagctcagagatctagtacagaacataagtgtgcggaatggaagagaagaagcgtcaagtctatgcattagatgttttcagcttagtcactgggctgcaacatgcccgaatgctcccctgtatggttcaggagctgaaggtagagctatgaagaacgctttagcttctacctctggcatgaagctgcccataagtggtttcacagacgtaccaagggcggtctttgatgctgttcaagtgcttcgcctgagccgcacagacgttctcaagtaagatctaattcacacctaaaagactgtttcccttgtcacattatgaggctttaacatcttttgacatttcatttcagatggataaacaccaagaagtctgtatcgggtctcgaagggttcttcttgcggttaaggctcgggaaatgggaagaagggcttggaggaacagggtattatgtagctcgcatagatggttggtacactttcatataaatcaatactcaaactcgcgtatttctcgaatatttgcaactgaaatatgtttgttttaaccaggggacacagagggacaaagctcaaggagacattcagagaaaagcttaatttcagttaaggttaaaggtgtgacttgccttgttgagtctcagtttatctcaaaccaagactttcttgaggtatataataaaatttgaccaattatgtcaaaagttttgaaatttgctaatttgctaagttttcatctgaatattttgcattaatttatctgagcaggaggagttaaaggcctggtggcagagcgcggggaaaagtgccagaacaagcggctacgacggcatcccgtcggcggaggaacttagtcggaaaattcagcagagaaaaatgttaggcttttaggacatttgttcaagtagataaatgtttttaagttataggttttacgattacccgtgtattttttcggttgaaaaggagagtgtaaatttcttagttcagagggcatcgaatgtctcaaaccatacaacaatctaaaactggatgtccaatctatttagatttgcgagttttattcggatctttatgtctcgatgactatttattgtgattgttaagcttgtatagtctatgtgtgaaggatcaaagtatcatggaagaacaaagtacattgatatcaagagagatattgtggtgtcttgctcatttttcatgaggtatgtttgatagaagttgatatttgtcctaaatgaactaatctgttttgacatcatatttatgtttggtgttttatatcaaaacatattttggatttagtgtgcaatggtcattgttgtttggcatacagcttgcacaatattgtttttaaagtgtcaccaaattgaaaattggttcactcacatgagcaatcgctttagaaattttagtgcaagctgagacaaagtatgatggtttggtgctataggagtttgtcttgtaatgcttgtcagtgttgccttgacatgaagtaaagtagatgaggtaagcctattgaaataccgatcataatttatcaaaaatcatgaatattttgtagagctagataagtacactagatcactattcactaccacttaattatttgcttggatagttcatagttgtattagcctgaactttgcagtaattaaaaattcatcaaatcgaccttcaaacttttgagaattagacttaataaattctggaaaatgatacattgttgggttatctagctattttttttatttaatatgtttattttctcttggccttattttccaaatatatgggcccaaatatattaaaaaataaagagaacataaagaaaatatttttagggttacaggatgcgctacctatttatttggtgcttaagttaagttgtttgtcttttgcgcatacattgttttattttgaggctttgtggattttttagggtttcatcgatccaacaatggtcagttccaatctttgtggatatggaaccagaggttgttgcggctggaattgtgaaaaagagaaccttcaaaaagttttctttcagaggagtcgatctcgatgcgcttctcgacatgtccatcgaagatcttgtcaaacatttcagttcccgtattcgcagaaggttaccttctttctttgaaccaaacaaaagcttttgtctaattggttttgtgagactgatgatgtgttttgttgtctttaaaggttttctagaggattgaccagaaaacctatggctttgattaagaaattgcgcaaagcggtaaaatcaaaatttctcacatcactaattaaatgttacgtttgttgaacaacatattcaattgtccaaatctaggaattgtgtatcttgtatgtttatatgtctcattaagttgagcgattttgatggtttattttatggctaatagaatcgtgttatccctcttagttaaaagattatcagcatgtttttatattctatgcattagtcttgtgtgactaattcagataatctatacccggttttcgataatgttactttggtatttcattctctatgcaaatatgcattcttccctatgcaactttgcgttcgatttttgtgaccaaatggctttaaacaataaagattatgtcttagaatgtcttgagtgcgactatacataatgtcattttttttataactcagataatctataccccacttttgtgctattgtccttattatgtatccatatatagaataatgtgctgtttctctgcaaccaaatggttttaaaatactaaagagtcaatgatttttgtgtctttgagcagaaaatggaggcaccagctggtgagaagccagcatcagtgagaacacacttgaggaacatgatcattgtgcctgaaatgattggaagcatcattggtgtgtacaacggaaagacttttaaccaagtcgagatcaagccggagatgattggacattacttggctgagttctcaatctcatacaaaccggtaaagcacggtaggcctggtgttggtgctaccaattcctccaggtttatccctctcaagtgaagaagctacttatctccatatctatcttcttagatgactttgatctcatttttaagtcttaatttcgataattattttgatgactttctgtttaactccaccaggagggtttagatttgagtactgtgttaaattatcttattttgctcctcattcattttaccaaatttaaagttttcaaatatttgataaatatgcaaaaagttttggttgaaggagctgttttcttgtttagttccttcttgttttgactcggtaggtgaaagtttattatccatttttgtatttcctatgacaaatctatggtcttttttggcgatttcataagtaattaaataatgaaccacatggtgaacaagtgtatttgctaataagatagtactagttcacaattattaagattgtaacgcacaaatatattaatccctatgttcctagttatttaatgttttgagttgtttacttgttccagcaacgtattaagttgaagaataacattgtatgtttaaaaactcttactatagagtgtacgtagtaaatagtattgaataataaataataatagccaaagtattgaactttccaatttctatttttcaaaataaactttaattgggataggtttttatgctggttttaatcaaattttatggtattttttattgataaaatgcattacatatttaccaaattatctatcacacaatttgcaaattttggcactatatatggttatatacttgataaattttctattatattctatcaatattattttcttagttttatttttcaaacctcaaaactcaaaactcaaaagtagtgtgccccattatttttctttatgtgtgtcaataaagcaatgaccagttaatttaagtatttaactatatacaaatttaaatacaaaagaaaattaatgacagaaagtcaacagaattagtagtctttgtaaaaggaagcttctgggagaaagagaagtttccattcagtttcctggagtcttctttccactctcttttcaacctcctctcctctaatctgccaaaaagttaactttaaatttaatatcatcacactaatacagatctaactacttaattaaaaaaacatacaaccatctactttttttttgctactaacacaaaacaacctacctattattacctttatgtacttgtcaagttgtcataaccaaagagaaaccaaaaccggattcaaccaattcgaatcgaattaaatatgtacctgagtctcgatggtcatggtcgcagaaaactcttgaggagagaaattggcatggactgttttcagttttgttcccattgatttaagataatgaagcgcttcaagcattgaatctagtccagacaaaggttcttttagattaaccctaacctttgtttcactcatttcatcatgaccatcctttgctgatttttcctcaatcactttaattcttctcactagttctttctttaatctttgtaatttcgcaatctcatccacggctttttcgacaatcgaatttttgtcattctgaaataaaatgagaatataaggagaaatgatggtcttgaaacttgtttcgatatcaatctatgatgttctttaaacttgtttctatatcaaaatccttaagtaaaagaaaatagtgataaaagaaaagattccagtgcaaaaacttacaaacattttatacaaatgattgtagttggaaatttatcatactcaaaactttatattataccttactcaatataaatttatagatatttaagataagcttctaaaaccagatcaatgcatgtaattaagcatacaaacatcaaagatcagtgaacagacatagtagtcgaaattctgaaaatttagtatccatgaatctaatccatttctaccgaatatctaattttgtgtgccattttgaactgtaaaaattcggatttttgttagaactactatgattttctttccaagtcattaagaaaaataaagttcgtttcaagtttaatattacacaaataatcaaggtaccttagtggcaaatggtagtagagaatggagagctaagtaactctgtttttgtttctctcttctcgtcctttctttcaacatatgtcgccggcttctttccttctctggagccaccgtatttttcttctcctcccaattctttctcagaagattgaccattctcttcttcacgttcaccttcgaagaagatatcttcggcgacatcatcctcagttccgtgtccttcatatatgacctaaaggcgcttctgataggtacactgacgcttctatcacccgagatgtcggccacgattagatcccagaagttgttttcttcttgacaactcaaacctagaaaaaagttatccatctttctctcttagtgtgtttgacaatcttgatttgtgtgatttttgatgttgtcttttgtgtggtgtgtctatatacctattatgatttaatcacgtgtggttttgttgatttaacacacgtgaaacatattgagaacgtggtcaatgaatagttttctcagcttcttggttagatgaagtgacgtatataggagaaaaccagagacagtcaaatgatgtatcaaaggtgaactctagagaaagtcaagtgacgtgtcttggcaacaaaatttagacattacgtgacgcgtaaaagctataactatttgtttgtttgttttcaaattaaccaattttctttttgaagttaaagtacaaaatctcctttgtgagttcaaaaaacacaacaccgtggagaaaagaaaagagccggccctataccgttttatcaaaccttagggtttaataataataattaagttcatcagtcatcacaagtggaatttgtgcgtgtgtgtgtgtggcattagtttattcttcgtctaattattgtaacacattagtcattgagattttctttccacgtatcctaactcttgggtgggaaatttcctcgtgtgaatgacttgactaaaaatattgaccaacttcgattattttattttctgataagagattttatctttactacactcggataattgaccacttcgatggaaaattcttgcttcttcaacttctttttcttttacactaccaacttcgattctagaaaacgatcttttttagtataaataacgaattaagtgatactcaatttaatgggcttgggctttcttaacttctcatgaatcagtttgactttctcctcttttcccaacgaatttaggattttcagaagtttctagaatccagagcaacaatggtggcgaatcaagtaatctccggcgttaaagaaaccgcacaaccaatcaccagcgccgctagtccatcgccgacgccaccacacgcgtcacacaaaacctcacacatttccgaatcaatttatcatcctctacttcctcctaaccttctctttaatcacacatcacatcgcggttctagcattcatcgccgttggtttagcttggtacaatgttactttctctacttcgaatcgctagtgttcggaattgcacaattgaattggttcacaattttaaaaccggttaaccaaatcatacatttcaaaaaaaaagctgacactgtaaacatatgattactaaaccggttttcatgagtctaaccgaatggaccggctatatgtactctttttcagctgacactgaacactgcttcgatacggcgagtaaactgtaaacatatagccgatcctaaacatgtaactggtaactttcatgtacatagtagtaatgtaagaaattcgaagacacaaagacctatttacatcaaatgattctacatatactcagtgttattttccaagtaaagagtcaaaattcaaagcatagacttcatttttttcagcgggcttcggcttcactctattatcctaatcatctcctgcaataaggacccccacaggttcataaccatgctcaaacaaaacatcttataaacttgagcaaaatcatgtccttttttcttttcttaacctttcttttggaagcaagactctggcttttcttttctttcttttcacgggcgcattgaccgcaccagtctcggaattcgttgtcataagtttgcatctctctgaacaaagagctgcaaatggaaatgcagaagaaaaggtgttttagttgtgatctgaaatcctgaggcaagctt

SEQ ID NO: 824 - DNA, 8541 bp, Arabidopsis thaliana
catgattgcttactttatgcaccaaagaatcatattggcccgactacaagatgttatggcggcttttgcaccatggctgtggcagccaaggtgaagtatagcttgacccggttcatgacagtactcaaaaatttcctgtttcagtgagaaataattggttcctttattagctaaccattttgccatttactgaatataggaacgtaagaggactcacatacctctggctttggacctgctttcaaatgtttattgcatcgtgtgcctgtgaataatatttcccctccctcactttgtttactcaaacaaacattcaatgtaatgtctgaattttccacatgaaagcctgcagatttaaaagatcactgcaccagattaaagaattcactctggttttctcaagtaatatcagaaaatcaaaagggactcacctaattcagcatccctatcttcacaattttcaataacgaatccatgttgagtgtcaaacattgttccacacacttgagggaagaatactgcaaaacaacatagtgaagtttaatgttactttttaaaagtctttctaatgcatttttaagtaatatatacgccttgcctttgcaaataggaaagataaaatcctccacgagtggcttaagcatgatatccatgccaaagtcgtcaagcacaacaccatatttactcttattgtttggtttcctgatcatcaattttgcctcatgaagccactttctcatattctctacctgattaatcaaacaaagaggtaagagcagggcagagaataagtggcaagatgatgtgtttgttactattacctcaacaagcaatttctgaaagaagtcaggctgaaacattttaaagacgtaaacaccaggaaacggttcaaacattatacgtctgaagctttcctcggtgttttctctgaccgccttgcggaaacacggaagcaataacgattcgggatcaagtttatacaactccctgaaacgtggctgcagaaaaaggaaacatttcaaaactatttgcatcaagaaaacaatctaagtgacgagctaaagtctcctcacctgataattggacattatccactccctatagttcttgaaccgtatagcctggaacattaaacagacatgaaactattctgagaaattgtgggattgattctatgtgttcatctaatgagatatgatctcatatcaatcatcataatgtacattaaacgtaattgattctaattgtatctctttaggaaactagatacgctcctgtagctatataatcatgtaatagcttttgtgaataaatcatcagaaacttctgttcacatcgatctctctaattgttcatcatcacaagataaacctaaagatcactatcgtaatttcttattaccgatttcaattttagagattgagatcaaaaagaaagagcaattactttggcacattcttcgcgggaaatgtacttgtgcaaaatgtctgacatgaatttggccttctcttctctattcgccgtgagtatttccggcggtaagtacctctctagggatcttaatacggaagagctaaattcaagttccagatcttcgtagttatcagaattgtgctcgttgttaggaagaagactcagcctcgggatagccatctttgttgtcgccgctgcagtagtagtcaccggtggttgatgatctctacctccgacagttctgtcaccgtccaccgtcacctcttgccgatcacttcgaaagatcaaaatcgaagtttctttaacctctcgatttggggattctggaatttggggtttccgttaaatttcaccaatttatttcccaccgagaatttattggctttttctgttatcggcgcgttttcgaacacgcgatatggcgttgtggattatcggcccattataacggcccaaaaaagcaaaaatgcttcgaatcggttacttaaaaaatttcggtactttccggttaagatccctttcaatatttcccggttactagcaaccaagaacatgatggagaattactgtatttttgtggctggtttgcgctaaaacaatttcagaaaagtgaatataaaagttacaagaattgtataaggagatgtctcagtctcataggtgtgtatagtttcctaatgctttcacttatagttcacgtatcaacgggttttgcctgagtttggaaactttcttttatcccattggacaattacagtagtgttcacaaagatcaaaacctttctgtataacaaatcaggtccaaaccaaatcatacatttagaatttccatatcaatctataagattcagaaaacctgacaatataaggtgtagataatgactaaataccaatattaattgtttgtataacccaattagtcaaaaccattacctgtaccgattaaaatccaaaccaattttacaggtttgctgccacatttcctagcctttcactgccagagattgcaaatcttctaggaaatcttgaagactcatatcatcagtgagaacaatatctgaaccaccggtatgatctgttttctgagttactgaaggattgagcttggcaagaagaaaccgagcttgactaccgtgctggtcacaccgtacaatccgtggcattggaatccgatcagttactaactgcgctgcatcgatttccggtgcttccagaaggttccggaaagtctcgtgggatggatctttatgatactcaagtttcctccattgggcgatttttgatccatggtggataaccacgtagaagtatgaatcaaatagcaaaattacgtctggagtcactgaccggatatcgaggaggactggaaccggtggtccgtcgaatgaataccggagaagcgttggttgaatcatgatgattgagtttaccactccttcccggtttaacattaaccggaagaaaccggtttcatccggggaattgttgaagacgtcaagaaactgtgatcttcgtagatagaacatgaactgaggataaagggagaagtttggagtcaacctgaaagaagatggatcttcttgaatataatctccaaaccgtgaagcaaaccggattaaaccgttatctaaccacgtaataacgtctctagcgtgacactcctctgctcggttaattgcaagccgcgccataactgacgcagctgtttcttgatcaaaacttgacgagatttctggcgatttaccagcaacccatctcctagcaaccgttgtaacccgtttcctcattgctccatttccataccgataccgagtaatgaactgaatgaagaacgcagaacctggctgcggttttcgattctgttcgttgctcacatgaaagaagaatgaaacacaagtcttattcgtgacagtgctcgttttccacatatatgttccgccttcaccgatctctgtttcgctcactatatcgttcttctgtcttagcgacacaaccggaccaagtgcgccgcagattctcatatccttagtcgtcacaacttccaaagacacatcaaagtacatactcaggttcccatctgcatcgcggatgaatatatgtctcagacattttttgaattgctcggattcaaatgtctctcccagtaagagaaatccaccagacatttccactgcgtatctcagttccgctgctccaacttggtcaagagagcaagcgaacacatcgagaacaacggacgaatcacagagcctcttcgctagtttcttgtaaaacccgcaagatttatcgtaataagacacgtgaccagtgataatatccctgtgagttctgatcgaattacttaaatcagagtccacgatgatcccagggcctcttgtagcaggccccgatgtgaaaaccataatccgagaaccagtggttacagaacatccctcgagcagtcctaatgctgttgagatcgcagcaccagttgacctatgaggccgatgacctggtttgacatcaaccaagggaatgatttcttcaaacgcagatgttaagttaaactcacattccaccaacggaagcaagaaactttgctttcgaatcgctgacatctttccatgatgaaactgcttagaatatccaagtccgagaaattgttgtatctgatgaaaattttcccatgaaaaagaaagaaacttagtcaaattcaatacagctaagaagaacaatctattgacaccaacaatcatgatgcaggacactaaaaaatgaagaagcctaaaaagagtacttgtttcaaatcacagcaatcaactaactacacatgaagaattcaactcacttaaagtcatcaaactatatgattcaacacaatcctcaaaatgaacacaaggatttgcatctaactattcttaagcatttgcatctaactaatcaaatcgcaccatctgtgcaagaaagaagctaaaacgttcaagggtttttacctggtctggagaaaggtcacgttcaccatgaaagacaacaactttagagcattcagagaaacccaaatcataaaccctaaccatagaatcaaaagtaatcaaagccaccaagcaattctcaggcaactgttcaataacaaacaaaacatcactccgcacagctcttaactcatcctcaaccatagaagcatcaacaacaaacacaaacgcaggtccaagctcactaatcacaccaccaccacctccaacagtagaagaagcaagagaagaaaaagacgaattcgaaggcattgatctaaccccttgattaaacccattactccaactcgcagcagccgtcggagtcgtcgtatttgaacccgattgacgcgacggtagcggagagtattcaacggcgctataagtcggaaaaagctccgccgggagattagtttcagtgattccggagtaagaacgagggaaaaggtttttgtgaaaacaaaagggacaagaccagattcgagattggtaatcaacacgagcgtaagggtttaacacagctccacaacgagaacaaatcaatggatcataaggaatcgttggaagctcagagaagtgcatcaatggagtatacatgatacttaatggaacaacgagagattcgcaatcggattttgtagttggccatgagttccatgaccatcttaatccttcgatcgcttctagctctaagaaatccataactagatcttcgatttcactgattggggattttcaaatccgttttcatggatctgaaagtgttgttgaagattctcagatcaagtttgatttggtttctcggggaagtgagaatcggagtagagggtatcgccggagtttgtagatttttttccggccggcgaaggattagaaaacattctttgatatatatacactttcggagtctgtccatgagaagtagattcggttttatctaaaaaaagctacagtaagatttgggttctgtaaatttttattaacttatcaataaatattattaatttataaagacatttggctacttttataatttatcaaacatttcatttatcataaaagaatatttgccgttataatcaatatatttgaataaccaattacaaataaaactattattattgtttactaataaaacaaaattttggtttttatagttgtattgaagacaaaagaaggtgaaaaggactctactaaaaatttacaattgttttgtaatgatgtgttcgaagatcaaactagtttctatgaacttaaaatttttgaacttgtaaaatccaaacaccgcattgatcatcattagtataactttatgaagtattgagttcaaaaacttgatcgcatttttaaactcacagactctcaacaacatcgtaagcagagatgtgaaatgatggatagtcaattgatcatgatcaatgtggtgcggcttcacacaacagacctccgacatcactgaaactacaattattatcttttgaaaaaataacacaaattttttttatgtatttttagtaaaatattataaacgaactctacaaataattgatacaaatttaaggaatacattccaccaaaaaaaataaaaaaaaacaaataatattatagtcatgtttcactaaatattttttttatatatatatgcaaattataaataaactctactaaaaatgaatacaaattaatatatacattttgatttcttatttttttataattattaatttatgaaattgatgagaccatatatttatatagaattttttttaaaaaatactatcttattattctattcaaaaatttttaatattacattatccccaactcgggagcagagaaatttattaatttatagtgatgattaatttattgagtaataagttatagagatattatctaaaaagggggaaaatatataaattataaaaagttatatttttgaaagattttttatttttggtaaatattcatatattatatccgcaaataagcatatcaaagcaaaaaaccaaaattttttaggaatcaaaacaataacaatcatcttctataaatatagattataggatttcagtttcctcaaaattgtttttacatacatcacaatgtctatggcagagattttcgagagagttgacaaaaataaagatggaaaaatttcatgggacaaatttgaggaggccattcgcgttttttctcctaaaataacatctgaagaaattgataagatgttcatagttcttgttgttgatggtggcggtcaaattgatgatgtggagtttccttcatgcttgatggttaatggtggaggagaaaaagatgatcaagaagaagttgttatgaaaaaagtatacaatagaggaatgtgttgcgatggttaagccgttgataaagaaagtgatagttttattaactttgaagagtttaagattatgatgagctctaacaaagagtctttctgatcttactcaaaaatttaatagtttaattactttttggtattttatttgctttttagtttatgaactcggttttgatgattacgtttttatcaaattgtcaatgaattattttgtttgaaaaaaagcacatcaaagcaagtccatacaaaataatgtaaatttgatatcatcatttcagcctctatgcatttccaaattcgaaccaaagatacgtaagttatgttcattgacacaataccataaaacaataatttagacttcactatcttttgctaaaacaatataatcattattttcagcctcttttgtacacggtacgtgtttaaactttaaatcttcgttttgtaatactaacgtagttttacaagttaattacgagtttaaagatggatgttcaaaatttgttcaagcaattttttgtaattctcccgtcttgcaaaaatatcaataaatgggcttcacggcccatattattggagcccaacaagactcgtaaggaataatcaaaaagatctttcgtcttccctgagacggcgagaccaacacgaaaccgacgataggaacgccggtgaacgaagcaatgcttgggctttcttacggtgagctcttactcatcgtcggcgccacagctgctcttgtaggttagtctctcttcaatcgaaaagctttaccagctccgatctttgtgttcttctcccaaatttctctggaatcgaatgatttgagtgttaattggaagaatcaaatgtgaatctctgatttaacaggacccaaggatcttccgattattgctagagcaggaggaagattattcggacgagccattggttacatcaatatggctcgtggtcacttggatggtgtcatgaaacaacctcagatgcaagaggtttgattgtttcttcatcaacattgttttatctcaacatcattgttgtagtgaattcgaatgacatattccttgaagtcttgttgccttacattactctcgtacttggtttagatatcgaaagaagttcaagatttacgagcacaagtagatgcgattagccatggagcaagattttctctatttgattctagtcctttgactcgaagagtggataaccaaaaaactcaagaacctagtccaagcaccaccaatggtatagaaaacactcaatagtcattactctttcttgcatgttgttgttcatgatctggttttgttgtattttagggattgttacatccgttaatgttgaagaaaaacagaagcctgtagatcattatacaaaggtctttttgatgttatgatccttcttgatccattttttatttattgaattgtgaaattcacacttttgtatttttatgttcatataaggctcaagaatttagtggctcgtcgtcagcttctgttaacctgcacgctcaagcaacatcatttgcacgattatctgagacagtcaatggaaaaactcacagtctaaacagtgattcacctgttcttccagtatcagctgagatggcaaagttgcttcctcaacgcaaaggtagaatcttttatagcttgagtttagaaaccgaagttgctcactttattcccatatgtttggttgcagagagtgcaagag

SEQ ID NO: 825 - DNA, 87286 bp, Arabidopsis thaliana
gatctgatttaatgttagaggcggttcttgaagcggaagtagcacacaaggcgaaaagctttttcgcacaagccgagaaagaaactccagctttgaaaggtgagacaaaacaacctctttagtctatctgttgtacagttaagatcaaagcaaaaaaactcaaaactcgtattgattaaactcttttctttattcttgtgagtgttgcagggaagtttttcagtgacaggaaaggagaaaattgaactcaaaagttttggggaccatcatcgatcacaagacaccggcaaggtacaaaagagtaggccttgttatttaactgtttttttttttatgttcgatgagccaagaatctgagggacctttgtttctgatgcggcaacaagtgagctaaacttggagcgaagtcagttcactctttcatcttgtaattaatgcttccgctttataggtttaggttttgttgtttacttcggaggtttagtgtgagttggatttgcatagagttggttgggtttttttaaagagtagagatctattaaattttataaaattttgtgtatttttacaagtgtagttataaaaatccaatggacatccatggttttctcaaagttttcctttataaaagaaaattaaggttatgattaagttgtatcaagactatataagggtctctattgattcataaccactaagagagagttgggttaaagggaagcttttgcttaattaacaaaggtctataacatcccaacattattatttatagaagttttactgtatatacagtattagggtagctgttgtatagcttataatattcaatattgttactactttggaagtaaatattcatcagattcgtccaacaagaaacttgactaatatgtacctaccagaaattaaataataatgtttgcattttaaaataaaacatgttgtagtagcacaaattaacaaataaattggcttaaaacgcactatgcaatgaagagacgacaaccacaacacatatttaacatcaagatattctctcaaccaccactaattgttactattttaaagctaaaatattcatccaacaagaaacttgagttactcatataggtgatgtttgcatattgaaacaacacatttgtgtacaacatattaagaaagaaatggctggaaaaagtgatcttcctgtgatcgcgagagacgacaacctaagtgaagaaacaaaaactctgatctcttcacttcctacataccaagattctcatgtgaagctctgcaagtaccaaggatgttggtattaccacaacactctccaagcagtcatcaactaccaaagaaacttccagccgcaagacaccgacattattctcgcgtctttccccaaatccggtacaacttggctcaaggcactctcagtcgcaatcgtggagagatctaaacagccttttgatgatgatcccctcacacatcctttgctatccgataatcctcatggcatagtaccgttctttgagttcgatatgtatctcaaaacctcaacaccggacttaaccaagttctcaacatcatccccgaggctgttttcgactcacatgcctttacacaccttcaaagagggcctcaagggttctccatgcaaggttgtgtatatgtgcaggaacataaaggatgttttgatatcggattggcatttcaggtccaagtatagcaacaatgaagtatctagaagcactcttgagtcaatgttcgagtcattctgtggcggagttagcttctatggtccgttttgggaccatgctctaagctattggagaggcagcttggaaaaccccaagcatgtccttttcatgaggtacgaggaaatgaaaacagagccgtgtgtccaggtcaagaggcttgccgagtttttggggtttcctttcactaaggaagaagaagatagtggttcgattagcaaactcttggaactatgctctcttggtaatctgagcggtttggaggttaacaaaaccggaaaaacatggatgaactatgactacaaaagctatttccgcaaaggagaagttggtgactggaagaatcatctaactcccgaaatggagaacaaaatcgacatgatcatcgaggagaaattaaaaggttcggacttgaagttctagattcgtgttctttgtggtttgtagcttttcacatatgcattataataaaactaccttctgtttcttatgttcctttgatttatgagtattgactgtctttcaataaaataatgcatagtgattggcccaaaaatcaaaagtgtgaatttgacacaactccatgtatattcataatacaactatttcaagatatgatgattgcccgagtaaataccgatacacctaaccgtaaaggcacaataaaatgtgtggtataatagattattactactaacaaaaaagttatagtataactttattattttaacagctcatttattttacataattcgttttttgtttattcatttttttatgattataagtaacaaaaatatgcactaaatgaatgtttaaatttattttaacataaaataaatagtgttgcttatatggatgcttagatggacaccctaaatggagagaggactctcctattatatatatacaggttaaacattatgcaatgaaaccaaagtttttcatttcaaatcgaacccaaagtcttgccacaattcaaataaaaactacaatatagaatatggattgatgattgttatttgcttccatatttcaaaactatatgatctatctcttgtaactcttaaactgtttgttttctagtttgcactctagaattggtcttatattgttagtttgttaccgactttttgtagaatatcagttatactagtctcatgtatatttacaaaattttgtaataaattcatataattttacttagtcaataactggactttttccttgtaatttgataagtatttatttggctggtaacaaaaacaaaataattagtaatttacagtagatccctttatataactattgtatctagaaatagttgtacttctacgtattggggagtaccccgagttttgtgtaacaacttccgctatatattgtaaagtaaaaaaataccaatgaagtttgctttccttatctgcctaattgttacatcaggtaaaatttatatttcacgtgtgaagcaaataacaaaaatctatatacaaaatttgttatttatagtttctgattttgtagtgatgagtatcgttactgttcgaaatgttgaggcgaaaaggttattacttgaagaaattcctcagttgcatcatgaaggttcgccgcaggtagtgaaattactggatgatgactgcatggatggatgtcatatgaaatgtattcctaacaacagaattactccttgtttatgtctatgttaattttccgttttcttttttgaataagatatgttttcactaataataaaactttgttgcatagtccatacaaaaaatattgaacattatgtaaaaaaattcaaaaaagatagttaagaacaaattcaacatggaagaggtgatgcctaatttttcatcaaaccagccaccattagaataatcactaggatgatataaaagcatatatattgcccaccaactataacttatgaagctgtatatgtatgatcatgtgtgtagctgttttatatcatttattggatccaacggtggatcaatccaacatagagtccaaaagaaccggaaccggagagaatgccatgaaccggtttgttgttagatacgtctcattttcagtatttgatttctagctaaataagctagtcatgaacttaaatctctaacgccaaccatgcaatgaaaccaacttttcacatttcaaatcgaacccaaagtcttgtcgtctaccgtgtaacaataaataccaaactcactacctttaaaattctcctttttgagaccaattcggataaaaccaacaatctcctaaatgttcacttcccaaatgtcgtaatccataaatcatactcaagaagaaggatttagactattaggaggtcatgtgccaaaaataacataatactaatgataaattaatcacaaatatttaagcaccatttagaatcatcaatcacagtggattagtgttggatttgattctattgaaatccatgactgaataataccccttaatgtgtaacgattcaaaactttttctacagaaaaaaaaaatttgaaatcgagactaaacaaacttaggataaaaaaatagtcttgaacataggttttcaaatttggtcctccaaagagattaggttaggtttggtttacattggttcactaaagcatgacaagtacataaactgccttgctgtagtaacatgaaaacaaagtcagagagaaatcaaaacccaaaacgataagaccccatagataatgaactgtctaaagacaaaaccttttggcaagatttcttgtcagtttgttcctggattcatatatataaagatcattagaagtttcatagagacagagagacaaattaagttgggactttcatgaaaactagtaaagaaaaacaaatagtataattttaactcaaatactatttgtttttctttactaatactctcgaaagtcccaactcaaatactagttggacacacatgaagctaccaatcagacccaatgaaactcaaaatcttatcctccaaacacagaaaaaaagactatgaatatgtttgactttagacagctagagtttcaactcaattgactaggatgatctaatcctgatatcacatgaaccacaaatagatgaaagagtaagttcttggctttaagagagagagagagaggtgacaaatgcatatggcagaccacagtacatgtaatgcttaccctacaataactcaatgcttgaacaaaagagaaaggttttttatattctgcacatgagtgtaccatactctaccccacttccttgaattagggctacagagaaatgaatctagaccgtcctctaaaatcaaagaaagtatctttctttgtgttgaagatgaaagtgtcccacaaatgtccccaaaatgatgggacacactttgcctcaaagttgctgctactgtttactacccgacagctttagcttttgcctttgtccttaaatcaagttaatcccattttttctaaattaccaaaaaagtgacttttcaattcctataaaacaatcttcttcacaaagcctcttatctcatcaacaagtctttctctctctctagacaaccacaagaacacaaaacacacaaaaacaaagaggttctttctttgaagaagaaatggaaaaagttgatgtttatgatgagcttgttaacctaaaggcaacagagctgagattgggattaccagggacagaagaaactgtttcttgtggaaaaagcaacaaaagagttttacctgaagctactgagaaagagattgaatccactggaaaaactgaaaccgcttctcctccaaagtaagtgtttgaatcaaatacaacttctctgaaaatgtgtgttgagttgtgaatctgatctaatctaatctatgctatttcttgttttatagggctcagattgttggatggccaccagttagatcttacagaaagaacaatgttcagacaaagaagagtgaatctgaaggtcaaggaaactatgtgaaagtaagtatggatggtgctccatatctaaggaagatagatctaacgatgtataaacaatatccagagttgatgaaatcacttgaaaacatgtttaaattctctgtgggagaatattttgagagagaaggatataaaggctcagactttgtacctacttatgaagacaaagatggtgattggatgcttgttggtgatgttccttgggagtaagtacaaattttcatttatctctcaaattagttaacttatgacacaatcttgtttatgtatttatggtgttttgttgttattgcaggatgtttgtttcgtcttgtaagaggctaaggatcatgaaaggatctgaagttaaaggtttaggttgtggtggtctttaacaaacctaattgagagataaagatcaaagagaaagattcaaaaacagagttttttgttctgtttcttgaaacagagtaaatatagctctgaaactgctcgggttcttggggagagatgtttcatacaatcatactttgtgaatgtttacctcatcggtaaaaagagagatgcttaaaatggtcttaagcataaaagtgtgagaaagatctaaatctaaactttagctgtaactctgtctccattaaagagaaaggttttgtggtattagaaagatctaatctgaagattatctttgtgtttttcactttttataatgttcttatcgaacaactttgatgtttttgatgtaattacccatttttctgttctgtttctcttcaaattaagatctgtctttacaaaactgtaacacagaacattaaacctaacttgtagatgaacacaacgaagacaaatcattaaaccaaagctgctttatggtaaaaataataatcccagcttctaaacatatatcattggattctagtttctttaaacttagattatacatgtttagtcaccaagattaaagaaataagaaatctaatcgagcagtgagaatatttttggggctttggaaatgtttatattatcttttgttgttaccaactgtgactttggtcccccataccttaaacaagtaaatctacccaactgtgctaatttgtctccactatcacttataataatctatgaaccttggaactagagtaatattttaaaatggtatagataggttcattgaatttaggtttttcctttgtgcaccaacaatttttacattcatacctaatgttcttgatgcaagatgattattaagtcaagaattttaccaaatacttaaacctagttgtctcgatgatgatgatgatgattatgatgagacaacaatcgatcaacaaaagaaggattcaagattcttgatgagattggaaaactgaatctatatttctaacaaaagtttttgtaatcttcttctgtggaacatatatataaatgagagatttaagaagagtatgatctttgatcatcagtttctgactctaacaaggttagctcttgacctgtttggtcgttgctactaccaccagagattgtcattattggttcagactgagaagtaaatccttcttcttcctgtggtctcttctccactgtttgatccgagattaacacaattgaactgcttgtaactaccggtttaggttgattaacatcttcacgatctgtcttctccggtagaacatacgaaaaaccatatttctgagcatgtgttagtcctggacataaaccctacaaaaaccccaaaacaaaagaaactgactttgatgaaagaaagaaatatttttatttctggtactggcctttatcaaaccggtaactggaaaagattcgtggtaaggaatccgaaagaaagaaagaaacatttttatttctggtactgacctttatcaaaccggtaactggaaaagattcgtggtaaggaatccgaaagaaagaaagaaacatttttatttctggtactgacctttatcaaaccggtaactggaaaagattcgtggtaaggataatcgttactgtgatcatcgttactactgtcttctccaaggacttcttgttctagttttgtggaattgcttggacagtatccaccaaagtaagagcaatgttcccgagctagagatatttgtggtgttattggtaagagatgaccctcagtactgaagatgtacctgaagattaagtaaaattatcaagattagtgaattgttgtggtgtttgtgaaaatcaagaggttaatgtggaggagatatttatacttgtaagggccattgtctacgaggttatccgagtcaacagctaagtcaaagagtagccataagtacttcacctgaaatatttttgaaacaaaaacaagtcaaggctttaaggtaagcaagtaaatgcatattgagaaacagagcttttcatgtattttaccgtttctgcgaggaagaagctctccatgtgatcttcttgtttatgcagttctacatctgtgatgtgacaataaccgcaaggacattttgccccgtattgcaaactagccacaaagtcacgtcctgcatcaagatacctgtcgacgagtaatttgcattgtgcaattcagtagtgtgatcatctttggatgaagaattgaaaaaaatataactaattaatttggtgacctgggatctctggtagctttgtacaaccagtatgtactctcgattaattccggccttaagggataactcttttgcccatactgtaaggaaaatgaagaatagatatgaagctgtaacatcatagtgccatcagacgtaataagtgacaagtgatcacagagacacttaaaattaagatagagtacctggacactaagtgtagcaagattaaaaccctcaggggtgaaaccatatcgtttccagacgctaaagaaggcagtgtgagttcttattgctggatcaacgtctccagctaaaaccttttgagagagaaacatagatacaaaatcatagttaaattttccagcctgaaatatattaacaatttggtcaaacgtagaatcactatttacctgaagtcctggccagaaagcttgaaggctgttaaatactggccagacaatagctgcggaatccatattgacttctacatacctacgacaaaactagaaaaaacagtaagtccaaacaaaggaattgtttgttcttgtttctctatcatacaagatacagaaagcttaccaaggatccttgtgaaggtactgcattgcagatctataagcttcttgaaaaatgtatagatattcctcatccccaaatagtatataagcctgaaattgtcaaatcaaacaaaagtaaagcgaggagtctaggactatatcaatgccgctcaagttttatgcaaagttgaagaagaacagaaactatttttttctggatttctaggacttggccattatatccaaataattcaaatatcttgtcaagggctacgtttactaaccttgagtagatactcatagaaggaatcaatgcttgttcctataccagcatcctgccaagtaaacactaccattttagaatttgggtgacaaaaaaagactaattagtttgttgaagcaaagttcatcaaaccgtagttcttctgacatatacagaagccattttttgttaccttctgtgtccattcacctgtaaagacattgatgtgagcaccaaccaagtcgagatttgaacgacgtgcccatagtcccctcaccgcattctttgcaacttgttcgaaaacttcaaatttaacaaagttggcccatgtaagagcacgtaagaaacacaacaaactatgaaaatcaaaattacatctcttggaaatcccaacgaaaatgatagaagagtaaagagagctaaagagaagtatttctcaaggactaacagatttatgatatatctcagtgactaaactggtttactcaccaggatcatttgttaaacgactaagcacgccaaactctaaagacaaagtaccaccaccggcagttgatgttatctgaacaaacaaacaaagatgcatgaataaatgagtttccaatataggaatcaaaagataagatcagcaagcagaaaatgagcagtttaatctcaactctctttaactcgttgagacctagcaaagataggaaaaccaagcatttcggtatcatttatattaatatgcactccagtcacggcaccaatagcacagatgaacaaattaaataagtaagaataagatgtgaaagctatgagaaggtaaaagaagatggtttgccttgctttcatgtttgtcaacaccgtacatcaaattcacagatccaaatgggattcctgtagaaaataacaagtgaagaaggagatgacaaggcaattctcgctttcatatatgcacgtgtataactaaaagagcataccagtcggtgtatcaaatgcaggaagcattctccgtgccaaattctcagccaaaactagtaattcattgttgtaagatggaattctcatgccctgtcatcagattagattcaaattcaatcttacatgacaaacaaccaaaaccactttaataaggagatttttagactttggaagcccgataagacaattaggaatcctaagactagtttgcagaataagctcatataaagcctaacacattatagagcgcaaaaaaatacttatctcttctggctgaagaatatacaagtaccctcacataagataaaatcatgacgaaagatatagccacgcagaaaaaaacgtaccgttgcataatcacttgcaatcagatgagcagatagtaaccccccaaggactcggatagttgtctcaaacacagagactgttttattctgcagttaaaaagacatgtatcatttcatcaacttcactgccaggctacatcatacaaaagttctaaaaggagtatttgagaaaataacaattataacttgatcttgctagagaagccaaaaccaatcattactcactatattaaactgaagatttttaccaatccattcaacagaagaagtgaagcgctctcggtcaccaagtaaagctaatgtatccaacgagtcaatctacacaaatgccaccaaaaccattgtcaagttttacataagacaaagccttacacaagagaaggttatatattaaagcttaccagagtcaacgcatagcctccaagagtatcttctccttggcaagataacggtctcaattcatcgagtggaaacgcattgttcatatatccatcaaaggcatgataaaacatcccacgtacctacactcaatgtgatcaaacccatcatcaaataaggtaattatcgaacaaaaaggtcaaagctgcaactccactatcaaaccaagtgatctcagctagttattgtgtgcaaaacaactaaatgttcttctctaacggctaaaggacttacctttacgacataattaacatcaatgagtaattacaacatccaaagatcaagactttaagtgtcccagaagactaaattgttctaatactcaatttggggacaactgataaaccaatcgatgaccaaaatcgaaatccagatctgtggaggaatgttacctcgtctctaagctgtttagcttcatcaggcttaacactttcagcgagaactccatggtgaagaacaaaacccgaaaatgtcagagagatcaagatggcaaacaaaagccacttgaaatttgagtccatcaataaaagctattttggggagtttcgttaatgtgttgaatgaatcttctcagacatcactctggatctctgctcttgtccgaggagattcttgagtttttcaactgcgtcactcggtgcctcgtccttcaatcacaattcaacaaatcaataaatctttgggtttttcttaacatttattttattttatttttgttttttcagccattaattattgaattatttttgttcgttgtagttaatgttcatttctcttgaattattaataaattagattttagattatgatcagttcaatataacatatatcagttctctaaatttattgttttaccgcaagaacgctaaacaatttcattctctcagaaaattttggttaaaaaatagttgcattagaaagaatgaaattgtttatgtacattgtattaaaaacgttgattggcaaaaccaaaacttgctaacaacttaatttattttttgcagtcaaacatttcttctcatttctaaaaactaattgtaaattttttatttagaataaagttttcattctttgcttttttgggtgcaaaaattatcatttcttcacttatttgttttcctcaaaaactatttaattcggacaatctaaaaaagacaagtatcttaactgaaaaaactgattcaagggaaaaaaattatcaatggtcaattgtgctggtaaaaaagctccatgaaagactcaaatgggagtttatacccaaaaactttagagtttcatttcaaaagctaaaaacaacaaacacatatctctctgaattccatgaccacaacaaaaatctatataaatttcatatatctgcattagatcccagtagagtaattggaactgatgaagagtgtgtagtgtttggagaagccgagtatccgatcactgcaaaaacagcaaagagaagaatcaaacactatggtcacagctcgcaagatatttgatgagatgctattcaaagatttgtttcctacaaattaactcgtaggtaagtaaaccgacctgttgcttcttcttcttaggccttctcttccttttgggtttatgagcatcagaattggagctcaagttgctactctgactgctatatgaattcgccgcagaagcccttgcattatatgaagactcacttcttctgtttgaagtgttgtttctcgaggatgatggcatctcattcctctgtacatataaattcttcctagaatttgattcaaaccttgcttgtggtggtggcattaaagctctatcagagttttgcttctacatatattttgaaacattcaaacatgtaaataggaatttgtcatataaaccatgtctctggtaacaagtggcatcaccattcatcatacctgattccgttcatcactagacatgccagaagttgctctaccagaagcactagaagcagcctccctaagaaatatagtcagaaattctctgtatcagaaagcttcaattaaaagtattgacgtctaaaagaaagtattccacatttcacctactttgcgcttttatcagtcaattcatcatctgcgtctgcttcatcgcttgaactccctttatcaaagaaatcatcatcactaaggtccagaagaccatcatcttcactccccgtctctgtttgtccacaacaatagcataaatcatcctttattagctacgacctacgatacttaatagttccagggaaaaaagggaaacaaataagcatctatatatagcacatgtgtttaccttctaactccttcccactagcagcagcaacaataatattggctttgatctgctgccgcattttacctctcttctcaattacttctgaatcctcagctccagtaaaaagtgatacatatttctcatttttcgggaagaactacaatagttatatataggaccaacagacattctcaacttagctcattctaaatcatataactaacaagcagagaaggataaaaagaagtgaatttacccgaacatattcaagatcttctttgagtttactgagttgctcagctatatctacatctcccacatgagcagatgaagtacgttgtaacttctcaagacgtctaatgcttctttcgatctttctccgctctattcaagaaaaaaaaaagtctctaaactttcaggcaccatttctaattaattcctgactaaatgcaaggtaaaagctcttcttaccaaagaacttaatctttctgttcctaaagaatattttacgttcaacagcaagacgggcatgagcgtcttgctgcttcttcaaatcttccaacttctctactagagactctcttacttcaggaggcaaatcctataaaagtatcaaatacatcaacattcaatattctcatatggggtttgcttctaatagaccatagattatcaaattctctacaaaaacacaacctagaaatgacattatcaaccttaagctctacactagacaagctaactgagtcaccagaaagaccggaacttaaacacaaattctaccaaaaaacactaatttacagagaaaaggaactgactttacgaagaaagcgttcaacagaacgcatctgattcttgatggagacagtcttaggtttcttctctacacgcaatactttcgacctccgactgcttcccgccgtctgttttggttccgaatcccttctcttggcatagcctccgtgcgccatggctgaaggagtttgctaaagctttttagaagttgaagaaggaggaagagttgagagaccaaaattaggggttgtgttttttcttctttgttcggcgttagttactcttcaatcggacgtcgaaacgctgcgtattagggagataaacaactaggttgaaccggattattttctgggttaaccggtatgtcggaatgtgatattagtttatggaaattccagttttgccctaggtcgcttaatcgtttcgtcagaaatcgatttcgtgtttgattgctcgatttttagatttatcagaatttgtatatcaaaatcgagcgaacgaagatctccggattgctgcactctgctacatgcctttcgaatccgtttactgcatcgccggagaagtaggaatctgtttacttacctttggaatccatcctcatccctctccgtctagtgtgatgcagcagttaggcactagtgcagtgacatctaagtttaaacagacttttttcttcaaaatgcgacattttcttctgatgtctgcaggtacgcttggttcctacttgtacttggtgagaatatctgtagacagttttatgtgttctgaatgtcgcatttgactaatgtctgccatgtgtgttactttgtgtgtgctctagcctctatgtcctgaatttgttacgtgtaattagactaccggaaggaagagaagatttcgaaagagagaattttgctcttcttattttatcgcttagtagtatatttcactttgtggatatcaaacttctgacttttattgactatcactacatttaataaactggttgatctcatttaaacaattattggtgacgattgcagtttcttggaagctgccactctcaataaactaatagaaattgttgtcttgacttttaatttcttgatacagtacggttgtatacctctttctctccccccattcaccctcttcgatcgtgttgtttcttgcatcgccttggcagtaatctcgggggtttctttcttaaagtttgtgcaaaatggtggactggctttcactattaccctggaataaaatcttcactgctgcatgtggctgctttttaagcgatagcaactacattcacttgatggagtcaaatctcgatgctctgcagaaaactatggaagaacttaagaatgggcgagatgatctgttagcaagagtttccatagaagaagataaaggtttgcaacggcttgctctagtcaacggatggctttcaagggtacaaattgttgaatccgaattcaaggatctgcttgaggctatgtcaatcgaaactggaagattgtgtctatttggatattgttctgaggattgcatatcaagctacaattatggtggaaaggtaatgaagaatttggaagaagttaaagaacttctatctaaaaagaattttgaagtggtggcgcagaaaatcatacctaaggcagagaagaagcatatacaaaccacagttggtttggatacaatggttggaatagcatgggaaagcctcatagacgatgaaataagaaccttgggtctttatggtatggggggaataggaaaaaccaccctcttagaaagtctcaacaacaaatttgttgaactggagagtgaatttgatgtagtgatatgggttgtggtatctaaagactttcagttggagggcattcaagatcagattctggggagattacgtcctgacaaggaatgggaaagagaaacagaaagtaagaaagcctctctcataaacaataaccttaagagaaagaaatttgtgttgttgttggatgatctctggagcgaagtagatctaattaagataggagttccacctccaagtcgagaaaatggatcgaagatagttttcaccacacgttcaaaggaagtttgcaagcacatgaaagctgacaagcagataaaagttgactgtttgtcaccagatgaagcgtgggaattgtttcgactcactgttggagatatcatattaaggagccatcaagatattcccgcacttgcaagaatagttgctgcaaaatgccatggcttgccacttgcactcaatgtcattggcaaagccatggtatgtaaagagactgtacaagaatggcgtcatgcgattaatgttctgaattcgcctggccacaagtttccaggtatggaagaaagaattcttcccattttgaagttcagttatgatagcttaaagaatggtgaaatcaaattgtgcttcctatattgttctctgtttcctgaagattttgaaatagagaaggataagttgatagaatattggatttgcgaaggatatataaatccgaacagatatgaagatggaggtactaaccaaggttatgatataattggcttgttagttcgtgcacatttgttgattgaatgtgaactcacagacaaagttaaaatgcatgatgtgatacgtgagatggctctttggataaattctgacttcggaaatcagcaagaaacaatttgtgtgaaatctggtgctcatgtacgtctgataccaaatgacatcagttgggagattgtgagacagatgtctttaattagtactcaggttgagaagatagcttgcagtcccaactgccccaacctttcaaccctattactcccatataacaagttggtggatatttcagttggattctttctgtttatgccaaaacttgtggtcttggatctttctacaaactggagtcttattgaattgccggaagaaatttctaacctaggctccctgcaatatctcaatttatcactcacagggataaaatcgctaccagttggtctgaagaagttgaggaaactaatctacttgaatctggagttcactaatgtacttgagagtcttgttggaatagcaacaactttaccaaatctgcaagtgttgaaattattttattctcttttttgtgttgatgacataattatggaggaactacagcgcttgaagcacttgaagattttaacagcaaccatagaggatgccatgattttggaaagggtacaaggagttgaccgattggcgagtagtattcgaggtttatgtctaagaaacatgtcagcacctcgtgtaatattaaactcggtagctctgggaggtcttcaacaacttggaattgtgagctgcaacatatctgagatagagatagattggttaagcaaagaaagaagggatcatcgatctacaagttctccaggcttcaagcaactcgccagtattactgtaatcggtttggtagggccaagggatttgtcatggctgttatttgctcaaaatctgaaggatatacaagtgcaatattcaccaacaatagaagaaataataaataagcagaaaggaatgagtattaccaaagtgcatcgagatattgttgttccctttgggaagctggaatcccttcatctatatcaattggctgagcttacagaaatctgctggaattatcagactcttcctaaccttagagaatcctatgtcaattattgtccaaagctacttgaagatatagctaattttcccaagctgaaagggtgatgacaagtggtcaaatgctaaaccgaatgaagaaatcgattagagtaccaattgttcctttgtttcatgtgcttcctgaaaagtatgcatttgtttcctatataaatgaaaaagccaaaaaaaaaaaggcagagaaatttgcctgaactatttttgttcttgtgttttttaattcatgctttgagtgggaccttatcattggggcttaagaatgggagaaagatgcttctacgcaaatggatggtctctcccatgaacaggttggaaataaagccattacagaacaaggtctctttatctctctcctgcttgctttgctcccactttgtgtaactgcactgcatcctctcagttcttaatttggttttttatgtatatgtactgcttttgtttcaatgacctcttgttatccagttacatttctcaaagtttaaacgttctcctctccacagtgtgaattcaaagatttgttggtttgtttttgtcatgttctgtgttgtctccgaagtaacgagctagagttttataaggagggcatagatggcgttgatgtttctgaattaagctaggtttagatccatgggacatggtgaaaatataaaatactatattgttcttagaagttagaacgttcattgattatgctgagatcggataagggtttcggttgctggtggctgtgaggaggcagatcgcttcgtttcctagtcgggtatagtgcttctctctctctctcgtctccttttctccaggatatttgtttgctataggactgtgttggtgtttggttctagtgtggcttccatcaatggttttgtttggttttgatgttactttagatcggctgctgtatatggagactaattattggagtttacgttcgtgtgttgtgaacttgttatgaatgtattgattggtatatatagagtggatgtttcaaaaagctttgcattttttagttgttctcatgaactagattgtatttctgggagttaacaacgatgctttatctcataatggttttggatttgtggttcatgtggttgcttttagtggctttggtctgggagaaactttcatattttcggataaaagagctcaaggatgtgctcactcagctgggactttcgaaacagggaaagaagcaggttaggttctttctacttatcttccatttgtcgtgactatggttgtgattcttgtaaagaagatgatgtttcagattgttatcattggacctttaacatgttccggttataatttatttgtcttgaataagaagaaggcttcgaagaggcaatgcataaggaaggatggagtttttcattttcatctccaagactgagttcagttcatgatatatgttcgtaacaaaaagaagtttcaattattctaatcatttgttttgaactcagtttctatattttggtttctctgatatcagtaatcttagtgatgaaagccatatagaatgtgataaacaagtagagcatcaatggttatgaacagtttttttttgtctttccttgttagattaataccgagatattctgtgctgaagttgtagtagtacataaagaaattgtgttattgatttactactgaactaagtttctccacctgacttaataagcttgatttgttatgatataacatataactagctgtggttttgtatatatgaattggttattgtcgtatctataataatgatgatcctggttgctctgcttttacaccaaacaatcagtttcaattaaaataaaacacttttacaagatatttaaaaccaaaatttacagcccgaaaaataaaaccaaaaaaaaacaaaaagagaagattttagtttgtggatatcagagttctgacttttcttgaagctaccactactttaaataaaatcgtaaatctcatataaacaattattggttgcagtgatattagaagaacaaacatttcgggacgaagacgaaactctatgtcagtggtaagttagttcccttccttgtttaagttttgttctatgtttatgtttccaattcttcatcttgcatatcccaattctgtattccaattctgtattggtactttttgctcatacaattgaaaatcttcactatttcattgagtattatgtatgcaaatacttgtaaaatatagcaaaatagtttcaaatctagttgagatatagtaaaatggtttcgttaccagtaaaatatttggtgtaaacaatttaaatttagctcagaaaattggtttcatattgaagataacatatcccaaatctattcaaattttacttattttgtttcgaacataagtttgattaaattttggataaaagtaattatattatgctatgtatgatatatatatatatatatatatgtatatcagtttacatatacatttatttgaaacaagatttatttgtttaagttcaagaaattcattaacctaaaaccaaactcattttataataactaagtataaaaattttattaataactttttttttggtttggtcacacaagtttagaacaaaatttttgtcacacaagtttagaacaaattggtgttaataaatttgattcattttaaatccaaaacttctaaagtttgaacaaatttgaacaaaaaataaaataaaatgggctatgttttacataacaatttctaatgacaatgaaatttattttttatatcacaaaaaaaaaactaaattctgaaagaaaaaaaattgtaaactcaaatttggaaaagataaattacaaactaagttgttttatttatgtcttaatataatagtttatttggaatttattttgtatttatttggtttaataatgataggggttattttaccattttaaaaaaggtgagggttttttacatgtttttggaaaaacggaggatttttttacccattttcccaccgttgagagctacttgtcattgagttactataagcttaagatatctccaaaatatttggagcagtcaaatttgtggtcaccaaattatgtagttaacattgttatatgttaaaccttgcgttatagctttaattgttagagagaatggaattaaatagcctcactagttgtattccactttctctcccccattcatcgccttctttcttgcattacttggcagtaatcccggggggtttctttcttaaagtttgtgcaaaatgctgggctggcttgtaataccctggaatcaaatcttcactgctgcatgtggctgctttctaagcgatagaaactacattcacatgatggagtcaaatctcgatgctctgcagaaaactatggaagaacttaagaatggacgagatgacctgttaggaagagtttccatagaagaagataaaggtttgcaacgacttgctcaagtcaatggatggctttccagggtacaaattgttgaatccgaattcaaggatctgcttgaggctatgtcaatcgaaaccggaagattgtgtttgttgggatattgctctgaggattgcatatcaagctacaattatggtgaaaaggtatcgaagatgttggaagaagttaaagaacttctatctaaaaaagattttagaatggtcgcgcaggaaattatacataaggtggagaagaagcttatccaaaccacagttggtttggataaactggtggaaatggcgtggagcagcctgatgaacgatgaaataggaaccttgggactttatggtatggggggagtaggaaaaaccaccctcttagaaagtctcaacaacaaatttgttgaactggagagtgaatttgatgtagtgatatgggttgtggtatctaaagactttcagttcgagggcattcaagatcagattctgggaagattacgttctgacaaggaatgggaaagagaaacagaaagtaagaaagcctctctcatatacaataaccttgagagaaagaaatttgtgttgttgttggatgatctctggagtgaagtagatatgactaagataggagttccacctccaactcgagaaaatggatcgaagattgttttcaccactcgttcaacggaagtttgcaagcacatgaaagctgacaagcagataaaagttgcttgtttgtccccagatgaagcgtgggaattgtttcgacttactgttggagatatcatattaaggagccatcaagatattcccgcacttgcaagaatagttgctgcaaaatgccatggcttgccacttgcactcaatgtcattggcaaagccatgtcatgtaaagaaactatacaagaatggtctcatgcgattaatgttctgaattcggctggccacgagtttccaggtatggaagaaagaattcttcccattttgaagttcagttatgatagcttgaagaatggtgaaatcaaattgtgcttcctatattgttctctgtttcctgaagattctgaaataccgaaggagaagtggatagaatactggatatgcgaaggatttataaatccaaacagatatgaagatggaggtaccaaccatggttatgatataattggcttgttagttcgtgcacatttgttgattgaatgtgaactcacagacaacgttaaaatgcatgatgtgatacgtgagatggctctttggataaattctgacttcggaaaacaacaagaaacaatctgtgtgaaatctggtgctcatgtacgtatgataccgaatgacatcaattgggagattgtgagaacgatgtcttttacttgtactcagattaagaagatatcttgtcgttccaaatgccccaacctttcaacccttttaatcctagataacaggttgttggtgaaaatttcaaatagattctttcggtttatgccaaaacttgtggtcttggatctttctgcaaacctcgatcttattaaattgccggaagaaatttctaacctaggttccctgcaatatctcaatatatcactcacagggataaaatcgctaccagttggtctgaagaagttgaggaaactaatctacttgaatctggagttcactggtgtacatgggagtcttgttgggatagcagcaaccttaccaaatctgcaagtgttgaaattcttttattcctgtgtttatgttgatgacatattaatgaaggaattacaagacttggagcacttgaagattttaacagcaaacgtaaaggatgtcacgattttggaaaggatacaaggagatgacagattggcgagtagtattcgaagtttatgtctagaagatatgtcaacacctcgtgtaatattaagcacgatagctctgggaggtcttcaacaacttgcaattctgatgtgcaacatatccgagataaggatagattgggaaagcaaagaaagaagggagctttcaccaacggagattcttccatctacaggttctccaggcttcaagcaactctccactgtttatataaaccagttggaagggcaaagggatttgtcatggctgttatatgctcaaaatctaaagaaactagaagtgtgctggtcaccacaaatagaagaaataataaataaggagaaaggaatgaatattaccaaactgcatcgagatattgttgttccatttgggaacctggaagaccttgcgctacgtcaaatggcggacctcacggaaatttgctggaattatcggactctccctaaccttagaaaatcatatatcaacgattgtccaaagctacctgaagatattttcgtgcctctgcttcctgaaaagagtccttcacgtttttttttcttttaagtctatgtatgcatttgcttccttgtgtgtaggaacgtgtagttccaattttgtttcctaatatattataaatgaaaaagccaaaaaaaaaaaggcagagaaatttgcctgaagaatttttgttcttgtgtttttttctttcatgctttgattgggaccttatcagtggagattaagaatgggagaaagctgtttctacgaaaattaatggtctatctcatgtaaagtttggaataaagccattacagaagtggcctctatatatctctcatgcttgctctgctcccactttgtgtaactacatcctcgtagttcttaatttggtttgtatttatatgttctgtgttgtctcctaagtaacgagctagttttagatggcgttgatgtttctggatcgagctagttttacatccatgggagacggtgaaataataaaatacaagattgttcttagaagttagaacgttcattgatttctaagtgactccatgtagcccccaccacaagcaattcagttcggaactatggcaatatccaatactttttttgaaaaaaaatgctcttttccaaaactctggaatgttttacaaaacattactgatgatgaataaaaaaataatctagagttggagacatgtagatgtaggctttaagagagggaaaaagaactaaaatcattacaaagacttatttttatttggggtcaaaggatttgtttctttgtacaaattcaacgacttatttgatgtttgcatttgtgagtcagtctcattgcccaatgtcgcttggtgtgtaagaaactataacatatgtggtatatgagattgtatatatattcatagtgtgattggttggtctccttcaagctctgatataacaatcaatgagtcatccatttcgagggagagaggttcattctttggaaccggattgatcatctgcaaccacagaaaaaacctagttatcaagcgctagtgaagaggaagacgttaatgtttgttgcaaaagaataaaacactaacctttttaccgcctttaatgtagcctatggcgacttctctccttagccaagctcgctctgagagctcagtgaatgaagggttctccccctctttcatgtacagttcaacgtcctgtgtgtttcaaagcaaactcgagattctcagaccacaattattttgaattttgtgaaagatactggcaaaaaccatttgaaggtttcttttctaacctttacgtatatctcatcaccatctgcgtctagaatgtccttccacacctcgttcagttcgctgttttcagcaactggttataaagaaaagggtattactattgtctgaattgtgggtagataaacaagaaacaaaatcgaatatagatataatgtaaccttgtgctgttacgagactcataacttcctctgctgctatgaaagttagggacggcttgagtcctgttatctgtatggttttgtataatgtttcagcaacttaaccataaagaagccaagaggaaaaagataaaatcaagatgccttgtaatacctgcttgccgagttttgagtcgacgatttcagaggctagattatgcacctaaagaaacaacaaaagtaagatgaattttacctatgcaatgttgttaggattcgatgaaaagctaaaagattacttttactccaagcttgttgcagatgctttcagcgaggagaagagagtaagcggattgtttgtctgctctagatggatctaagtgacatcaaattatttgttagtgttaccattattgcaaaagacagagtcaagaagaactagttgcgatcacgaatgcttacctcctagaagccagtcacgatccgatatgacaaggatggtcaaaggaatatttttgccttttctatatttacttttcatacgcattatagtttgctttaatgtatcataattcagaggattcccaacctgcagaagattgggaaacatcaatacacaatgacttcgaacctcttcttgttcatgccactgaaaatgacatttaccttatgtgaaacttggatgttcttgattttaactgaacctatactatcacccacccttcttctgtcctctaacgatacatccgataatatttcctgtgtacggaaaactattagtaactcattaagtcagagccaagcggagagagatcataccattgaactgcctggaccaagatagttatcaaactcctcaatcatttgcacaacgtctccacgccaaccaagtaaaagtatagattctgtgggtcctttgacggaatctgatccctgtgtaaaccatagaaatgaaaatcagaggtctcaaaagtttcaaaggcgcagtttcaaaagtattgtagggggcagttgggagtcagacctttgataaggacttacgaggacgcattataatcttcgatagccgtgatctttttttctcaaacacttgcttccgagtatcagtcggtactgtaatgttctcaagtttcatgtctgtatataatagttgcttctttttccaattgagaggtgcgataaacaatagtttgtcggtttccatgagctcttcgttatcatttgggtggaaatttactttcccatctcgtaaaaggccacagaccacaacctgacaggaatacatgtagaaaatggaattagtagcaaagatcaaaaggtactgattcgaagaacgaaaaaacaatgctcacaagatagtcaatcctacctcctggaaccccagtcttagttgtctatactttgtcccaactagattggggaagctgcaaagattaaatacattttctgcaacaagtagacttggtattaattagtcttgactacaaacatgaactaaaaattctatacagataacagtaaagtaagctgaaagcacaccgtacttgagtaatttagtaggtgcctgtagatctttataaggtctttttgacgtgagcattggacaaacaatttggacgtaacattttcaaccggctccactttcaatcccgaaatggacttgagaagatcgtacgtattaggacttgatacctgcattcatttccacaaacaagaaaggaaaagggtcagcattataaacagagaaccattactgcacaatcttgagttacctattttacctctactatggttgggatcgattccatcttttgtataggttgaagggccaatacagaaagaaatgcgtctgtatcaacttcatacctgaaacaatgtttaacttaattgattcctcttttacaaagtattgagattccatatcttttaccactagcattccagttttctgacaggtttcagaacagattttttttttctttgtactcactgagaaccaaagtaaactaagcgtaattagaagttatcaaggagttatctaaaacgcatccatatgcatcttactaccaggaaacagttaacatgaaagagctacaacactaacagaatctactactccaatatctatacggaacttctcagttttcataatcttcttcctcaaaatacagatactttcagagacttgaaaatattcttaccgatcacctttcgttggtagtataataatggcacgcgccatagaggcggcagccctctcaaatgatttcgtcaggttaagactacaactgcactggtagggacattatatcagaactgaaactatatatgcaaaaccaagatgatcattaattaatatggcatgaacctaagcagcatttcaggttcactttcgcttaatagctagcatgtcaagttgtcaactactttacctctttgtaaggatgtcaatatgattaaaatctttggagtacgcctcagctagcttgtccatctgtttccttggagtatcggacatgagcagaagtctttgcttcctgaaagcatgtaacaaggaaaagtaattatctaagtcaagataagcggagaaataaattttaagatatatagagagaccaaaatacctagctgtggcggtacctaagcggacagcatgctcatgataactgttcagttgctttagtatgaaaggtagatgactgtttattccacaaatgatgatatgatcagcttctaggacttgcatctgtgccccttccctcagttttgtcatattatactgcccagacaaagcgatcaggaacttgtaccaattaacattcatttttcaccagtagtgtttatctcaagaacttacccgaaattgttctgtcattgtgcttaatagccgagagtaaaacaatattccccaaatggctaggacaaatccaatgactctttcaatgcgtgtcttttgctgcagttttcagtaaacatatctgcatttagttgcaagaactccataaaaatatcatgaggcctgtaagtggcaattgatctggaataatatcgttgactggtaaagaagcaaatcaagaccttaagatgagtagaagaggaaatgaggcatgcccaggcttcccagaggcagtcttctaagggtaggtctttccttcacaacaagaagggaatagcagtactcataagtcctagaggtaagtccatttacaagggtcttcatataatacataatatacatgtgccagatttgtttttgcttttcgacacttcttcatcagaccaaaaccaagaattgtgttttatcatccatttatagagtttcagaaaaacagatcatataaacacactaaaacgatcttgagaagactttaaattgataaactaagttaaataaagctgtcttacctgaatttgaaaaataggagtcccccaatgataacaaacgatacacatgctatcatgagcgccacaaggaacctaaaatagccacgacaagtgatcagaacggatgtcatagtcacaaagaaaaatagaatgtactacatatgaacaatgctaatctcaaggacagtaacactaacaattaaactcagcatgaatctaatatacatatgtgaaggtgaagcaaactcttacttaggagatcctcaacctcaaacccatttactcactagtggaagacgaaatatttaagtcaggaatctacactatacatgttttatcactttaaatttaatgaattatcccaacaatcctgacactttccttattaaccatccaagaccaacatccaacagttagcttctgtaactagtaacatttgtacacacaactatctcacggaaatagaagactgacagttagcatcacgataaggaatatttggtttaggacatacgtgccaatgttcttctcaagctgaatattgaacaggtaaagaaaccttgcaagaccccatctgatatcttgaaaagaaggaaatgagacatccaacttgagaggagtaggtagagagttcgatgcacaagcaaaaggcaagccagcccccactgagttctgaacgaggcgaggaagctcttgacatatcttttgcgctatcctgaacaccgcatacagtgggatgcatcctatcaccactttatacggaagactctgcagaataagaagattatatcataagcatacggaatataacatctccataactaaacaagaagcaaccacaatgaaagacatcaaatacaccaatagacacaatgagctaagactcatccttcaaagacagaaagataaagacatgacactggacatggcttagcttaaccttatgcaatatggaactgaaatcattcaggttgacactagaagacggctcagtgtctcctgtcctctgagatttgactttgaaggtccctgtagtataggaaaaacattaacaatgagaccctaaagattgcatctttacagtagcaaacctcacctgggcatctaaaagacccaatcccacctaaaggcagagactttaaactcaagctcctgcaaaaatgaaactttcagagattcacaacttgtaagcattagatacccaatccgactaaatgagcgttgattgaatcattttagcttattgtagtcccaaattcagttcgaacataaacccaaaacacagattcagagcttccattagaaccattgtcatttctaatcaaaacccattaaacactctgctgcattttatacactaatacaaacatgaatcagcttcatcggaaaacagaaaccaaaacccaaaatcttcgacaatcacaaatttcattatcatcaactgatggataagtcacacccaccatgaaagcaagcaacttttatcagaaattttaaattataagaaaaacctgttaaaagacgcgaatcgatctagtcttgaagattgtgaaggtagtagaaccaatggcttccaagtaaacaactgaacagccaccatcatttatctcttctcctcgctctctctttgtttctccgcttaaatatatatatgaggctgatctttacattttgcacctttttccttttcgagggaaagaaatgtgtattttaattagagtcaattatcaatttttgttgttaatgacttcaatgttttggaccatattgcctttagttaagtagttaagttcatttgactcctaatttttaccggagttcgattctactaaatcgcattattctgcgtaatagatactgactatagatcgggccttatacatccaaagatgtagaaaaaaaaaaatgaagtagagattcctaatttggtcacacaaaagcagtactaatgcaaacaaacctttatatgtcactctggatcattaagttgctcacttagttagacagcacaaatatccaattcacgtataatatgaaatagttatcaaatatatatacttttttttttgtcatatcaaatatatatacaagaaactagacttaaaatatagagattttacttgttaatgactttatttttctgatcatcaaaaaattgcgtctaattttttttcttatgattagaagattttgggcacagccctagaccatataaacatgtcttttttacgagcaaatgcaaaatcctacaaacatttggattttcgtatacatgggtgagtagtactattttacaatctttttgctaagtcaagtcattgtttttcaattgttacttttggtcaccactttaattatcaaagatggactgcgagaaagcctttaacattgactcaaacacactcgtataatttaatttatttatggaaaaccacacaaagtatcttattcacaactcgaataataacaatccttagagaacgtgctgcataaaattgaaaccaacatagtaactaactaacaaaattttaatatatactattcgacttcaatattattttgttggtgtttaaattaggtatgacttatgagttatgagatgagatcgaagaggaagaagaagtggaacacaaagcacgtgggtacaccacaatgtgaatctcaatggaaacctcaatttttttggttatcattgccaattctatcacgctttccaatttttgttacgtcactctcttttacttactttttttgtattttttcttcttccactcacttctctcgtttttatatacattttggaagagatataatataacgaatactaattaaacaagtattttaattttgtttctatcgttaaaacctcatccacaagatggaactcggacgtaattggctcccgaaatatcattttcaatgtgttgttaataagacaacctatatagtttaaaactttaaataaatatcagaaacaaaaaaaaaaaaaaaactgagaatagtggttgaaatgaaaagaacaaaaaatagtaaattattttacttacataattacatattaccaaacgaaaaacgagttttgatcgtgcacattaccacagagagacaaagacataaagaatgtggattttgcatactaatttgaccattgaaaagctaggaactatatgatcttacacaaaagtaaatatgtatgaaatgtatacagacatacgaatattttttgtgtcttacaaaaataccagttttttaagtgtaacatgattttggaaggtgtttagacctttgtaatgattttcctaaaagtttgttgtatttttctggaaaaaaaatgtgatacttgttttgaatttatattattctatattatcacataattttgattttaacaatttgtacatttcagaatcaactagttagacttctttgtggataaaatattagcttgaccaaaaagaataaaaattgtaactaagaaatagaataatatagtaatatttctaggccattttgattatttcgtccttttgtaagaacccatatttgttttgttttttcttagccattgtttttggcatgtgactatcttaatgttgaaatggactcacatgtggagggcataatctttcacttttatggttgaattgttttggttgctcttgtgtgaaaagattacaatatttctgaacttgattttcatgtcttctttacacattttatacataagttttaagtctttgacttaacgtattatatacattttttgtaatgatcatatagaaacctgtgcagctcatatgttcactaaaaggtcatagctaaaccttttatccattccgagttttataaacacatatatttgcattttgttgtcaattatttgttgcacaaaataaatgctgtcaactattttgttgagtgttttatgttttatattttaattgtgatgttgcatataataacattaatcattttgccttaccaataatattggtgatgttaaactgggtcctgaaaatgcggatcaaaatgggctatttgtattatttttgcactcaaactcattttaagatatctattgaggcacaaaattggtgattaataatggaggatttgcaaaaatactattttctatatcacatttccaacaatactgttttatgttggcctttttaaaaaatatttttttattgaaagaccaaattacctatcagctaatgaaaacatgtaattagaaactgaaattttttcgccaaattttatttttaaatacagtataacatgtcatatttgttgtattttgattggttaaataagagagatttacccctatgggtgaacccaagaattgtctttagtggtagtggtctattattttaaaataattcttgggttcacatttaggagtgaacctctctcattcaccccctcttaattagccaatcaaaaattaccatataatatatttaaacaaattaaaacaattaatctccctaaatatataaaaagcttaattcattaaaaccactaaattgaattcattgtaaatttaaatcttaaccattcttttataaatccaaactgacatagaattttctttaattgtaaaaaattaaagtctaaccattcttttataaatccaaaccgacttataattttgtttaattataaaatcaaaaccctaaacctccattttataaatccaaaccgacagataattttgtttaactgtaaaatttaaactctaaatactcttctataataccaaaccgagatataattttgtttaactataaaatctaaaccttaaacctcatttttataaacccaaaccaacatataatttatttttattgtaaaatctaaaccttaaatgttttttataaacccaaaacgacatataatgttgtttaattgtaaaatctaaaatcaaactcttagttataaacacaaaccgatatttaattttctttaattaaaagtatacacattttgtttctttaatttgttcctttttcatgttaatttttatttattttaaaatatagtatgaaatgttttgattgactaattaaaataggatgaataagagaatattatagtaagagggtttatctatgtttaaaatcatatatatgaaagttgaccaactctctccatatgaatgacacattatcacacaagaaaatgacatgtgtcattcgatatttttaaaactaaaaattaataaaattaaataaacaaattaaatgtatcatcaatcctactcttgattgatttttttaaaataaaaataaaaaacaaaaaaatatgttaataaattaagcactactttcattatattctttttatttatatttttttagcaataatcactactctataatgactaaattttttttatagcaataatcactactctataagacctaccaaataatttaatacgcgatcatttctcttatatggatatatgcaatgacagaagatctaaaagtattgacttaaatgatactttcatttttgctttctttttattttttcatatgaatactcttgaaatcttgttcaatttatattaattctatatatttaatcatgagcctataacaatgttgttggagtattatatcagggaatacataaaccaaaaatagtttatttataatcaagttagacaattttcaaatcatgcaaaacacgatcatttttctaatattgatatatgcaatgacagaagatctaaaagtgttgacttaaatgacatttagtttttgctatctttttattttcttcatacccctttttcatacgaatactcttcagatcttgttcagttgaagtcaatcaaaactttaatcatgagcttatcacaatgttgttgaagtacataaaacaaagaattgatttatttataatcgagtaagataaattttaaaccacacaagtaacatggttacacataattgtatcaaaatatcatatattgttgttatatgtatttttgatagtgaacaaatattaacatcttataaatagctttatacatgaaaattagaaattgatatttcgagttacaaatgaatctaaccataaaaattgtaaataatatggatctaatttcattaacaatacaaaaataaacataaattagcaaaactaacaatcaatctaaatattttttaacaattttcaaaacaaacccacgcgtagcgtgggtactcatctagtatcatagtaaaaactggtatggaacttacgaatagtttgcacaatattaaagaaagtgtcagagatacgttaaagcattttcttgtagagagactagggattaggagtggagctggtttgtcacttgatgttccaactcgatagaactcgaaggtgtgtttagctcctcggactcttccacaatactggaacactatattgttgtgtttggaccaggggatgaagttagcgtgtggcatacgtcaacctcaaattgtatggtttatccaccattgtatgaactaatgatgggtatggaaactcgttgggtccatacgaggtacttagatcttaaaaaaacatatagtgaagaacagaaacctaacactacaagatgagaatctaggttttatggtactaaagaaaaataagagaatgaacaatcaatattatacacattgtaccccgttcattcatcaattttataaaacagtttacatcaaaagtcatgattataacgagatcacaatccattatcttatcgtgtggcgatatcatctttctcaatggtgaaatcccatacatcaccatatttgtcattaaagtcccaaatgctcattgtgttgtagtcattaatgagcttgtcacgagctcctctctccaatttgtatatctgaggctcgaagttgtgtggctggtcaggtttatccatctctattatacagaacactaccgtgaataacgctgcacctatgaacaagtactcaccctgcaacacacacacacaaacactggtgattctttttcttctcatacttggcttaattatctaatctcttgtacgtcctccacaaaacaaaagcgataaaactagtaatgataaattttggaagcaagcaaaagattttgaagttaccggagcatcaaaatacatcccaagagctatagcaggaagaaacatacaagagatcaaacctgcagacataaaaaaaccgcgagttttcaatcaatctgcggtacataaaaagcactaaaaagcgggttaaattcataccttgaaacccattagtttgatccacagcagcaatgtcatcagcaattgctccccaaaatgttcctaagaaacatttccaagaagactaatcaatcaatcaaacaaagaaatattatagctctaaaatcgaaacagcgacaagaatcaataggagaaaccaaaattatacccttttgaacttctccttcatagtaagtatgagctccatcgtaatatccatacttgaaatcttcctattaacaaaagcgctaaccaatcagaaacaactttcagcagaattatgaatttaaaatcaattgaatctttaccatttcaatgctattagtctcgaattgaccaatcgggtcttcgttgatgtctggttcgatctgtgacaatccagccgctgagaccagcttcgctaacttcaatctccggccggatttgccgcattttacgacattgacgatctgatcagaaaccctagctccgaatttggaatcagtgacctttggaatcgatttgggtgagagaatcgtgaccgttgccattttttcactcactttatctttttcttgctctgtctcagagttttggagccatagaaagaaaaaacggttctttttttttttgtgtgttcgttagcgaaagagattagtagtttactggttactgtctgtcatattaccaaagtgactgacaagttcgtaagcgtcacgtggaacgtattcatttgattgtcttctctagttggttagtgaacgcttacatcgcgtgaagactattgaaacggcccaactttgtctttgctgaaatcaacaatatatattaagcccaatttgatttacgtgacaattgcttaattattaaattcaacccaatattttcctatatccagttaaatgtaaaattcagttcaggttaaacatcataatactttgcatatttttaataaggaaaaagcaaaacaaaaaaataatgtattagccgatttatcgaatgcctaaacaagaaagatcaataacattctatggaccaatttgttgaatcgtacaaaatggttttgtttgtctagacgcctaaacaacctgtttttagaactttgtaaaggatctatgtagttggctttgctatgttcgaattagtaacaaggtcaaggcacttcattgatttaggagacaatgacataagaatcataaagaaatgattcccaactgcaactaataaaggctggagtggttggagagtagggtaaattaaatgctttgctctttctttgattaatggttaccaatatcatgtcatgttctagggtaaaattattataaaccaatttctctatcattttactaatgaatagaatatcaatttatctcaactacttagaatcaaatctcacccaaatttaaacgcaacaaatataaattaagatttggggtttaggtggatggattgctacgaagtacaaacatttttgatgtggaaactagaataacaaataaaagtcggccaaattttcaacgacaaatacattaatgttttaatttatggactattgcggttaggtacttgttatccacttatcttcttaattcatcgaagatattagcttaatgatttgtaatccatgtgacatgcacttacacatgtagtgtttattgaattattattatttttttgttgaaaggtttagtgtctaatgaaatgcaaatatatatttgattccgatagttgaaatcaacactagttaagctccttttttcttcaatattatctatagaaaatatgtaccataatttgcttgaagaatttgagatatcttaccgatataactaaaggtgcagagagattaaaaatcataattcattttggaaatattttttttctaaagaactcattttggaacacacttttctaccaactacgaaaaaaaattcaaactggttttgtttatttaagatttaagaatgacttgaaaaggtagaatttgtaaaaccaatgaagaagaaagaattgtggagtggtagagaatggtttcttcaaacttctaagaataattgttgaacgtaattgcttcgtttggtaggaattttcttagcaattagaatcagttctatgttatataacaaacatatatttttgcattacttaccacacaaactctccccaaattgtgtgttgacacataccaaatgatgatataaatacaaaacttatcacgcacgcgttaaagattcacacgcatgttattgacttgtgaaaatctcacaagtagttagtacacatgaaacgatagtttagttttgggttatgaacttatgatatgagttaatggcatcatttttttttttttttttttaacacgaacttcatttttattacttaggaaacgtagtctgaaaacagagcatttgagatacacaatgggataaagctatgaactatgtatgaagacagagcatgtttctggtttttcgctaaaatatcagcaggttgatttgttgatctgtgtgaccacgtgaacttgattgcgtcaaacttatttctccaaactttgatttcatggatccaattgatagcatcaaatcttgagcctcttccattcagaacattgactaggagcttgcagtcgccttcaagtattacttttctaaagcctcttatccataattgttgcatggtaagaattaggctttgacattctgcttcaaaggctgaggaaacggtcgcacctgtcgcttgagcagcccctttgaacacgccgttatcatctctaattatccaagctgccgtagagccacgaactcgattcacaaagctgccatcgtaattacacttaatccatcccatatgtggtttttgccactgactctgaaactgcctagttgtgccattagtcgtactcggagtgggaacttgcgcacataagccatttgtgatccattcttccgcttcatttgtagcatctctgatatctctccaccaatcgttctgttttcgttggaacactagcttattacggcttttccatattctccaaaggatcgagataggtagctgcccttgcattgtatgttgtcctgcatttttatgaaattcataaatctctttaatttttgtttcataatgcacctggggatttgatagactcggaaggggaatgttcgaagctctccatatttggcgagcgtgtggacacgtaaagaacaaatgatccgtagtttctctcgttatgacacatctacgacaaaaactatctgtgacgattcttcggctttcaagttcagagttggtagaatggcatcatttcttattttcttgataatgacacaaagttttcttgtctacaacatcattttaagaaaattaaacgtttttcaccaaagccgcgggaataaaatcatgaagaatggttagaacgtggtatttaaagatgagaccagaccaaagcaagtcaatacaaagtcaaatagaactcgatcggaaacgattatcaaattttggatttctttttttggggcaaattttggtgttttgaactgtatttttaattgtttgttatgatttcatatacaaattagttttagatagaataatgaaaatatttaagtgaatactatgttgtaaagtgtaaataatagacttttataagccttttaacgaaaaaagaatgtaaaaaataaaatatagacttttgtttatgaaattacaacctctttgataatgatataacatatgtgaaaatgcaatgtttttcttgattcgtttggtcaaaaaggaaaaatcaagtgtgaattagtttctgatgaggttcaatagttttttttgtattatcttaaaatttattcacaataaatatagtagtaggcgataaagaaagtgcaatgtttttcctttgactacatttaagttatagattattttatgatgagcaaaatcctcaatcttatatctaattggtttttctgaaaatatccaccacaactcaaacttcttctttgtttgcagctgcaatgtcaaccggtattaatatagaagagtgacagagaatgtatgattctctatctgcaaaatggttttgaattgggactgtgccggtcgatgattccgctcatcatctagtcgcgggttttgaaatgggactctttataattgatatccaactgtataaaaatcttgaacatccttaatttgaaacataaaaaatatgacattaactatctgattaattttcacttaagggatggttagttaagttacattggattaaaaatggtattagtagaccaattagaacatgtatgccattttttgtttacaaaaacctttttaagtggtatttataagacttgctcaatttcattcaaaagaacatgaaatggatggactagttttaatggcaataacccacacaattactcatatttggttcaacaaacttctatttcggttcacttattaattttccatctatatatgaatcatataatatgattaatttacacaagttcacacggccacgtaaaatgtaactgtcttcaagttgtgcacataaagagggtagtttcgaagataacgggtcaacgaaagggtaaaagagtaaattgcatagaacgcggccaaattaaaagcccccaattgggataaaagtcatcgccgtctcttaggtgtcaaatctcaactgtctaaaaacattaaaagcttcgttggggtagttgcatcttccctctctaatacaaaacttattttatccagttttagtttcgatttttcatttgttaacatgttttcatttttcttttaatgttaatagcctttttatttggaaaatgaaaacaatttcacaatttaattctaaattaccatttctaaaaaatagaaataatataaataataatattgaataatacatggactaaaaaattatagtactgtcctaaacaaaattgcttgactagattgaacagaaaatgtttttgatgtcttactagtttgaacaatttatttgctaacattattctctttgtatatttcttaaaaacccatattttttccttaaatatttcccatttcccctaactacattcaatagctaagtctctctctccctctctctttctctctcactcaaaaatttcccattaaattctcaaattttctccaactttttaggccattctcttttctcctctctctctctctcacacaacacaaacaactcttgagagagagaaacaaatctttcacttgacacttctctccaaatcctcatctcattcttcatcctaaacatttgctcattctcacgatgagccataaccaaaaccaacctcaccggccagtcccggtccatgtcacaaacgccgagccaaaccctaacccaaacaacctcccaaactttctattatccgtccgtctcaaatacgtaaaactcggttaccactacctaatctccaacgctctctacatcctcctccttcctctcctcgccgcaacaatcgctaacctctcttctttcaccatcaacgacctctctctcctctacaacacactccgtttccatttcctctccgccacactcgccaccgcactcttaatctctctctccaccgcttacttcaccacccgtccccgccgtgtcttcctcctcgacttctcgtgttacaaaccagacccttcactgatctgcactcgtgaaacattcatggacagatctcaacgtgtaggcatcttcacagaagacaacttagctttccaacaaaagatcctcgaaagatccggtctaggtcagaaaacttacttccctgaagctcttcttcgtgttcctcctaatccttgtatggaagaagcgagaaaagaggcagaaacagttatgttcggagctattgacgcggttcttgagaagaccggtgtgaaacctaaagatattggaatccttgtggtgaattgtagcttgtttaatccaacaccgtcactttctgctatgattgtgaataagtataagcttagaggcaacattttgagctataatcttggtggaatgggatgtagtgctggccttatctccattgatctcgctaaacagatgcttcaggtaaaatatcttattattcggtttggtttaatccggtttggtcttttagactgttatgagtcgtcgtgattcgtggaagaataaaatctaggactttttcttattcgactttaaaaatttgaaagggctaatgacagctcatgattttagaaattatttaggggaattcaatagaactaccagctagaatttgcctttcaaaatttaattatttgcgtcttggtgtcacttaataaagcatttagtacacttaccagctagattttttgattaattgacttagctttcatgtcattaatacgtgctataatatttctatgacttatttgatcaaaatgtagtcactggattggtttttagttgccgacttaatatggatgcaactttattctatatgagttgtatgaaagcataaaggccaaatttacgtgtaaaagtcacgtgtctatgaaaattctgacagtgacaggctttgtagtctttaggttggtggtagttgtgaaaatggaaaaaccataatgttgttttaaatgatcaatgttttattttataaaggttgattacatattttttcctttctcgaaagtattcatttattacgaaaatagttcatgcattaggaatttaggattgatgcataattacaaatttacattcacttttacaaacataattaaattgtagatctaagaagcgaacgtggaaacacgtgcttgcaagtttctcgaatctctaatgtggttggcaaattgaaccaaaggtcataaatgtgctacaacataatgttgggctacttgaatagaatttacttacacttgagacatatgcacacacatacctctgcatttatatatttgtgtttaatgtccaccgtataacggttgtctagtcacaaccattgttcgaattttctaagattcgaaaatgtttttatttttatttattgtatacatattttactgagagtaataataaatttgtgacaataatgcaggtgcaaccaaactcatacgcactagtggtgagcacagagaacataaccctaaactggtacttaggcaacgaccgatcaatgcttctatctaactgtatcttccgtatgggcggagccgcggtacttctctcgaaccgctcctctgatcgcagccgttcaaaatatcagctcatccataccgtccgtacccacaaaggagctgatgacaacgcatttggctgtgtttaccaacgagaagacaacaacgcagaagaaaccggcaaaatcggagtgtccctctctaaaaacctaatggcgatagctggagaagctctcaagacaaacatcacaactctcggaccactagttctaccaatgtccgaacaacttctctttttcgcgactcttgtggcccgaaaagtcttcaaagtcaagaaaataaagccttacattcctgatttcaagctagctttcgagcatttctgtatccacgcgggaggtagagccgtgctcgacgagattgagaagaacttggatttatccgaatggcacatggagccatcgaggatgacgttgaaccggtttggtaacacttcgagtagctcactttggtatgagcttgcgtatagtgaagctaaaggaaggattaagagaggagataggacttggcagattgcttttggatcgggttttaagtgtaatagtgcagtttggaaagctttgagaacgattgatccaatggacgagaagactaatccatggattgatgagattgatgactttcctgttcaagttcctaggatcactcccattacatcgtcgtagtgttttaaattcttttggagaactaatttgttatgttttattaaatgtaataacttacgtgatttgatatttttttattatcttaatatatatgattgccaatttgccatatgtgagttcgagattagtgatgtgtaacatgagtttattcattcacacaagaagagtcttgtgtcacatttggtactttgccacgttgtttgattgcatgttaaaccacaaggcaacgtatatggttcttggtgccacgtgttcatatacttgaaactgtttaaattgtctcttcaaggattttacaaagatggagagaagcaaaagttatgtctttgatctccgcaaatcttatgcgaggcactttttttgtatgttcatcattcaagtctaagccatggtctggaaggttaatcaccgcggtgaaatcggtttcgtgtacttctaagccggttagagggttaaccaactatagtaccggggtctatttcgttagccaaaccggtccaccagaaatcaagtttcccggtggatctccttcggagaaagagttaccttcaggaccaagtagaggaccagagttggctccattagaagttccggagcttcctaatataccagagataagtccgtcggaaactccaccggaagttacaacggttccaagtgatccacccccgcttggaccaccgcagactccgggcccggagtttccggttccaccatctccatctccaccgatgccagatactccaaatcctcctacaccaaaaacaccacctgatgtagtgcctccgatttgggaaccacctcgaccaccggatatcttcccaccggagagtccaccaccgggaattgacccgccaccgcctttaggacccaccatcatgtagaactcttctctgtttctgttgacttttttagcttaaagtttctgtttccacgagaaatagtttatacacaaatgttgttacatttaaaacacaataagcaaatatggtacaaatcgatgcgactcgacgacaagtttgacaacagagacgcaaagaacacacagatgttacattggttttattggaagctttttgtcacggagtttagttactaacaaacaggaaatgtgaatcttgtgggacaaggaaaccttttgcattcaagcagaagcaacagcttctgaaacccttccattaccagtctctgcactgagactgtcgtagtagtcaaccaacaccttccaaccagagggacacatgaaaccatctggtgggttctctttcttcttcgccaacccacgcatctacaaaacaaaaccatccgatccaagttattttcttagtcactagagtaagaaatcagatttggagctccggaattgggttttaccttggttcctgatatgaagaggaagtcttgagacctggaaggatcaaagaaggccattttcccctgagttttgtcatatgcagcgacctattcatacaaaccgaaacaatgagacttaaacccttaaagaagttttcgattaagaggaagtagcaatgattgatcttaaccttgaagggtagaatgttgaggcgttcaagtcctggtgccatgctaagcactttcttcccgtgatcggcatcataaagatctctcttctctgtcggatggcccataccggcaggatcgcgaccaacaatgtagaaattagctcccgcgttgatcctagctttggcatgccattgaacctcagttgggccagcgtatagcatcggagatgggaagatagagactacagtggtctctggatccagtacaccatcctccaacacctacatgttcaaatcaagaaacaacaatataacatttttcactccatagcgagaatcaacaaccaatatcaattcatcaaaatctaaagctcatctgaaatacactttgtatccaaagtaacgtttcttggaagagaagaaagtgaaagagataccttctcgtgctgtctcatacgccagctgagaggtacatcatcagccttagtaaacccaccaagtggattcaacaacaagacagggtttttgtaacccatctcaagaagtcttctacgagtatccgtcataagaagcgcatgaccattatgcaccgggttcctaagctggaacgcgaaaaccgcgtccgcaccgcgccttataaactcctcccgcagctgcgacggagataaacgaaaccggtctaaaccatcattgtacttgatcggctccaaaacttgtaaatcacctccaatcaaccagtttccagctttggtgattgcttcttccgcataaggaagcccacgagccgtggttccccatgttctcgcgattcgttcttctttgggatgcttgtaaatctcaatactattcaaattcaatcaaccaatcatcagtataaagcaagatgatttttctacaaattaggtttcttatgcatacatttgatgatttcaattgcagaattaggaagagagacttactcgttgagaatcgcgatgggattaccaaccgagtcaacgagtgtgacttggttggaatccccgatacgaaacttctgatcgtcgtcgatagcgaggacgatcggaaccgacatgttgacgacggagccgtcttcgagccggaacgagttaaaatgaagtgtttggaggaactctgactgtctcatgaaacctttgagaggacttgcccagccttcgctaagcacatgtacccactctagatccacacggttcagcttgatccttgccggaaccgtctccgcctcgtgtttcatcacgcgccgccgtgattcttcgactacgaggttcatgagttttcctccgtctggctcgatcaaccccgatttaacggagaggccacggcgggaaacttgacgggggagagatacgacggagatggatccaggagcataacgagaagcatgatggttatggattaatggtgaagaacgaaatggagaaccggagacgatggctgctgctgaagaagccattgaaggcagattaatttgcttcgttttggctctcttaatctttaagagaacattgattaatcagttttttttgtaattaagacataattagtggatagatgattaattaggactacatattcattaaaaatactcagttagtggataatgaatggacatcggtctaataccattcttaattgatgtgtcaataagcacctaattcaattatttgactaatctatggtataaaggacaacaatctaacaactgttttttctttattctgtgtaacagtgtaacgacaggatttgttgtgaaaatatttttaagaaatgggatattttgtcacatcgacattaatataaagatttttgtaatagtttttggtatacacgtatcgagttattagagattaacatgttttttttaataaaaacaagttgttgtacttgtagctttggtcttcggaagattatatttgaatttcatatgacttgtcttctatgcaaataaaatcacacatgattttgtggtatagttgattagtttacaatttttttattagaaaaacaaaacaagttgttgtagcttctttggtcctacttttggagattaaatttcaattacatttgtaaattaattaagagtactaatccccggagatttattgacacggtggtctttcataagttcccgggtcttctctacgtcagtccaacggttaactccggcataaatattcgacaagagcacataatttccgctgttttcgaattctaaccccaacaaatgctttagcgcaatctcacccctctcaaagtcaccatgtgtttgagatgaccctagaaacgatctccatagtgtcgcattcggcttcaccggcatcttcttgatgcattcttccgcttcttctaacctcccggatcggcctagtagatcaactaaacatccgtaatgctcaactttaggctcgatcccgtaaaccgctttcattgagttaaatatttggagaccttcgtcgactagacccgagtgcgaacatgctgatatcgtcaccacgaaagttgcactgtccgggactaatccttgagagatcaagctcttgtacaattcaataccttcttgaccaaacccgtgaactgctaaaccacgaatcattgcattgtaacacgatacgtctctctgagacatttcatcgaacactttgcgtgcgaaactcaaacatccgcatttcgagtaaagatcgatcagagaagttcccacaaactggttcagggtcagattattcttcaagacatacacatgagcccaaacacctctcacaaattcacctaaattcgcacaagatttaatcaaagctacaagagaaagctcgttaggtcttacttgcattctcataaacaacaacaaaacctcttcatcgctatcaatttcttcggaattagcgtaagcagcaagaagagtgttccaagtagccaaatcaggttccctaattctctcaaacaaagacctagcttctctcaatttaccacaattagcgtaaaacccaactaaagcagcttgcacaaaccgatcatgattcaccggttcgagaaatttcaagacgtgggcatgaagagccctcccatggcgatgccattgagcgtcaaagcctgaggctttgaagagagaaggatacgtaaattcattgggtctgacaaaattggatcttgagctcaaaatctgatcgtagagagaaaacgcgagatgggtttgagtggaattgtgattggagacgatggaagagatgagagtgttgtagaggaagacggaaggattagggatttggcgtaagatagagagtgcgtaggataagcagacggtggaggataagtgaaggagcttacttagaggatatgtgtggtgagagagaccgattgtgatgatttgggcatggatttgtttgaggttttgtaaggatttgcattttgagattaggtttaagcatcgatgattcttgcttgtgcttggagatgtcatatgtggaagctaataagtttctagttgctcagattttgtaattgagaagaagattaaatttgtttgcaaatttaaacattataggcccaattgcgttagtaatgagacctattagatttcacatgaggacggcccatttgtttttttttgggttgttgttgttgttgtgtatatatatatcaaatccattggaacatttttaataatcgtcaatgtgcaattttcttgtattttcctccttcaaataagaactttattcatattttttatttttatgaataaaggatcaaaactactaatacaagagataaatattatataatttgttaaaaaggatataatatatttttgctatttttattaacgtaaaaagattttaaaatttaaacggtgtttataatgaacggagagagtataatttttttttgaagttagtgattagttgagtaagtgttagaaaaaaatgttgaagtttcgaactggtttcatttcagtttggttatataataatttgatttgaaggttctgattcagttcgacaagaaatctttatgaaattgtgtaattttaggtttggttgggtttgttttattttggtttgatttggataacttcaatttgagaaaagcatgtaaaggtctctttggaacacatcaaaagttgtccctacaacaagacaatcccaccttttctcagctccaataaaataagtaaaaaaaaactagcattataataccacctttttatcttggttctattctttttataacaataatttctatgcagatgtgagactgataattctttttgaatacctttagtgaaaatgatgcatcaaatcttcttcactatagtgcatctccacacatgactgatgacccaattagaaagaaaataacaatcaatgagcaaattctccatcgcttattcccaaaatctctgttcatgtctcccataattgtttgctttaaattgtacttataattactttcatatcaaggaaaaaaaaaaaaatagcttcatactgtacaatctaatagtttacatatttgttacatgaaacacatgtttgatatctaacttactacctgtttgaataaaatttaattgtttcggatcgagacaattatacgaaattacaagagagaatgtattatttattaaagtgaacttcgaatttatttgatttgaatcaaaacaaactgaaacttcttaacgggattctagtgtcgatggtcgaaactttttttaaacaaagctatgtgtttcagaaataaatattaaccctgatttttatgcatattcaaaaaaaccagttagttatcttatgggaatacactagttaaccattctattagacatcccaaaatcgatattttcttgacatttcaatattaaaaaattaggagaatactaggattctgtaaacaaaacttaaaaaattaaacacgtaacaagtcatatcatatcttttacaatccaacccatgtagtactactaatgcaagaagtgttgctcaaagacaactatacgacaaagcctgaatttatttgcaccatttaataaataacatatattttccaattatttatcactttcaatttcgtttttattttaaataaatgtttttgatgatttattcagtctttttatataacttgttcaaaattttgggaacagaagtgcactttgggggtgcttttcacaataaaagtaaaaataggactaagatcagagatgataaaaagacagagcctctgtaaagtaacctgtattaatattattttatttaactttttattttttttgggtttctcatctctttgctttccaatattctcaataaataaataaataaatttgctttgattccaaactatgcatgtttctagaatttctatatagttggcgacaatatattggcaaattaaagtaaattttgttaacaataaactagacaaaaaatacttttcaaaactatcccgttgatatatgtgtagagggttttagttttacaaagttcagttatttaaaaaaataaagtagattggtagtaataagcacaatatttaccttttatttgttagtctataaaagcaaaagctaaaggagagctgagtgacacaaaagctatagtggcagatttgcagattatacaccgttttaggcccaactctgacatagttttaatattttaactccacatttacttttttacctcttattttttaacttcactttacaatataaatatactgttaatatgctttaaacatcgcaattacttcatcttactgaccagtggtaaaaaagaaaaaaggaaatatgagttgtcgggagaagtatttataatcagacaaataatcaattttttgatgtcgtaaagtcgcaattaataaataagtatctttttgtattaaatatatataaaaacaaaaaattcaataatgataaaaacaaaaaacaggttagtagtagaaaaatcaatggtttagatttttaattagagcttactttagtgaattataaatacataaatgaaatgtttatactccaaaaaaaaatgtttatactccaacgtgcaagatttatcgtgtgcttatcaagtgtgaactttccaagaagcaataagaaattagggcacccataaaaacatatggaattccccccaaagtttgctttaatcgtagatttaaatgtctattttgtcgtctttcaaagtttactaagcaaattttaaaaatgaatatgtatattagaattatatacatttcttcttataatcataacttgcttaatttatatatagtttggtcacctagccaattttcttttctttttgaagggtctcttaaccaattaaacacacacacatgcaattcttacaaatgctagattgtaatttaaataatgctaagaaagtacataggctaaggcattgttaaatgaaaattttctgcttaactgattaaactaaactgtatttgttgacaaatatgaatttacaatgattaaaacgtcacacgcgtgcattgaacatcataggaaccccatcgaatttctgccaagaatatgttttgttctgccaactaaattaaaaaatttaagagaattaagaatatataatgcccaaatggtcaaatgacaaatcgttatcattatagagtatttgtttaagcaagtttaccaagcttgcgaaacttgttggagtagtttgtctatgttaattctgtacgtagggaactttgtttttatttttattttcaattatgtgttagatattgttagtgcaccctctatcaggacagaccagaaggagtgctgattgctggaacaagctggaagctgtttcagaagactaaagtgaagatcaagtaattgatgctgacgtggatatatcgccaaatgaacgaatgacgtggaaatcacaacaggatgagttcagtttggagaggagatattcgcgcgaagatttggtgtgatccaagatctcgaaggctaacctagaagaccaaagacctcgatagtataaatagaggtgctaaggttcttgttagacttggccgtgatagttgtgaaaagtaagtgcaaagcttttcattgtgagagagtaaggtttactctgattaggattctagagaaatcaaagagtgtgttcttgtgattatctcttgtgtgtgttaggaaatctaaggtgacaaactaaagtagtttagatcttgtgtaaaacctattaaggtagttgtaaacttcttaatcagatttctaataaagtaagactcagtggttctgagtttggggaatatagttcttggttcatccggattttcaattggtatcagagcaggcatctgaaccaagttgtacttaacaacaggtgcagatcctgcggagaggatggactaccccaaagagttcgttgcggttggtaaggcaattatgctggaaaaaggaaattacggtcactggaaagtaaagatgagagctctaatacgtggtctgggaaaggaagcctggattgccactagtgttggatggaaagctccggttgtcaaaggggaaaacggagaggatgtgctgaaaactgaagatcagtggactgatgcagaagaagcaaaggccacggcaaactcaagagctctgtctttgattttcaactctgtaaatcagaatcagttcaagcgaattcaaaactgtgagtcagctaaagaagcgtgggataaactcgctaaagcttatgaaggtactagcagtgtcaaacggtccagaatcgatatgttagcttctcagtttgaaaatctcactatggacgaatctgaaaacattgaggagtttagtggaaaaataagtgctatagcaagtgaagcacataatcttgggaaaaaatacaaagacaagaaattggtcaagaaactgctgagatgtcttccatctagattcgaaagcaagagaactgctatggggacgtcgctggacactgacacgatagatttcgaagaagtagtaggaatgcttcaagcatatgagttggaaatcacttcaggaaagggaggctactctaaaggagttgcattagctgtatcatcagagaaaaacgagattcaggaattaaaagattcaatgagtatgatggctaaaaacttcagcagagcaatgaaacgagttgagaaaagaggatttgcaagaaatcagggttcagacagagacagagacagagacagagatcgtaactcaaagagaagtgaaattcaatgtcacgaatgtcaagggtacggacatatcaaagctgagtgtccctctttaaagagaaaagatctcaagtgctcagagtgtagaggtatcggacataccaagtttgattgcatcgggtccaagtctaaacctgatagatcctatattgctgaaagtgacagtgactctgatgatgaagattcggaagaagatgtaaaaggatttgtgtcttttgtaggaatcattgaagatgataatgtgagttctgacagttcggacagtgaagtaggatgtgaaaaagaagaaatttcagctgatgatgaatcagacgttgaaatggatgttgatggagaattcaggaaattgtatgaaaattggttggtactgagtaaagagaaagtcatctggctggaagagaaggtgaaagtccaagagcagattgaacaactgaaaggagagttagctgttgcaaatcagataaagtctgaaatgatcttaaaatacagtgcaaaggaagagaaaaacagagaactttctcaagatcttagtgacactcgaaagaagattcatatgctgaacaaaggaacaaaagatttggatagtatacttgctgctggaagagtgggaaaatcaaattttggtttaggatatcatggtggtggatcgagtacaaagacgaattttgttcgaagcaaagctgctgctccaacacaaagtcaatctgtgtttcgaagcaagtctaattctgttccagcaagacgcaagtatcagaatcaaaatcactatcattcccagagaactgtgacaggttacgaatgctactactgtggaagacatggtcatattcagagatactgctacagatatgcagctaggttgagcaagctgaagagacaagggaagctatatccacatcagggaagaaattccaagatgtatgtgagaagagaggatctctattgccatgttgcatacacttctattgcagaaggggtgaaaaaaccgtggtactttgacagtggagcttctagacatatgacaggaagtcaagctaatctaaataattactcatctgtcaaagaaagtaacgtcatgtttggtgggggagcaaaaggcagaatcaaagggaaaggtgatctgactgaaacagaaaaaccacatctcactaatgtctattttgtggaaggacttacagctaatctgattagtgtaagtcaactttgtgatgaaggtctgactgtgagtttcaacaaagtaaaatgttgggcgaccaatgagagaaaccaaaatactctcacaggagttagaactgggaacaactgttatatgtgggaagaacctaaaatctgtcttagagctgagaaagaggatccggtgctgtggcatcaacgtctgggtcacatgaatgcaaggagcatgtcaaagctagtgaacaaggaaatggttagaggagtgcctgagttgaagcacattgagaaaattgtgtgtggtgcctgtaaccaaggaaaacagattagagttcaacacaagagggttgaaggaattcagacaactcaagttcttgacctgattcacatggaccttatgggaccaatgcagacagaaagcattgctggcaaaaggtatgtttttgttttggttgatgatttctcacgatatgcttgggttcgttttatcagggaaaaatcagaaactgccaacagcttcaaaattctggctcttcaactgaaaaatgagaagaagatgggaattaagcaaatcagaagtgatcgaggaggagagtttatgaacgaagcattcaacagtttttgtgagtctcaaggaatctttcatcaatactcagcacctagaactccacagtcaaacggagttgttgagagaaagaaccggacacttcaagaaatggccagagccatgattcatggaaatggagttcctgagaaattttgggctgaggctattagtacagcatgttacgtgataaatcgagtctacgtaaggttgggatctgacaagacaccatacgaaatttggaagggtaagaagccaaatctgagctacttcagagtatttggatgtgtctgttacatcatgaacgacaaagaccagctgggaaaatttgattctcgcagtgaagaagggttctttcttggatacgctacaaacagtttggcttatcgtgtttggaataagcagaggggaaagattgaagaatcaatgaatgtcgtgtttgatgatggaagtatgcctgaactgcaaattattgtcagaaacagaaatgagccacaaacgtctatctcaaataatcatggagaagaaagaaatgataatcaatttgacaatggtgatatcaacaagtctggagaagaatcggatgaggaagtacctccggctcaagtccatagagatcatgcttcaaaggatataataggagatcctagtggtgaaagagtaacaagaggagtcaagcaggactatagacagctggctggaattaaacaaaaacacagagttatggcctcatttgcgtgttttgaagaaataatgttctcttgttttgtatccattgtggaaccgaaaaatgtcaaggaggcattagaggatcatttctggattttggctatggaagaggaattagaagaattctcaagacaccaagtctgggatctagtgccacgaccaccacaggtgaatgtcattggtactaaatggattttcaaaaacaaatttgatgaagtcggaaatatcaccagaaacaaagctagacttgttgctcaaggatatacacaagttgaaggacttgattttgatgaaacttttgctccagttgcaagacttgaatgcataagatttcttcttggaacagcttgtggaatgggtttcaaactgcatcaaatggacgtcaagtgtgcctttctgaatggaatcatagaggaggaagtgtatgttgagcagcctaaaggttttgagaatcttgaatttccagaatatgtgtataagttgaaaaaggccttgtatggtttgaagcaggcacctcgtgcgtggtatgaacgacttactacctttctgattgttcaaggatatacacgaggaagtgtagacaaaactttgtttgtcaagaacgatgttcatggcattatcatcatacaaatctatgttgatgatattgtgtttggaggcacatccgacaagttggtcaaaacgtttgtgaagacaatgacgactgagttcagaatgagtatggtaggcgaacttaagtattttctgggtttgcaaatcaatcagactgatgaagggattactatctcgcaaagcacctatgcacagaatctggtgaaacggttcggtatgtgttccagcaagcctgctccaactcctatgagcactaccacgaaattgttcaaggatgaaaaaggagtaaaagtggatgagaagttgtatcgaggaatgataggaagtctactttatttgactgcaaccagacctgatctatgcctcagtgtaggtttgtgtgcaaggtatcaatcgaatccaaaggcatctcatctcctagctgtgaagcggatcattaagtacgtgagtggaactataaactatggactcaactacaccagagatacaagcttagtacttgtaggctactgtgacgctgactggggagggaatcttgatgatcgtcgaagtaccacaggaggagtgttctttttaggaagtaatctcatttcatggcacagtaaaaagcagaattgtgtgtccttatcatcgactcagtcggagtacatcgcacttggaagctgctgcactcaacttctttggatgagacaaatgggtttggattacggtatgacttttcctgaccctttacttgttaaatgtgataatgaaagtgctattgccatatctaagaatccggtacaacactcagtcactaaacacatagctataagacatcattttgttagagaattagttgaagaaaaacaaattaccgtagaacatgtgcctactgaaattcaacttgttgatattttcacaaagcctttggacttgaacacgtttgtgaacttgcaaaagtccctgggtattggtgaagtctaactatcttcttgatgagtgtttgtgctgaaacagggttggttgtacagtgagtagcaagttttcatatctattttacacagtgtcataaacggttttcaaatcttctgctgtaaaaagttcaccaagagaaagagctactcttcatggtttggagatgcaaagtcagtaaagtatgtgacagacacagtgtgtagagcattaaggaagggatgaaatgcagaaaggggcagaaaagaagcatttcatttcataagatgaagcatgagcttatctaagttacgggggacaaaggagaaatcttgtcactaacccgatgggaacaaaggagaaatcttgttcacctacactttggagagaagagatgtcaaacaaaaacattgagagaacaagtaagaaagagcatcaatacaccctgcaacaagataagagaaatattaaaaaaaaaaaaaaaaagaaggggtgcaaaaacaaattttctctctgacatctcgtctctctgcagaaaggagcagtaagaagcaataataagatctgaatacaaaagatcagacttatatttgatcaatagcctgaatgttgctgcacagtttgtcacacttcttgtttacaaggacttgctagcactctgagatatgacgtgtgaagactactcttggagaatcgacattttgtttgtgttgtgtcagcagattatgccctgaattttttgaatcaagttaccataagcttagtactgtacaatcacctctggggcagttctggacctcagtatgagcgagagatggttatcactttgctgatactaatggggacttgttctatgtgattcaagatggcctcagaaaaataagttgagctccagaggtaattaaatttgattttgtcatcgatcttggtttactgttaagaggtgtcaatttcggtttgatgtgttttatctgattttaaccggaccacaaaaccggttagcactaatttttggttttgagttgcttgatttgcataaatcaaaatcgaaggaagaaattgaaggggaaatcgaaaattctcctatcctaaccctaagactctagcgatggtaagaactcgcggtgactcccggcgtccgacaagagctccggctaacactcgagctgtggcgagaacacgcagcgaagcccggcgtgctgctccatctgctccggctacaactccaatcgtgggaagaacacgacgcgacgcacggcgtacagctccgacgataatctccgatgactccgacagcagctccgacgacgcggtgcccgatcccaaagctgctcgttctcctgtcgccgtcccgtcaaagcaagccgctgaggctccgcctcctccgtctcacgcacccgatgactcgcctgctccggtctcagatctgcctccgaagacctcgacggctcctccaattaacgatcccgcaccagacctcctccgaaacgccttttcatctcgagggcgtctgccttatgacccgtcggatcgatgtagcatccatcgacatcatcaggctgagagagatgcggcggatccatccatttggacacctccttatgagccactgacgattcaatttctcacaagccaaggggttgagaggtacaaggatttcaagcttcgtgatccctatgagcaaaggtatgtgccgcgtggtcctccagagatgcgtgacatgatgaaagtgatagaggataatcacttgctagacactgtagcagagatcgatccgtttgtgaaagaagtgatttgggagttttatgctaatttccatattttcaatgaggaaactaagaagtccaaagtctttgttagaggcaaaatgtatgagttctctcctcagatgattaacaagacgttcagatctccggctattaagtggcatgccaaggctgaattcgagagagtgactatgtccaaacatgctcttgctaagtacctatctgatgggaaagtcgtcacttggaaggatcttcgcactccggtcatgcctactcatctcgctggtctatatttgatttgttgcatcaactggattccttcgaagaataactcgaatgtcactgttgatcgtgctaagatgctgtatcttctgaatgagcggattccttttaattttggaaagctagtctatgatcaagtagaaaaagctgctcgctctcctggacaaattcagaacatcctgccatttccaaatctcatctacagagtgttgatgtttcagcgagtgataacactggaaaactatgagaagcctggtcctcacccaaagctgtttaatccagacgttcgtggtgggattgaacatccaaagcgtcgaggagagtatttgtttggcacgtccttacctggagacttaaggcatgtctctaccttgctaacaacaatagcaacacgcattgaaggtatgatttccagtcttttacttagtgtctgctttccttgttagtgtgttagatagagtttttgatcaattatgtcatacaagcagggggagattatgggttggtttcgtcttcctctcacagttctcaaggtgtgaatgcagatgttgaggcacaaggtcttgaacctgaagccgatgacgactatgtaccgccagttgatgaagggtggtcccctgagaactctgattcgtttgtgaactctcttgatgttgacaacgaagaaggatatgaagatactcaatcttcttaggatgtctaggtctagttgtgggggagtttaggattaagggggagtttttaagctttggttgttaatcatgctattttgattttagtagttgttcttctaagtaatgaatgatgttttttgaatcttaaaaacttatttatgcaatctatgatgagaccctctattggttatttccgctgcttattatctctatgacttgatgtgtgcttgtgagttttcttttaggggtttcttgcaggattgcttgaattgacaaattgtatcaaaaagggggagattgttagtgcaccctctatcaggacagaccagaaggagtgctgattgctggaacaagctggaagctgtttcagaagactaaagtgaagatcaagtaattgatgctgacgtggatatatcgccaaatgaacgaatgacgtggaaatcacaacaggatgagttcagtttggagaggagatattcgcgcgaagatttggtgtgatccaagatctcgaaggctaacctagaagaccaaagacctcgatagtataaatagaggtgctaaggttcttgttagacttggccgtgatagttgtgaaaagtaagtgcaaagcttttcattgtgagagagtaaggtttactctgattaggattctagagaaatcaaagagtgtgttcttgtgattatctcttgtgtgtgttaggaaatctaaggtgacaaactaaagtagtttagatcttgtgtaaaacctattaaggtagttgtaaacttcttaatcagatttctaataaagtaaaactcagtggttctgagtttggggaatatagttcttggttcatccggattttcagatataactcaagatgaacccaagttttttttttttttagaatatagagttaactaacaaattttaaagctttttttgtttgttgttaagcgttcaacatgaacaataaccgtgttttgtattggcttctagggcatctattccaaacaaaaaattgattatttttggggaagaataagacattgaatattgaataaaaaaatgttgtatatgaaaataagtatttatagagatatacagaaaaagtaataaaaataagttattaggatgtgcatatatttatttgtattaattttataagtggagatatttaattagagatttttttttatcttttggcaattactcgagatttcatttgacttcaaaatttcttagttttcacagtaagtgatacacatgaatcatgtgaagtaaaataagcagagactagagcagaaaaaaagagaaacatagcaccaaaaaaagaaatgaaggagtgaaagaaaaaaatattgtttttggttctaatgacttaaattcaacataattagctttgaattaaagataaattagaaaattagttttaaaagtcgcattgaaaatgtaacatgacactctttaatctttataaaacaaaaataaaactcttgaacgacactctgatactcttcgtaaaacatggagagtatatgagatttgcatgtattaagatatacatttgataaattatggatcttacaattattcaggaatctcaaccaatataattaattttaaattaattttggatttattaaaaaacaaatttatgttcactcggatcctcatatttaaaaaaatctccatgctataacaaaaggctccaaccttacatcagagcaacatccctatattcttttgcaaacctctagtttataccactttgcacaaccacatatggagagttcaactacgagaatatttctcaatttatcacttgtctcccttcgagatacggaattaagttcaactaattcgattatttaattgataaaatagaaggagtaaacactagacaaagaaggacaatgaagaccaagcgaagtaatttttgacctcatatcaaactttttaaaatacgatcttaatggtgtatgcgaaacacatgcaaaacaatacgatttattatcttaaaatgttatccttggagttttaaaaattataatttgtcatattatctgaatttgaaaacaaagtaaacaattataagaaataaaagaaaacatgcgtcgctccaaaacaaaccatgcccataaccctatagctaccaccgtgacaaaactaacacatatgatattatacctacacacgcatatacatttatagattcgtttagcatatcacatgcatgtgtacgcagtatgtatgtgtgctttgcgtgaatcataattagaaaaatatgtcagcaaattgtataaattttctggttattggtcgaattaatatttcatgacacttgtattgtgagaaaaaaaacttaataggaccggagtaagagaaaaggagaagatgtacaaaagttcacatagatttttgaatgttatcagtctatatatgaaggtgatgtgtctactcgaatttgagatcatctagataaggtacaattagataatcgttgttttcttgaaacaaggttagaacagcagccatgttcaacgatttaattgtagcgaacaatgtgcacttttttgtatgataatcggcaaaaaaaaagaagcattttcaaacaatttcaattgattgccgaattgcatttgttatgttctaaaattttgtttatgatctgataaatatcacaagatatataaacctaaatattggtaggatttgaaaattctggtactaactaaaaaataatagatgatacactttaatcgtctatagacaatattgaatttaccagtgaaaaagtagtatagactataatggatgattatgctacatacaatgtgcaaatcatccattatgtatttggtgttttaatacataaaagtaagagtttttggtgtttagcatttgattaattcaaaaaaaattagactctataaatttttctataaagtaagagtttttcaattaatattctattaagagtttcatatattacttcgaatattggttattttatagtacatatgtaaactgtgtactttcatttttatcattagaaaaacaaatttcaaaacagtgctctcagctttccccattagtccaacaatgtcatcatcattcatcgtaatattttcggaatattttggaacttttttgtgttggtgccaacaagtactttgaatcttattgagaaaaaattatattttagtttcacagagggaaaataaaaaaaaaggaggtttcgtcatgattatgatcgatctcacggcggatattttccttgtagggccaatgaagtaggggccctgaggtgcatcttacttcaagtggaggttcttctacttgattatacacaccactcttcacaaattgtaatcatctaaatttattactaataaatttcactatcccactaaaacagtcaaacctctctaaattatttcttttgaaactataatacttaattttttatataataattataaataatttaatatttattaatggctaattatagatttacgttacaatgttttaattttattgttgcgaacagaattgtcgttgagtattatttgtaggtttattttgaaaaacttaattagttggaagttgtaggtttaatttgatacttattgcaacatcaaatacttgcagcaatgaactttaaattcggcgattttaaaaggtataaaacgatccaaaactgttgaaaataatttctataattagattaaacgctaacattacgtttgcgggagaaccatcaaaccctaattataaaaaagacaaatgctttcgcgaatattagcatgaaaatcacatcctctttgtttttatttccatgtaaagaacgttacactttctcccatttgctgccaaaagatctctaccaaccgttacatatcacactcgagtcagttgaacaagtttactataaaaatacattccttgaacaagatttctataaaaaatacattccttaatagattaacttaagccatataattataggccggtggtttgcatatctaattatcaacttcctcgtaccagaaggaaccttgtagcttatagagatatcattgtattcgaattgatcatattaaactattttgatatttacttatttttctaaagaaactaatttttgctaaatttattcaatgactagtattatgttttgaataaactttgaactgtatattctaacctgaaaaataagtggaattctacagatcaattaccaaagttttgtctttgtttttgtgatatatcgaaggttttagagccaagttcgtaaaaaaaaaacaatgtcaaaagttaaaatagctcgaatgaattttgtttcatgtaggttttttttcttatgatcggacgtttcatgtagtctcatggagtatgttataaacaaaagaaaaaaaaaaatagtggaagaaaacaaaattaatgaggttgtagtagagtcacgaaatggggtctgcagaaagaaaagaaaagactgcaagttcgaattattccttcttccgtgtgtgtaattatcatttgcttttattattttaaaaaatataaaacatttactatgtattttcttacatgtaaaccatttactatttttctccacgaatatttcttatgtaaatttatataaatgtatgtataaatacatacactacgttagtggtactaaacggaccacaaagaaagtggccatcaagcttaagcagctgcaataagctgacacataaagaaatctgtctatacatatccaataaaatctaattcaataaatatgtacaaatggtcacaaaaatagtaaagggtgtaatcatgcaaagtcgtggtctagtcgttttctctattaattaagcccaatttcgaagtatacaattaggagcaattgggaaagtagtacattttaatgatgatgctaatttgcagttgtaacactttatcacaaactagacaatccacattcaccggcggaaactaacctagactagtttccaacatcaaaagtccaatttttgtttcgtttaaatagatggcgcaaacgtacaactaagattagatttaagtatttaactctacaactaggttgagccaaatgacgacaatgacaatgccgacgactgttgatatacacaactaacgtttatctgattagatgagttcgtgaacggctacacatccattagcttctatttaaaccatttgttatgaaacaatgtttgacaactcaaatgaaaaagatgaacaatatttctataccaagtaccaagtgaaactttttgtgtttacatcaggtatgtaatcattttccgtgttcctttgttaaaaaccgtccatccttgattcttctgataatggtaaaactatccgtttgttaaattgttttattgtatttttatctattgtaaaaaactaattaaattttaaatttgctatgcataaacaatactgtatatacattttttataataagattagagaattatagtaccatcttgtaacaatgatgtaataagagacgaaaaaaaaataactaactgatcattaccatccataaataaatagttgctgccataaaccaaacacattgtgcttatcaaaaagaagaaatttgtacttaatgaaacattcattattagcaaagtgtaaaaccaaagaaaaacaaactttatttctcattttattagtaaaagtgaagaagagtaaagaaaaagagagactgagatgaggctgagagcctgagtctgcgggtggagagagagagaaagaaagcctctttacacgtgatttttaaaagagaccaaaaccccaaaagcaaacctcttttgcatgcgtccttaaaagacataaatttctctcaaaattttctacatcacaaaatcaatctttttctcttcttcttcgtcttcatcatcatcatcatcatcttcctctttctcttcctactgagatattttctccacattgagaggaaagctatcttctctagcgtcactcttcttcttcattggtcggtgagtgttttattttttttactgtatttctttttaatatagcggacgggtcattttctctccgtagcaataaattcacttatataaaataaaattttcattcttcttggagatattgatatttccactgctcttttcgatgtttattccttcactttgttcacttgctcttagtttttatctttcactctctctctctcacaccaaagttcacagcaaaataaaattaaaataaaaaagcttcgatttttcgattaaaatctttgtaattatctgtttgggttttctccgggatctcattttccggtttcaaatagagacaaaagattaaagctttctccggttttgtcttctgggtattcccaatttcccccatttcacttaaagctttaatctctgttccttgtttttgtctgtgattcttcttaatgaaaacaaaaactgtaaaaataaaaaaaaaacttctggtgattggttccttttattcttggtctttacagtgttttcttctaatttcatggtttcttgtctctctcttttttatcgagaaaaaaactacatctatctctgtaacactgtatgtatatacttcagactctgttttaatctctgtttttttttacctctctggtttctgaaactttgtaatagaagaaactagaacaacaacattttttacttcactgtttcaaagttttgatttttattattaaatttaacccaaaacaccatcatcatggttttgttttctggattttctccatttaatgcaatctgacattttcttataattattttttgtttgtacttatttttctttcatcctcatgattttgcaggtagaataaggccaaggaagggatcagttttaagttttgtttcattctttttgtagtggagaaaaagagtttttgaaaatccaaacaacaaaaaatgccgattaggcaaatgaaagatagctctgagactcacttagttatcaaaacccaacctttaaagcaccacaatccaaaaaccgttcaaaacggtaaaatccctcctccttctccttctccggtgacggtgactactccggcgacggttactcagagtcaagcttcttcaccttcaccaccgtcaaagaatcgtagccggaggagaaaccgtggtggaagaaaatctgatcaaggagatgtttgtatgagacctagctctcgtcctcgtaaaccgccaccgccaagtcaaaccacttcctccgccgtctccgtcgccaccgccggtgagattgtcgctgtgaatcatcagatgcagatgggtgttcgtaaaaactcaaactttgctccaagacctggatttggaacacttggaactaaatgcattgttaaagctaaccactttctcgctgatttgcctaccaaggatttgaatcagtatgatgtaagtttttattagaaaaagttaagattttttttgccttttttttagtttttgctgtaatgagaaacaaagcttgaacctttagatggtttcctgaaaaaaggtttgaaatttaatgaaggagagagagttagattttaatgttgttcttattgcttatttgggtccattgacatttggttaatgttttgcaggttacaattactcctgaagtgtcatcaaagagtgttaacagagctataattgctgagttagttagactttacaaagagtctgatctcgggaggagacttccggcttacgatggccggaaaagtctttacactgctggagaacttccttttacttggaaggagttcagtgttaagattgttgatgaagatgacggtatcatcaatggccctaagtaagtgtctaaggttctttaggtgattgattttgttatgtgtagttttatattgaaattgacacattttgctttgtagaagggagagatcatataaggtggcaatcaagtttgttgcacgggcaaatatgcatcacttaggcgagtttctagctggtaaacgggcagattgtccgcaagaggcggtgcagattcttgatattgtactcagggagttgtcggttaagaggttttgtcccgttggaagatctttcttttcgcctgatattaaaacaccgcagcgactcggtgaagggttagagtcatggtgtgggttttaccagagtattagaccaactcaaatgggtttatcactaaatatcggtaaagatttgacttaagagattgttacagttttggttttattttataagtcagcccaatcttaatgttattctccttactttgtagatatggcttcagctgcattcatcgagcctcttccagtgatagagtttgtagcacagcttcttggaaaggatgtcttgtcgaagccattgtcggattctgatcgcgtcaaggtacacaagtctcttcatcttattatatcttgtctcaagtccttgattgtttcctcaagaatgttttttttcttgggaatttttaacagattaagaagggtcttagaggagtgaaagtagaggttactcacagagcgaatgtaagaaggaaataccgtgttgcgggtttaacaactcaaccaacaagagagctaatgtgagtattttctttttacttactctttgattactaaggcttgtttcattgagattaatttctggtttatattcttaggtttccagtagatgagaactgtactatgaagtcagttattgagtatttccaagagatgtatggattcacgatccagcacacgcatttgccatgtctccaagttggaaaccaaaagaaggcaagctatttgccgatggaggtaaaccgtaaactgctggtttgtttgtttcaagacttcacatttcagctcttggctattttcgctgattcaatttccaatgtaggcatgcaaaattgtcgagggacaacggtacacgaaaaggttgaatgagaagcagattactgctctcttgaaagttacatgccaaaggccgagggacagagaaaacgatattttgcgggtatttttttagtcatgtatcttatatggttctttgtgagttagaacttagaagtgaggattaatcttgttgtcaaaaatgttttatagactgtccaacacaacgcatatgatcaagatccatatgcaaaggagtttggcatgaacataagcgaaaagttagcttctgttgaagctcgtattcttccagctccatgggtaaaaaacctaaacagatctctgaatgctcatactatgagaatactgttatgttaattcgtctctctttgcttgctacagcttaagtatcacgagaacgggaaagaaaaagattgtctcccgcaagttggtcagtggaatatgatgaacaagaaaatgatcaacgggatgactgtgagcagatgggcctgtgttaacttctcacgcagcgttcaagaaaacgttgctcgtggattttgtaatgaacttggtcagatgtgtgaagtctcaggcatggtaataatattcatctttttttcttttcttgttgcattgtttgaattctcttttaactcgatgtgattcttatcagaaagctttgcttcgtttatcattgtaggagtttaatccagaacccgtgataccaatatatagtgcgaggcccgatcaagtcgagaaagctctaaagcatgtttatcacacttcaatgaacaaaaccaaaggcaaagagttagagcttctgctggcaatattacctgataacaacggttcactttatggtattatttcgacatccataaacttaacccttttgccttctttagtaatggttttgatgaaaacgaaatgtttcttgtaatctcaggtgatcttaagagaatctgtgaaaccgagcttggtttgatatctcaatgttgtctcacaaaacatgtgttcaagattagcaaacagtatctggcaaatgtatcccttaaaatcaacgtaaaggtgaatagtttttactgctgtatcgaagattttcgattgtttttagtattatgaatctcagatctttctatgtttggtttcagatgggaggaaggaacacagttctagtagacgccataagctgtagaataccactggttagcgatataccgacaatcatttttggcgcagacgtgactcacccagagaacggggaagagtcaagcccttcaatcgctgctgtaaggattatacacttttatcaagtagtggagcatcgaaattcattatactcagtttttttcttttgttttctttaggttgttgcttctcaagactggcctgaagtgacaaaatatgcgggtttagtttgtgctcaagctcacaggcaagaacttatacaagatttgtataaaacatggcaagatcctgttcgcggtactgttagtggcggtatgatcaggtaataactcgcaatatttcggtttttgtagtttgattttatcggtgtatctcaaggtttttttgcttgctttctacagggaccttcttatctcatttagaaaagcaacagggcaaaaaccgcttcgaattatcttttatcggtaagtctctctttgctcatttaagtaaaagaattatatctaaaacccacaattagttctcatggttgttttattcgcgcagtgatggagtaagcgaagggcaattctatcaagttttactctatgagttggatgcaattcgaaaggtaaaaacttttgtgcatagcatgaaatgaatccgccacaaagttagcaaaacattttacataatcggaaacgggtttgtgtttgtttaggcttgtgcatcgcttgaaccgaattatcagccaccggtgacattcatagttgtacagaagcgtcaccacactcgtttgtttgctaataatcaccgagacaaaaacagtactgaccgaagcggaaatatcttaccaggttagttattaaaaacggttgaaagaagatcataacagaaataattaactaactaactaactgcttctttgccaccttttgtttcaggtactgtagttgacactaaaatatgtcatccaactgaattcgacttctacctttgtagccatgcgggtattcaggtacgaaacaactatcgaaatatccgttaatatgaccttttccgtaactatacagataaaatgacactgtttgtgtttgttgtatgatctagggaacaagcaggcctgcacattaccatgttctttgggacgagaacaatttcacagcagatggtattcaatctctgactaacaatctctgttatacctatgcgcggtgcactcggtcggtctctataggtaaataacaacatttcttcttcttcttcgtgtacccgcaaatatgacgaaaatcagcaaactcatatgttcttttattttctgatgttgtacagttcctccagcgtattatgctcatcttgcagcatttcgagcacgtttctacctggaaccggagataatgcaagacaacggatcaccgggtaaaaagaacacgaaaacaacaactgtcggagacgtaggtgtgaagcctttaccagccttgaaggagaatgtgaagagagtaatgttctactgctaaaaatccaaacattccttaatcagttttaataagtagtttggttgtttgcttgtagttcggctttagatttaccaatgtttttcttatgtaaattttgtcggtttggtttaagcctttaggaattagtgtattagggtttttctaaagttgtactttagctgatgataacgttgatgcagtgactttgttaaaacctcctcttctacagtagtgtttacgtcggttcctcaagctttatttttaaacttacagagtggttagtgtaaatgaaacacttagttctctttgcagtatcgtgggaaaattgtaaatgaaaaacttagccctaaaatttgataaacaaatatttttttttttgtcgtcaattgcaatatactcggccatatttggaaaaagaatataatgtaatatactttttcaatagggaaagtgaaataaaaatccaaaaatttgaatctctctaggtaaacaaatatgttttggaaaatttggatctgtctccttatctaacaaacacatctttaggttcttgcacatgcttgtttgtactttatacaccaactagattttaacccgcgggatgatttattttttaaaagtaatatatattaaaacttgtaaatattatttttataaaatatttatatttttacagtttattattattattaagtatttatatatattaattgttattaaaaataataaattaatgatttaacccgtatttaaacagtggattaattatattttattttttattaatgttgattcaaaaacacgtccctccaaatccgtcttgccaaaaagccatttattttattaatattaattttatttataatatgactctgaattataatctaaacattttagctaataacataggagtgcaccatatttatttaataggggaatgtaccacatgacccgaatgcacttttacccaaatccaccaaaaaagtcttgcaaaactactatagacccgaatgtaccacatttttttgtgctaatttttatgtgattaagatttaattgattttgtatataaaatattaaattgttttacgaacttatttgtttataatttggtaacagatagatatttgaatattcagtatattttgcttcagtttaggaaatctttgatgacttgtctttagatccaataagccttgtaatctagatattaacctgcagtataccgcaggtaggcttatattttagttcaactaaaaacttttattgtaaagatgatttaaaaatatatgatattattttatttgattttgaatgtatagtaaactgtgagttgtatatgttttgttgatattatctatattgtttagtgtttaagattatacacttgtagtttgattgttaatttaagagtttcacctgtagtataccatcttgtattaatatcgatctaaacccgtcaattctaggattttccagcttgtattaaaaattgaatcacatctaatatgttattaattattgtagtatataagattataaattttcaatataatatgtatgaaattgaatataaatatttcaaattatgacctgttactcagtagaaagttttcttaaatctatttttcacccgttataatattttttcatgtattgaacagtttatattcgtttttaaaaattcaaattatggcatatgcgaaaaaactctaattatttttctataatgatgatattatttttcggcaaaaatagaatcataaaaagatgagaagtgaactataataattaataaaaaattaatatgataatttagatatcaaatctaatttgttgattttaattggttacttttttgggaattaataatgtatttcatttttctaattaaattaaattaattaaaatttagatatcaaatcttatatgttgattttgattggttattatttttggaaattaataatgtatttcgttttttaattaaatttaattaattaaattagtatttgactttttaatccttaaagagataaattaatttactctttaaaattttatttctaatggcatacctatgtaattacttaaggttaatttaaatgtacttccgatcattttggtataggacaattcccctggttataaattgaaccgagcataaactgtaaaccgaagtaattacaccagtaaagcattaaccctaactaaaccgggtcgaaacattcttctctattccgattctcactcgcttcttcttcttcgtcttcactgattcaatcccaagcaaagcttcttcaatcttcctcgtaagttctctttaatcactcacttttacatttctatatctttccagagattttcttcttagctgagattaagttttggaatcgagagataattatgcttaggagatggaacatagttattgaatcgctacgtcgcgttcatagcagtgatttagaaaacctaatttcggcttccctatacaatcgaacactttgcacagcctcagaatcattgaatcatggtgttgttgatgagagttatgttctagctgaattatcttcattgcttccaatttcatctaataaaacctcagtgtcaaaggaagacagtagctcaaagaatcaagtagctattgattcgtttttgtcagcagaggacaaacttagaggtgtgtttcttcagaaattgaaaggcaagtctgctattcagaagagtttgagtagtcttggtattggtttgagtattgacattgttgccgatgtattgaatcgagggaatttaagcggcgaagcgatggtaacgttctttgattgggcggttcgtgagcctggtgtgactaaagatgttggtagctacagtgtgattttaagagcgttaggaaggagaaagcttttctcttttatgatggatgttctaaagggaatggtatgtgaaggtgttaatcctgatctggagtgtttaactattgctatggatagctttgttagggttcattatgtgcgtagagcgatagagttgtttgaggaaagtgaaagttttggggtgaaatgtagtactgagtctttcaatgcattgttacggtgtctatgtgagcgttcacatgtgagtgctgcaaagtcagtatttaatgctaagaaaggtaatataccttttgatagttgtagttataacattatgattagtgggtggtcaaagctcggtgaggttgaagagatggaaaaggttttgaaggagatggtggagagtggatttggtcctgactgtttgtcttatagccatcttattgaagggttgggaagaactggtcgtatcaatgattctgttgagatctttgataatataaaacacaagggtaatgttcctgatgcaaatgtttacaatgctatgatctgtaatttcatatctgctcgagattttgatgagtctatgaggtactaccgaaggatgctggatgaggaatgtgaacctaacttggaaacctattccaagcttgtttctgggctcattaaaggccgtaaggtttctgatgcgcttgagatattcgaagagatgttatcaagaggggttcttcccaccacagggcttgttacctctttcctcaagcctctttgcagctatggtccaccacacgctgcaatggttatctatcagaaatcaagaaaagccgggtgtaggatatcagaaagcgcatataagctgttgcttaagcggctatcaagatttggaaaatgcgggatgctgttgaacgtatgggatgaaatgcaagagtctggatatccttctgacgtggaagtctacgagtatattgtggatgggctctgtatcattgggcatctagagaatgctgtgcttgtgatggaagaagctatgcgtaaagggttttgcccaaaccgctttgtttatagtaggcttagcagtaaattaatggcttcaaacaagacagaattggcatataagctgtttctgaagatcaaaaaggctcgtgctacagaaaatgctcgcagcttctggcgatcaaatggatggcacttttgatctttatgttttgttgtatgttcatattgaaactagaatatgatcctagtctttgtagatgtacattatcacatctgcagtctatgaaatttgtaatagagaacgcttaaagttatattcggtagggatctgatctgtttgcattcttatctcaatgattcctttttgatggatggcttaaacccaaaggtatacttgtctctttctaggttgcaatagtgaaattcgtagagtgttctgaatggaggcagtaattaggaaatggcagcagaagttcagaaaagggaaggaggagatggaaaagtgggaggcacttcaagttcgatgggtgtccctcttcaggaacgcttcttctatcatccagagattacaggtagcttgaatctttgtggtttgttgtcagaaattttgaaactgtatgtgtgattttttgggtttgggaataggaaatgcaaaatcatgggagctatggagctttgagatgcctgaaagggattgaagacgcagttgtgcagcaacagatgggtcaactggagtctctattgcgttccatgaaaaacgttatgtaagtatatggaggaaagaaaggtgttactttagactggcatgagagtttcggggttctagtaggaagtaaagattgttgaaatgtgtaatatatgggtgatgatgtcagggaggaattctggggctgtgttttgacatttgagaagctacatcgggacggtttacagttacgtgaaattgaatcaagcaagaggcgagtagaggaacgaattggagtaaaaccgtgcattactgattgcttggagggactttctattctttatgacatgcatcaatcagagtaagcaaacaaaatctgcttagttatgtagttataatcatcactttttaacttttgtttgtgctctaaaaatctcgcagataccatcttaaatcttcaattctttccgtactttcatgtcttatcctgaaaccaaggtactgagaatattgccttgtttgaactttgacaagtttataaaattgttcttatattcttgtttactgttgtatagtcctggtgatctaaacgcgctacaatacctcgtggttgatcagccgaatatcccgaaagatgaaggtatcacattgacaaaaaactcacattcttgttcgactgttattcttaaatgtaaatctttctaaaggtctgagtctgattttagcttctctatgatatccactgtgcagtacaacacattttcgatgtcatattcgcggaagagatcaaatgatgtataaagagtgactgtttttgttcttaacctttatcaagtgatattagcaaggattaatgatagacaatatatttactggtaaagatcatatggacgtaacatcaatcactcgtactatcaatttgctaaacatcttcattataatcaataggaaaatgcaaatgcgtttaagttggtggtggcgccaacaactgcgatggcagcaccaacatctcaaatgtaaaaattgttaaaaatgaacatgatccttgcatggacgatttcaaacaaagtttgtgatagtttaccgatagtttcttaatatggtttctcatcttaacaatcccttcccttatgatcaatggtccgaaccttccttagcttacgtgagaaactgaattgaagcataacatcaatttatgttttccactttttccttgtgtataaaaatggaataaaaacttcgcgcaaaaagcatttacaaatgatgaaataaaaacttatttatttattgatttaagaaacgtaaacagagaaacaaaagtctagtagtctcgtaattccaaagtttcacaaaactcgacatcctttccaaatcccacctcaaacatgtacataaacgcgtttagaacattgtggtttgaaattattttctcaatgtaactcaaacatgtaacgaaagagaggggacaagacaagagggagaagatgctgagcttgtgatttgtgtatgatttccggtttagatatgaccggcccaattttgggagctatcgactctaggcattttggtaccctctctcttagtctcagcgtcaaccttgaaggttgcaccacacacgtcacctgagctgtccactctcggcactggcttcaactcgttctttgggtgctcaaagctcctcaatccacccgacgacgtaaagaaacaaccttcaaacaccaaaaaaaaagccatataatcatttagtgaactgctgctctacaacaatcacacaaacaaccaaagtcttggatcagattatcaaaatcttaatacctatctttctaataggtaaattctatttatcttaaaaagagtcaaaaacatttggagtaaagttggtacctttagggaaaggaccataagatttggcgcaacctttcttcaccatctcggtgttatcagaaaacacaaggtgcccttcagcatcggttccccagaagaacggcacactcccatcggcgtcctgcacattgacaacaagtaaatcaagttccgcgacttaaacattgagatcaagaatgtatagctgctggacttacagcagcagcaaagacagttttcttgacgctatcgaagagtataaacgcaaactttccatggaaatctctaacaactttgtccacagggtaaggacctcgatcacgtagtgtcctgtaagcctcaatcacaatgatggcctcgtttgtgattttgttcagtccatactgctgcttcagaaacggtaggttctcaatgtgtccttggaagagacagaaaatatcatccaccacagcaaataatctgtcaaattcaatagaaaccaaatcacattaccaaatatacaaaatcaagagccacagattactctaatccagtgtagatcttttcaatcatcttctatcgatgaaaaatagagttaaatagactctgtagttccgtattcctccaatagctcacaataatatcatcatcatcatctaatctactttgtagaacaataacattatcatcatcatctaatctactttgtagaacaataacattatcatcatcatcatcatctagtggagctgtagaatctctaatcccagattctaccaaaaatcactagctactgttatctcatcatcatctaatgtagtttgtaaaatctaccgttactgttcatcatcatcatcatcaagctatagtaccaacacaagcaagccaaaaaccataaatcctagatcgcaagccaaataaagtcaatccaagtaaatctgcagcaaaatagcgaatatatccaacattatcgcagatcaaatcaagaagattccagaaataaacaaaatcgaaaccgaaaacatcggagattcaaaatctactacttagaaatcaaagaaacaacaaagatttgactagatcaagcatataatcaaagagaagaggacttgaaattgacctaggaacacgaggatcaggattatcaagagagtaagcaacaaatccagaagatccgaagttaagcgtgacggagttgggattcacggaagcgaaatgagtagcgagagatccatctttcaacgcgaaagcagactcagacgagtgtggactctgtaaagcttcagggctattcgccaccgtcttctcaaacacagcgagcatttttctcagtgatgattttctcgggaaaataaaatttgcagaaagaagaaaaaaatggagcaaacgagaaaatgatgaggaaaaaagtgaagaaagaccgggaaggctataaaggaatcttgtaggatatacgtgattactattttacccctacgttattgacacgtgtcgtgattcaagaggataagaaagttttggatatttttcttttttctcaatgaggttaataaaaaagagttaattagatggataatcatatctttaaacggaatcacaattatctgattttaaacttttgataaggcaatgtagattgtaaaaatagtaatttgtttggataaatagtaacgcaatttataggaatgttactagtaatttttggaatgtaataactatttttatgataaaaagtttataaatttagtagacgtgtaaaataggacttaattacgtaattacattcattgcaaatgctggatattattggtagtgtaataatattaaatagataaacgattttgaaaacatatctgaaaagtatccattttattatcgtttgtgtaatattaggtgcgtttgataatgcagtatttattagaaagttgtcgcttaattagagaaaattttcctaagatggaggaattaatttatttagtagtaacgtataaaaaaggctttatttgagggaagaatctaatggtacaaatgaggataagatttataaaaataaagtcatgaaaatgacgtggcgagtacgtgcactcgattattaataattaaaaataaaattaaatcgaggaaagccacatgggtgatcataaaaggcaatatctcttaaataaaaggtcaatccaacggttcgattcgtcacgcgcttcgatcgaaacgtataactgacttaaattaaaataattgtatcgtattttagctactttttaaaattgacagcaataaaatttgtgtaaaaatgtaaatactttatagttagtgctcaggagaaataaaatgttgatagacgtctttgaacaatcaatggagtggaaggtgtggccgaattagtcaatttgttaacaaatgccaaggccaaatattttgttgggcttttagtttggcccaaattgtatacaatgcttgatgacaaactcggaaaaaaaaagcaaaaaaacaaaaaaaaacctctcataatacattagtttattatataaaatgttccactaaatcacacatctcctcctcactcaacacgaaacccttccaaattccttcactatccatttcaatttcatcctccccttgtccttgatgctccattgaagctatgtgaagctcatcaccataatcaaacacacctccacattgatcatcgatgtcatcaccatactcttctggctcagctttaacaaactttccattatcctcaacaccatggcttgagatcacctcttgcttttgctctcgattcttgattccttgcagattacgtttccttaagctctgtaaaaaactcggtttcttaatcttctttagcaagaaattcatcatcatttcttgctttacttctgtgactttcagtttctcttccatcaaatgcagatatgtcttcacgctttcttgttttcgtcgcagtctaaccagttctacttctaaagccattctgtctcttcgcagctcatggatctctccttctagcgactgcgtttgcgtttgagatgatgtctttcttctcttgatgttcttaagaagatgcctctctcccttcagaaaatgctcatttgcaaattcccatctctctgtatcaatcttcttaaacccctacagatcattaaacaaagatttaatttttaatgaagatcaaaataaccaagacaaaaactcaaaagtagttacgtacataagtattgagctgtctaacaaagctggagaaattattgtgcttaaagcatctagggaggcaaattagggcaaaagtctctggttcccaaacaatgaagctgttgttgtctctgctccatgaaactatgttgtttgtgcttgaatcctccactatgttgtatgttttcgtcaagaaagccgttggtggcgtttctttgagaccctctaatggaattggaaggttataatccattttgtgaacaaaaaacctatataaatttgagcttttttaataaaaaaagagagaggagagaatagttgtgatgaatagctgaagcttgaggatgcttttatgctgtctatatttttggggtttaatatttttggatagaaatgtattgcttttgagtgttttggataagtctatttattagttatctttgatgtggacaaagccgatttgctataaatggaaatgagagatcatagtgtcatacattcattggaagatgctacttttgtgttcttttgtcttctatgaatatcagaaaatctaaaatttaattaatcattataaatttagtgactatgctccaacatttataagcttcgttttcgcccatgacacgttgtagtgaatgcatagagatacgtttcgtggtttgtttgtttattctgaagtcagaatgatgggatttttggtggaaccctttgaaagatttgtgtagagaacaagagtatcctttgaaaatttgattgatccttgattcaattgaattgggttgggggaaaaccagatctaaccacaccaaatcaaacggttaagcacgacacaagcagaattatacattatatatatatatacaattaatatattgataatgcataattttaagaagattttgtaaagaagaggtcatttcaaatataagaaaatttatgctttaacttttgaagtacactaacactatataagtaataatacttgaattacagtttggaaagctcaaataatttattcgaaaatcgtagggtttttttagttataaatttcacgttcgcagctgacatttgttttttaatgatacttattagataaatacacactattttttttatgtataaaagcatacatcgcaaaagtatgttacaagaacaactatccagaaggagccgctgtttttattttactgcttaagactaaagagtaaacaatacatacaaattacacaacaagcatatattaatattgttaatgtgctttaacggtttctccaaacttgtaggttaagccgtggatatactttttcctaacaggatgttcttcctgtggccggttatatggtgtccaaaccggttcccccacgaacagcctcattagctgcaaaaccaaaccaccatacatcacaaaccaacaatcaaatcttttaacataagatattaagatgtaatatttcatttgcgtattcatataaattagtaaattagtatagagactgagtttggctttttgtaccttgatgtagttgctggcgtcgagtgtgaaccggtggtagattccggcaggaaggacaatgagatcgccaggttgcatccagatacggatccaacgatcatccttgtccctaacatcaaagtagccacttcctgctaggcagtaccgaatctcttcgtccttgtgaatgtgttctgtgaaaaagttcttcagcttttcttcgtagttgctgactttctcgggacacagatccagcaaatcctaaaatgaagattaaccaaagtaatcattctgcttgagaaaattagtttatagctcataagttacaatgctacacaccacacaaatagcttaattatttttaacgtaaaccaaacgttttaatgttcccttaatactcaattacagagaagccttcttccttaataagctggtttctaaaatgtttgtagtcatactaccccttaatggttatgcaagattatagtcctactgtcctatgatacatgtttttttttttcatgagattagcgtgcagagataacaagtaaaggaactgaaacatcaatagccgcttatggtgagcatgagttaaaaaagggtgatcagaaagacataagccgtagcaaatcctgtactctaatactcataaggcttctttcttcataggctggttttgtaaggtttgagtactaccttcattatgtagtcctacactcctactgtgtctagtatatgtcacaatcgttaatctcatgagatcaacatgcaacgatatgcaacaagttaaaaaacagagacattcaattggcatttatgatgagcatgagtgttcctaagttaagaaaaaacagtgatcaggaagagataatatgcgtaccatgtaatcgtaacccctgtcttctctaatcttgctaagttcagaatcattctcgtagttctcagggttcaacttccagtacaacactcccaactctacaaaacacaacaactatatttgtgatatttgcataatttatgattctgttaaatctcatcttgggtaaatttgaccatttccttagttttaagacggtttacgtttagtttcctcatgtagaatcactactcaatacaataaagcatgaaagattgatgtttttcaaaagttgcaaagtaagagtaatttttaaggtagagaattgaaaagacctgccaagtaatccaacgagacgagttctttcgggttacgatgatgaggaagtctctggtcctcattgctatcatccataaaccatgcctgcatcaatcaacacttaagcctcagggaaagaaaaaaatctcaagaaaaaacttttgattcaattttcaatttcagctgcaaaacggtaaaatcaaatcccaattctcagttctgccaaaatcaaatcaaatccccaaaataattccgaaagagcaacgataatcactattgaacgaatcgagattcgaaatcagaatctagaacctatgaatcagaactcacctcgagagccattaatgatcttcgttgtgtaaatgcttttttgatttcagactcatcagagtgatgaagatcagataaataaatggctatttcctccgtcgatgatagccacgtgtacgatcactttaattcgtattattttcctttctcctaatttttattaattctggtttcgaaattctaataataaaaaatcgttattttttcttttgcacgaaaaaaacaaccgttttcgagccacaatgatcatgaatgaataagaccaaaacattggctcatttgtatgatattgtattttctgaggttcatatatttccatctgatttgaactagaatgatctatattcagatatataatttatatttcaaacttgaaattagttttaactagaaaaaaaaaatgtaatccaaaatcgtacataggtatatatattttttttccacaaatcgtacataggtaatgaggtaatgtttaacactttaacttgggccgtgtaatacaaattgggccgtttaacactttaaattagtctcgaatgttatataatgttttttttttttttaaattggactagagaaaaagtagtctagtatgaagtacaaagcccattccttgtacccagcaacagcatatcaatttatttttttgctaagagcatatcatatcatatcaatttttttctcttctatattttaatttttaatacttcttagtcataaatcttttgaccatttattattaaatttaatctgaaacacaaagtaactttcttacaaaaattcaaatctccaattattttgtttgaatttaaatattttttaaaattccaaaaaatctcatatatataggatctgactttgtttaaatatagagaaatttaactagactataataaaaagacttcataaaatttattacccaaaattagaaaaaatcaggtttcaatactgaaaatagactatgaatatatggccttatgattgtagttgttatattccatgcacacataagtaatttctttctatttgatttgttttttaaaaaaaaatatttagaagtttaaatttaaaggtcttatattttttagagatgggacacaagttaaatttatattctttagaaaatagattcttttcaacagacgtttaatccaatatctacatctggaagatttatcattacaccaaccccaataatataagtaatttaacataagtaatttttttctatttgattttgtttatgtgctctttaaaattaaccaagatttcaacggccatacttcttataacttttaataatatctctactcacctcattctcatgaacccaccaaacaaaaaaagtaaagaaaagaaaaactaataaagaacaaaaaaaatgtcctcttcttcatcaagaaacgcctttgaagatggcaaatacaaatcaaatctcttaaccttggactcatcatctcgttgctgcaaaataacaccgtcttctagagcttcaccgtctccgccaaagcagctgttggtggctacgccggtggaggaaggagattatccggtggtgatgctcctccatggttaccttctctacaactccttctattctcagcttatgttgcatgtctcttctcatggcttcatcctcatcgctcctcaggttcaatttcaatttccaatcattacattagttcaggaactaattagccactgaaattcttgtttagttttagattcctatgtgtattagtaatttagtatagaaattattttttggggggtcaaactagtgtatagtttttgtttaattagtaaaatgttatgagttatttttatggaaatggtactatcggaattgttaaatccagtgtatagtttttgtttagggatttagtattagtgtagagtttagaaaaatgtaaattcgctacaatctcgttccattccattttgtgcaaatattgcatgtgactgactacttggtcctttgaggtttagtgtgaatgttcatgaatatgtaggtccatgtattaagatattctagttgaatccaaaaaaatcataataaatacatatacattgatttgttaggacttataggatttaggatttaggatttaaccaagatgtatctataattcagctggatgcatggaacacattatgccacgtttaaattagttatttttctgaaacttttcttttattattgtttggctcttataagaaccttagacaagaagaaaagtaagaacaaaaatgcatatcaatgggtccacttgatgtgtttatcctgtttttgtctctagagtctctcgaatttctaatatcaaatgttaacattttattttatatggttgtaaatcaaatttcttggctatgtgatattataacagttatatagtatcgccggaccagacacaatggatgagattaaatcaacggcggagattatggattggttatcagtaggacttaatcactttcttccagcgcaagtaacaccaaacctatccaaatttgccctctccggccatagccgcggtggcaaaaccgcgtttgcggtcgccttaaagaaatttgggtactcctcgaatctaaagatctcgacattgatcggtatagatccagtcgatggaacagggaaagggaaacaaacccctcctccggtgttggcttaccttccaaactcatttgacctagacaaaacgcctatacttgtgatcggttcggggcttggtgaaaccgctcggaacccattattcccaccgtgtgcacctcccggagtgaatcaccgagagttctttcgggaatgtcaaggtccagcatggcatttcgttgcgaaggattatgggcatttggacatgcttgatgatgatacaaaagggattagagggaagagttcttattgtttgtgtaagaatggtgaagagaggagaccaatgaggagattcgttggtggacttgttgtatcatttttgaaggcttatttggaaggagatgatcgtgaattagttaagatcaaagatgggtgtcacgaggatgttcccgttgaaattcaagagtttgaggttatcatgtaaacataagtttttctttaggggctggtttttctattgtcaatatcatcagcttttgttgcttatggttttacaaacttatattgtacaactctttaagtcacctctttgcttatgatattaacccgatcacattcacaatactagaagagtgaactttcaaaacctttaaaagaatatcatgtaatttacatattcttctaatacaaagatc

SEQ ID NO: 826 - DNA, 37511 bp, Arabidopsis thaliana
ttactttaaaaatataaattagacagctcagacccaatatctcttctagctagaaaaaaggcacaccaagaaaaatagataatacaaatttgccccattagtttccatattcatgtgactttacccaagactataccttaattcaacatttatgtttcctatcagaagcaatggaaagaagcatggaaacaccttgtgtccaaagatcatattccctttggcttttgcactcgaattcaatcactcttttctccaccgtcttcagcccgaaatacctcaaattctctccaccctcgagcatttcccggccaggccacgccggtaatcccttaaccaatcccaccaccacatctacagagatcaatacatcaaaaattcagcgacttagtgacaaactaatttagttatagaccaaaaacttaagactaatgtgaactgaaaaggaaagtgtgtaataatggaattaccattagacaaatccgttactttattttgttttttggtgatttgttgaaagaccaaaaagaaacaaagagactagctagtattattctaaacagattaattaatcgtttcatgaaagtttggatctgtctttaactttacgatccaatagtctcttaaacttcaaaaactattcctaagttggtacctttttgaccttttgatctattggattcccaataaaaatacaaagcaagagtaagagagaagcaaagcatcacagtttcactcactctttttcttctttgtgatggtcccagcaacatgtttgctcttagtcttcaatattacctaccgcaataaagataaaatgcacattaaaacgatatatataacatatagtttggtttccacaataaaaggtcgatacacaaattaaattcatgtcactaaagcatactataattcctgttttacctgctttgttctattaatgtagatcgaaacaactttccaatgaagatcacctgaaaaatatggaatgagtatttttaaaaaggactaacaaaaattatgaaatggtgtattcaaaaattactcaaaatgaactaaactggaaaaactataagacattaacaaacctttgcgggtgcgtttaagcaattcgcaacctttagctagcaattctttactgcaaatcccaagaaaattatctacaggggctaactcgccacctctataaccaccaccaccgccttttggtgtacccttatctacaggaatcacagccgcaatgttccatacctccttcaatgctcttgcctttaattgtgcagctcctctcaaagctacatcacaaaacgagaataggttaagtgattaaccataaccgtacgtaagatttctaactaattcatagtggtcaaggattgtttaggcctagaccaaagtttgaaaaagagtttaaatcatggttggtcattgttacatttaaattgacggactatacataggtttaggaagaactactacacttttatattatggttcataattgaaagtttttaaaatagaaggatcaggttttgagtcttttttgggttatattttgacataatctaaagaccggattcatatacataaatttgtatgaacgtagcaatttttaacatttcactaacgacatgatcacgtaacgggagaaacatacctgtggcagcagcggcggtcaaagtcatgatatctccggcagaacgaacgttaaccgcagaactaacaacggaggccaagtgctcacgatcagctcccataatctctgcagcttccacacacttcgccgccaccaaagtcgcggcagaagccaccgcggagtcatttttggccacttgctcgtcagttccagaactcgactgagaggcagtggctgcagcgatagcagccaccgcggcagccactccagctacagatacagccgcgtgaagctgtgcattttgtgcacgcgtctcttctctcttcttctctcgccggtcctttagccaacgaccaacagttttagaccctccggcggtgccgggaatggctgatgaaccacgtatgtggccgttaaaggaagggctcacacggtagaattgctgcatgaatatttatcatacgttaaagtcggataataagattatgcgtcaaaaagatgcagaacttccgtgttaaaaaagtaaaattaatttactagttgaaacaagtaaactaatcattctttatatttattgttgaaggaataaaaaggtgtaccataagagaaaacaatatattatataaaatattttccataataaaaggctgttgagatagaccgttgtgaatataagccagccaatatttgggtccaaaatcataaatgctacaaacacaactatattctttttcctaaattaattactaaatcgaatgcgtttctctaatgaaattaataacattaatacaaaaatagaaattaaaaataactggataagagacaaatactgctaaactgatagtgagtgacagaggcttgggaagaagagaaagcctgagttttgtgtttcctctctgtttttcttactctactgcttctacttacttagacagccttttcgttttgtcaacgtgtttttttttaatttagattatagacccagcttttttattcatctcatagatttaacccacctaatcttaattctatcacactagtgtaacttttaacaaaccagaggatcagaagtcagaataatccactgataaagaaagggactgatcaattactaattaagaaatatttcaaataatttattttttcccacaagattttttagctcctgtttagtattttctaaaaccagttcaagaataaaactgaccttaaagtcgtcgatgtcggagggagagatcggaggactgtcggtgaatgagctatgagaaagtctccctgatgttcgtggcgatgaaatctccggctagcacaaaaaacaaaacaaattaaaatccgaaaaaaaaaagttaatgattttcactatcttaatacatagtaacatagacaaaaattatgattcaacgtgacaatatttgttagtaagattactaaaattgtcatttggaaaataagtaataaaactttgatttatttcttcctaaatataaatacgtatatatctttagattacttactgactgagccatgatacgttccatgaccattaaagaagtttctgaagaagcaaaagaaaaagtatttccaagaacgatgccgttttcttcatcttccggcaccaaagtgacgtcagaagaaccgttttggatctccgagaaacgcatttgcggcggttgagaagtcggtggagacgcgacgacagctcttgaaacttcagtagcggaagcactccaagtacgtgacaaaaactccatagaatctaatggcgtttcaggcggtttaaacgttggatttgacctccaccattgttctccaatcgttttacttttttgatccattatctaatgaaagagagagagagtgtgtgtgtgtgttagagagaacgtggggaagttatgtgaagctttcgttgtatttaaaagcggtcacgagagagatttttagagtcggcggttgagacttgagaggtacaagttttagcttactctaatcaatcgtacggttggatttgttttgtcgtgattagattaacacgtggctttaccttaatggatgattttaacttctttagtttacactactacagtgattggtactttctctgacggtcttgattattaactccgagttaaagacaaaaaataatagaaatgaaaattcattaaattagttagtggtgaattaccaggctaattaattctagctaccatctaaagtcttatgcccctattaaacctttagttgatttgttttaaaattaggaaaatatttaactgaaaaatgacaaggtataatgaggttttgatttattaaagaccaaaaaaacatatatatcatattgatcaattacctagattttatatactaaatcttctctttgatcattatatatgcacacattaatatgaaaattatcaccaataattaattttactattaggacgtacggattcagaatacttttaatattggtatgaagcaatgtgtgtgtttttttaacatgataccaagaaatctaaaagttgatctggttaatgttgatttgaagtgtggtcaacatatcaacaaattatacatatataacattccatgcattaaaactatgaagtttaagaagaatcataatcctagttaatgaattttaccatcgaacctctttttatttatatttttcgatgcccaaatttagagcatatatgatggtcctcttgttggaattactttagataataaacatgtaaaaatagtggggagtggaataatgtgcacgtggaggcgtgactggggcacgtcatcatatggaaccacaaatctaatctatgtaaggttgtgtccgtgacagttcagaacactcttcaccaccttctcctttcagctttttgtctcttctttattttcttttatttttcatttacaagagtaataatcgaaactattcactccactaattctttatttgagctcatactttaaaacagttcagaattttcatagtgtaggctcctcaatatttgatttaggttattcgatcaagttagacacaatctttatatagtatagtttggacaaacccaacaaattgtctcctcgatttcactaatattaacgggaagcttttatgttttgtgattttctttgaagaatcgaaacattgtcttggccttgacgaaagatgaaactattaatatattatttataagaaaatatgtcatatttgaacaaaaaaagattagtttattaaatgtggacaaactatgagaatgtttgcagccgaaggttactaaacccaactaaagctcttttagccttttcggcacgcgggttcacattcaagtttcaacacataagtgtatatcacattttaattaaccgtaaaagtacttatttgtcacaatttaaatacatactgtgaaaaattaatatgaacttgatcaaatcatcttgcgtttttgatagttttttgtgccaacattttaaaactaagcaacttcgaatgtcgacaaatgtcaaaaaattagtaaatgtaccaacaagacaaaacactcggtgggagatgtaagccggagcagatccaaggtatctaaaaagtaaaaatacacgatttatcggagtcaaagtaacatacatggaagcaaagcattcatattttggtttatcgattctgtcatacacatagtcataaaatgcggatacaaatcatgctcgaaaatgtattaaacacgtatccaacgtatgaaatgagcatgtcgtacactccatcacacatttggcgagaactcttaagattatcgaactaagagctgcattatcgaaatgaaatcatcgaccatgtcaagaacattattatcaatttacgccaaccatatgcaacattaccgacacaggtcaaccgattcacgtcgactatgggctattcatttttataagaaaatctcaaaactctgataattttgaagatcagatttttggaccataagaaactgagagaacttaggcctcactctccacttgtctcctctttgacctcattagaaggttttcaagagatttttttttttttactaaaagatttttcaagaaatttattaacactttttgaaagaaaaaaaagaaaaaaaacttatgtaatctgcgagataaatgagtcactcaatgttttttttttttttttttctggagcaaagagtcactccatgttagttttggtttcctatgataataataacaaaagtgacatttgcctaatatggaacaaataagcatcaataattaaatagcggccccaaaatccctatttttgttccttcctttgaggtaatgagaggatagaaaagacagagaagctgtgtatgtacgagtacgagtgtgttggtagctatctttttcatcatcaatttttcttagttacaaaacaatgtatatgatttgaaataatatgaacaaattgtgtttataacttatattttaaacgtataactttgattaataacaaaatgaagatgatgctaaatgtaatatattaaagtgggtaaaatagttaatcaagttttattatttttctgaactaacataaacaaattggatacgctttttcctaaagacaatcgataatattaaggctttgaatggatgcaacaaataaagcggtctaatttgtttgcggtctagtccacttcatttttgaagcggataataaaccgctgcaaaccaagtttatttgtacgtaaaaacggtctgcagatggtccgctgcggttttcttctatttttttggtctgtatcacttagaactataattgatgaatgataaataaaaagtggtttgatccgttgacggttttgtccgccccaaccgctgtaaccattcaaaccctaagtaaaaagctatatatgtagatgggcctagaatatcccatcactagcttggatcctttttggattttgccaaatccaaaaggaattaatagtgacaagctagcgcctagcggtggtctagtgatggtggggtgtcttaaaggaagtatagacatggggcaaaggaccatctataggtattaacctaaacgattaagcccttaaaaatccattgaagaaagtttgaacaaagcctaataaaatttctaaaggtttgtattttgtagcatctgcggaacatgtcggtccactaaaaagtgacaaaaaaaacacgaagtgacataaactatttttctcattcgactgataaatattggcaaatgaaaaagtaatgaaagattttacttggcaatgtaaccaaaagaaaatgcaaattgaaactctttgtaaatgcgatgaggaatttcataagatcaagaatgatttttttttaattcactctatgaatcaactatcaagcacaaaagacgagtatagaacaaagtcacaaactgaagtggataaagatagaaatgaaataaaagataggatgagttcgagggtactctaaattgttctaagcgcaagcccagcccaagatcctaaaccaaattccagaatcttcaattataactgttcagcagctatacagcaatccaatgacaagccacctagaccaattactttttttcttaggccaaaaagtctaccaatcacacctattcactagtaaatatgcgttcacacatacacattggtccattttttttgtatcatgatgcaagtaccaaatgccaaaaaagaaagaaggaagagaaggacaatctcaccaatcttaggaagatgcagctactcaagttaacaatctgaggaaaatccatatttataagttataaccccaaagtatggaacaatcttgattcttgagacattagtatataaacattgaggctatatgaaacactactttccactatcagtcacccccaaaagaaaaccaaaatagagaacgagattcatattatacacacaataaaaccatataatatacatatgattaacaaatacttggaatgaataatttggattgttctgacaaatccatcaaagcctcctccactaactcctccagcaacttcaattctaattcctctcccatggaatccatttccaatctcaaactctcctgtgaaccaatctcagctacttcaatcctcaccactttattcaccgccaaactgctcaagtctccgtcttcatcccaccaccgatcttccactcttccgttacccgttaaacactcttgcattctgtttatcacataaacccccaatggcttaccagagaggatcatgggactactacgaggtccaagatagctcggtgttagctccaagagcagcgtgttgacgaggtcaaacactagattcttcacgtttgatccgagtcttttctgttccgttgagtctgcgtagctgtttctcagagatgggtctagtgggctctctgaggaatgccatttagacaaaagattgtccgagattgcatcgagatcagctgctgataagagtgtgttgataaggaggcgcaagtcttcttcctcgtctcttgcggaagtagtagagcgtttagatgagtaacaccgagctactgttgagtcatcgaatgataaggtccgaccaatagaccctatgggaggtgattttcctaataagttggatttcatctcccgttctgtttatccaagattgaggttaataaggaattgatatgaaatgggataaataacaaagtgtgaagctttaaaaagaaagcttaccaagagaagatgatgatctattcaagatagaggaattaaaaaagattccatcctcctcatcaaaagaagtttccaggactgaaatgggactaggctcatcgcgccactcgctagagtttccgaaaatggtcggctttgtaattgataagcctccctgttgagacacataaaaaagaatacttgtttgtaaataaaagaatgcaacagaggaatggagtgaaatcagtaaatgtgtgtttatatgagtatactacctcccgagaagtcatgattctggcagacactgatgcatcatattcattgttacaccgagaatccaagatttcaggggattcctcataagatctctccttactggctttcttgctccttgagaaaagaaagtttgagactttacctttcagagaccatttcaagctctttgactttgtcagctcctctggaactctggatgatttactcttgttggaactatctagggatttgtgaccaagacttgtcgatgattcagggagagattttgatcgtgtaaggcctttaggaggctttaactttccttcttctctactgaaattaccatcaaagcaagatgcagatactttaggaccctcctgttcattaccattgcttgtttcttcttcttcagttataagatcttctcttaaatctggaagtgcaagcatatcacctaaggaaatattagagcctttcttttcaataactttggcctcctgcaaattctcattggctgctgccatcaatgcccatctttcagaaagccgtttcttggcctctctgcagacagatgatgactctggagaacccgaggctctgctaaaaggcgaagaagaaaaagggctatcatacttgtttatataatcccatgaatgcctagaaaccggtgacatgatttcagaatctgcgtagtcgttaagagaactatcatcgcatatatagccgttggaaaagacagaagattgtaaagtttcttccttaagtatctggctcttcactctcctagccacatctcttgactctctcccctcaaaacctcttggagaggttggacatgatgaagcctttgtgacttgaccgttaggtttcagaacaactattcgagttgattgctttgtcggatattcttcttcaaccggccatttgaaaaaatcaagacccttgccactcttacttccgtctctcgaagattcaatggctggttcatttccaaacttttcatcagcaacggtctttgaaggcttcaaaatagtgatccgcttagacttctctgaggttggtggatctgtggactggaaactgtggagatgatgagagaagaagttattcgactcctgcaaaaactcgaggaacaactccttattcgaactcaaaacttccatagcttcttgaaactccttagaatgtcgaagttcatcgtctgtaaccaaacgcttcgcttccaagaacttttcacggacaatgtccatcttcttcttgcttaatccctccacaccattactacttagttccccctctttctgccatatctcatagacatttttatattccccgtgacttaacgacctctttagacgaggctttgaactataactcctaggagcagattgtgtctgaggaaacgaatcaagacccatcaacttagcaaccaaatttgtcgaacttagcttaacttccatttctttcgacatttcctgttctaaaagcatcttcattggtgttccattgactccaccattcctcacatcctacagtcacaataaacaaaagattaacactttctcattacataaacagaaaacaatcagtgaaagcaattgtctttacaggttttaaaactcacaactttatcttctatctgatcaaattgattccccttgatagaccctgtgaaccccatcatcatcatcatcattaacatcaagtgccataaagatctaaacttcaaatagagatagaagaaagctaaccatgatcaaaatggggtttctcagtgagcagtttctttccattaccaacagttccaaaatcaaacagattcaccatccgagccaaacatccatgagcctgaacgtttcttcttcgttgcttattcatttcttcaaagcctgaaacatcacaaaatcagaagagatttttctcaatcaaatttcggatttaagaaaagaaaaccttactgaatattttacttggactttgaaaggaaacaaaatcttgggaaataaagaaagaatcttgaaaattaagagcaaccaaatattcatcaaatcagaagcatttattaatcaaacttcgtatcaatcacaaagagatacacatacactaaacttccagtaacgtttacaaacgcaaacgcagaaactgcgttaccgacaccataagaacagagagagaaaaaaaggcaagttgggcgaaaaacaacgcagaaaacgttataagagaaagcgatcgcaaaattaaagtcttctgctttctttcttcaccaaacatttcgctaaaagaactgtaaaagtaatttcaccaaaaaacgacggcgtttcaactgacaaagactgcaaaaaaacagagagacaaagaccagtctgccggaatctgcattctccggcgaaaggtacaaactttatcgccggaattttgattaacgcaataaagaaatgtaacagtaacggacaaatacagtaagagaaagataaacacctgtgtgccggaatctacatactccggttaaaattcagccggaagttcaatttacaaattaaaatagaagctttatcgccggagtttcgattttagaacataaaggtagaagctttgtcgccggagtttcggttaacgagataaagttggaagcttttttcgatatagagtcaagaagaagattatggtgacaacaccgacgcaatgtcggacttgagacgcgtttattaaatgcgattaattagagacgacaggtacggaagtggatgacatatataaaaggagagagaagagaggattggtgtgttgtccatagataatggagcaggttacgacttcggaactacacaacggagttaggttttcttcttcttctttctaaacgcgtctctattattattacaaggtttgtgttttaatcattaattaatactaggaattaataatgtcggagaattttatactatgggtgattaacataattaatgtcttgtaatcctttttacttgattagtcatattgaaatattcggaattccttaattatacgttctatttgaataagtatttacatataatgatttttaccatttgtgagttatcaaaatgactcaattctggctgtcattggagggaaaaaatatttatattactcttacatatttgttgatttaaaaattatatatagtcaaactcttaactctattttattaattaaaatttttagttatgaatgtggaaagaattatttggaccccttattctgtctataaatattgtagaaaccaaaactataatattgcttttaaatcatgtagggttgtttagcaaaaataaaataaataaaaaactatagtttactaatttaaaacaacaacgatcgaagttattattattttttatacttttattgcatgattgccgccgaaaatcaagatgttgtgtttctcacatactgttcggatctggtgaagatggtgtctttcccaaccgaatggccggtcttctcagtgtatttggaggaattgcagagtgacaagaaagaattttcaaatttttctttatctttaatttctcatagtgcaaatgtcaaagcggataatttggcgcgtaaagttcgtgtctaaccgcatcatatcacttatgtaaacatcattcctcaggaatgaatattttgagctctaattaattttggatgacaaaaaaaaaaaaagattgaaaccagaaaggtgagaaaaaaattgtgtagcaaaaaaaaagtgagaataacagtaatcatttccaggttattaaggcatgcaaaaaatttaaaatttgaaagttgggagtgtctttcaactatacgttaatggaataataattatgaacggatgctatcatgattcgacagttctgtaaaagatttcattagttgtgtgacctatttactttggatagggaaactttgtgcttctgagttctgatggggttggaatttatttgatagggttcagagttagagaaatcattaataatttaaatttattggcctaccgcatagagtaactatctaggaataagtataacaacttgcctaataaagactacattatttcatattaataatttcttatcatttattatattaatgtaatatctgtaaataccaaatactcttcaatcattgtagcctttttcgcaaagttcatggctttgctatccgaaaaaagtctaaaactaggagggaaacactcctcaatctttgtttattatttctgttagttaaagagtgtttggtttaagtaaaccatgttattatcaaatttgagtagcaattaactaaccagtgtaatgtgtaaaccaaaatgaaaccctcttagttgaattgaataatagaataagtaaaacgtttttcttctgtaatttaattcgatatggtatcaaagtgcttcgtcgctaaatcactttaacaacttttatcaaaaagaaaagaaaaaggatgacttttactaacatacacttaaaaaaaaaaaaaatctaaaactaatcaaagtatgaacatttatataaattcaaatagttttctaacctgtgtgaaaacgataacgataaacgatggtttatgaaacatagatattttctgttttactagcaaaattatttcattatgagcaaaactgagagttatgtttagctctgaattacgggatgatatatgttgtagaaactagaatgtgttgttgttttagttttaataaaacatttgcatttttataaaataaacccaccatcccctcacgcatgatatgttgttaatttttttttaatctattaaagtattaattttcaactatgtagcttatactatatgttttcgtctatcattgattcattcattcatgcctccgcagcaacaatacgttattctgccaagaatcatatgtttaattttatttgtatattcttttgtcagcaaattatttatatttaaaaggtaggaattattaaactaatatcaaaaggtaaaattctctttgctggcacaaagatttgatgctaattatgttgctttgtatagttgtaagttgtaacttttaacgtttgaaatgtttgtgtattaattagtctccaattgtgttaataacacatctactatgtaggtaatagttcggttaaaactctatattggcctattaatgtaattttatataactagttaaaatctatagactcacattttgaatcattttcttttatgaactgtttacatgcatttttgcgagtttgaatctaaatacgatcatatagatgatactagtacaaccatttacctatccttgttcaaattttgtttttttttccgccaaatctttgttcatttctgaaccgatatttgcaggttagaccaactccatccaacatcacatgaggaggtcttcccataatataaatacaatatgtaaaagaaagtataatattttaatgtttgggtatttttatatttaagacacaatgtctcaaatgtctttatagaaacattttggagagagatgtctcaaatttaaagacctttttatatttaattattcatatcttataattataattttttaatatagctaaagaccctctccttttatatgcaatagagatgctcttaaggttctagtcttcatatatttttttaacaaacattattatacaaaatcgatttctataaaaagaaaggttcagagttgaagagtaattgagagtttaggacattttatgttggcttttcttgggggttagatgttaagaaacacttgcttccgttgaagcttccttcttcttgtatctcttcgattattgacttttttggttgcttcatttgatctttgactttatttgacgttatcgagtcacatgattttcttcctgtgtggccgcacccaaaacaaaaatgttaattcgtgatctccttgacatgtttttgatcaatatcgtaactttgttacacaatacttaattctgatcatccatggtggactggattttgtaatgcgttgggccttaagctatcatttgttttcttataaaccccctaaaaaggcccaacgcatgtggtgaaatacaaaagcctaatctcctccgtatttacaactttcactaactttctaacactagaattaaatcgatgcaaaccaataaaagctcaaataatttttagtttgattaaaacaaatatgattttatttggtcttactcgaacatttgatttttttcatcaatttatacctaacattcaatttactcgaacattcgattaacgaagaattgtcaatatcgtcgtaattaatcttttctcattaattagttaagtgttactcgaacattaacgcctaataatagtcattatcgcccatatataaactgtttttcattgaatgcagaggtgacaaactccgtctattggattgatatcaattgtaacgtgaaatcgcaggcttaaaatttttattcaaacccatgattttaaagggctaagtacgtacatgatgattatggcaaaacgaaaacgaaaaacacaattctaaatcaaatccatataagcttaaaacttaatttggtcaataacattaaaaccaaaacggaaaaaaaaaaagagaggaagaaggaaagagcaaaacctaatcgatcaaaatagttatgtttaaataaaactaacaaaccatactctcatcaaaggttttctctaagtattcgaaccctagctagtcattaagatacgatcgcactataacgatcgacgacgtcactcagaacgaacgagtttcttcaacttaaacaaaaacttacgagctattgattcttgacgatgtagatctctatcagatttggcttgttttaacttgtagctcattagatagacacaacgacgtcgtttataatcatcttcttgactcgataaaaagtcagcactcaatttctctgaagttacctctaaatcacatgttgacgacttctttggatttccttctctatcccatactgtttcatagatccaattctcgctttccaacgtcatcttcttcttctaaaactgaaatatgttaatctttttcttctgtctctctctttttctaatagtaaaggttttgttactactaaaccgaggatttgtgaaaactgagggattcaatagtgttatagggtctacttatatagccttttatgtttccttttttttcttgataaagtatgtttccttttattttgttaaaaggataatgtaagttttctattttttctgatggaattatcttatcatttgcaggaattgtaaaaacaaaaatcgaaatctcttttttttttgtcaactacataaacaaaacgaaatcttactaatataatttggttaagaatttcattacaacgttgaatttcattacaacgttgattaaaaaggcttacatagtttagctttttaagtgggccaaatatttgggcctttgagatctcgtcaagtttgattaaggtctcagaatttctttctatattcacttaatattcatgttacgacttacatgtcgtattttaccccaaaaaatacttattttgcaggaaaaaaactcaaataaaggaaatttaatttgattagtcgaagatgttaaaaagaaaaggacatttaattatgagtatgaatcttttattattacatagattttttaaaaaagtgaaaaacagaagagaaaataataatgaagagaaatgccacgtcatcctaagttatacaaaacgcccaatcagccttcaaaaacaacaccgttgggtcttcaggagagggctctctttgtatctttatactttgtttacaaaaaaaaatgaaataatgaataaacactctttggtaaaataaaataaataatggtatgagccctaacttgagccctaagcaactgaaatgcatctgcggtgacccactcgtgttctcattttctgtcgtttggtttcttctctccacacgtttccaatatcttgagcgatgttaacggcgtctgctgatgctccagccaatcctttccttgtgaatccagccgcgtaaagtcccgatttccctttccacgcgtttggaaacggcgatttcgggaacccgtttttcgaaaacagatcattttcttggagccatgatgggacgttgctacggtaacccgtggccagaaccaccgcatcgagatctaatctctgaccgtctactagctccacgtgactacgagagaaccgtttaattcccgggacgatttctacttcaccggatttgattttctccatagctccgatgtctagaactggagtcttacctgaaacaatcttgagctccattgggcccatcgtgggcctctttaggccatactttgtcaaatttcctaaaatcagccatgcaagaatcagtagaatcttgtctactagccacagaggaaaccacttcatcaacatcatggagatttcaaaactagatttgcctaaaatctctcttggtaacacatgaaccgagctacgaacaaccatggatgcattagcattgtgatttgcgagatcaagagagacttccatgccggagtttccacatccgacgacaagaacactctttcctctgtatttctcgccggatttgtactcacacgagtggatcacctcgccttcaaactccgttgtgagcccatcgatctctggaacaactttctccgcgttttctcccgtcgccaccactaaccaccggcagatatattccatctccgaccccgaggaagaggaagatgttgtcttgatgcgccagagaccacttgtctcgtcgtatcgagcagactggacacactcgttgaactgaggagtaatttcgaatttgtttgcgtaggactcaaggtactcgatgaactgtcgttttgttggatattccgggtagtcttccgggaagggcattttgggtaattgacaaactttctttggtaaatgaagtttgattctatcgtaagttcgtttttgccatagtgaagctatgcaatctgctctctccaataccacaaagggaacaccttcctcgcggaggcaggctgccgtggctagccccgatggcccggctccgacgattacaggaccgttaacccaaatgcaccgtcttctgtcggaggaatcttcacttcccatgagcctaaacatgttctccatctttaggggtgagtttgatcgaatcaagattacaagtagtgaaaatggaatagtttaggtatctttagaagatgattttgatcgaatcaaaagaataggtagtgaaattgaataagctttttttttgtttgtttgttgatagaggaatgagatgctttggaatgtgtttggaggaagaagtaatggtggatgtgtttatatagtggacgaagtaagaggaacttgcatgtgatcttgtgattagcgcgttctaaggctaatttttaatcaatttaataaatgcaaaagttcttcaataagtgtgtgtaataatttatttaggtttcccatttaatcatatgctttagctaaaaatgcgaaatagtttaagttattttaaagcttttttccttatggaatcattcgattcttttcttccaaagtctctgatgggactttgattagagtccgttttaatagtattaattagttggtgatgattataatataattgctttatggtatatattgagattgtacttactgattaaatagctttgaatattacaaagatatagtttcaaaatttaaagatgtgaaagggtaatcaactgggcacaatggaccaatcataatgatattcatatcatccaaattcttctgatcatatggtccaaatgataatgatatgtacatcatccaaattcacccatgagcttgtagagatggcttttggagaatataactggattgggaaaactacttgtcatatagatatatagacatatttttacaagtgttaatagtagggaacaaaaaataaaatcaatagaaatacaagtactatggtgttcttttggtggatactttgacgttatcattatagcataaaacaaaaactggcactctcgtaggataaacagaaaatcagatgaaattttagtaggtatgttataaactagatcaaaagccaattttaggcttaattattattttttgagctatttagagtaaacctataattataaatttgtttacaattttttttttgttaactttaaattcaaattaaccaagtttatgttgtattctagagtttatctcgttcaagttcaccatttaggggtttgataatctaggtgatgcatttacatgttttggtccatcgataattggtttggagtaagaatggttgcgtcggtgatgaaaatatttgcataagcatttaacgtatgtaatatttttctcgcatggtattaattaagttttagtagattttcatgtatatttagtagatgattggcatgcagtacctatatgtgcgtggttgtaaatcgttacacatcaaacattaatcaagcattcaagcctttaagaactgtaaaagaattcgtcgatttatttgtctgaaacggatctgatcgtgattgataaactattttccggtctaactcgttattcgttttctattaattgtgatctcttcatttgtcttttggagacaagattatctccttttgaaaccgaatgaacaacattttcaaaatgttcctaaacgagtagcttcattagttaacattttcggataaaattactcggtaggtaagttttgttcagtttgataatctcgtggcaatgtgtgctgacaagtatgcaaccacgtggataggatggtgagcccagagtgggggctcaattttggcccacttcaactcgtctgccgactgctgactgcttaaccagtaactacgtcaaatcaatttgcaattttgctaataatacagtttttttgtttaggtccatttattgtaagtttgtttattatcgtcttttaataggatttttttgtcctttatggtgttattcgctttatattactttcgacgaatgttccattacaaagcgctttttataatatgaactctaaatggaaaagttgttatttatattacaatttttctaatttgtgaagttagtgcatgtacaacggacgcttgtggttgtacatttatattatcttttaagagttcatcagaattcataatagatatattgttgaaactatatcaatatgcatactcgatgtaatctgtattatacgaagaaaaataaagatagatatcaaatttaaaattaaataatttgatgaaattgttctactaggatttctatctttttgaaataagttgaaactctccgccaaaaaaacggagcaatagaatttgaaaacaaacaaaaggtaccttatggaagatgttatactatcgtttggcagtgtaaaacttgtgtgggagatccgggtatgagctttcttcgatggtcatacacgtattagagtaatgtgtgtattcaatacaaaactaaatgacaataaatagagatatttatatttttttatatattgtcaggaattttatccaacttctaatttttcgagatgatcatttattaattttagtgttctggacaataatcgatagatcaaatttgggtcagaacgattatagatcggattagaaaatgtgtagatcggattctaatatcatattagaaaaacatatataattaatcaagaactaattagcaattagttgagaaacccatatctctgatatattgtcaagatccttgtctaatttccggtgtggaatataattatacctaataacacggttcgacgaagcacatgttttattgatgttcacggttgttaatctcgtcatttgttggagagtctgtttggattggtcgtggtaaatcaattttaaatcgatgttaggtgtccattgattatggattatgagtaaagaaccaatgaaggtagattagattgaaactcactaaccggccttggttagacttttccataggcacttgagtttggttggtggtatgtatactttagaattatgtaaaataataaactcgatatcgaatagtacaataagactcttttgtattctttaagtattggtaaggttcaatgatcatctcactagaaagctccctttgtagttgtagattttgcaaattaaacgcttttgcaatgatcacattcttacatatatataactaattatccttttaggcgtaataatggagacttttatacatgttatcatcaaaaggatgtatttgttttcgttcacatggctacttgcttctcacaagctgagtctacaatcgacgaaaatcttaacaatgtccttaattatcatttcccagttgatatatttatcctaagaaataataatcctccataattgccgaattttggtagttgaaagaatccagaggtgttgaccaaatttgtgtcaacggcctctgcgcatatagacattaatgactcattgactatagtagtagtatccatagaatgtgcatatacaaacaaagatgagaaataattagtgtataaaaatatgcaaataccaaaacaagaacaatagtaattggtatctaacaattaggtgaagtgaccagatttaagtagtttgaaaaatattttagaagtaatttggaaagatttaagatatttaaatgagatgacctatcttgttataactttttattagaaatgaataaatttttttctaagaatattttgattgtatatcaaaccgttagttaaataatataaagcttaatttggacacaaaatatattaaagcttaacatgatattaaccaaaagtttctaaaatttgtaacatttatattaatctatgatatatacacaataaatttatgattagttattaacttaatcgataaatatctaatatatataacaagttttgatatgtctctttgttcaaccaaaaaaatttatgtgcttaagttcatatcaaaactaattgtaatttcttttcgtctttcgttgtttttatttttctgacataagggttgacattcatctatgatatttttcgttttcgttgtttaatcgggatgttcccgactttcacatagtactgtgtcggttgcattacgaaaattcgaataaaaattaaataggttgtatattaatgtgagagagaagttgcctctatcgttttcatgtaggtatatatgatgaaaaaccaaattcttggcaaaagaaaacaaaacctgaattcaaatttaaatttttgcatgataatttgaataaatatctggtgacaaattacaattaattataggcactcaattattgggtattccgaaatgttattacgtggcgatttcatcatatgcatgcatatacagtatatttcctccacgtagtagtaatgtgcatgcaaaaaaaaagaggaaaacgtataaaatccattaagttattgatagaaatggttaatcactaatctgatctctattgaatgtcaagaaaattatattaggagggaatgctacgtgtcgggcacatattcatttgaccaaagtcgttgaaaccttcccaaaaactgtctgctttactctatcttttagcttgaaatagatttttgttatccaaaagcaaacttatgctgatagattttagggatttaatattttttttttacaaaacttaagcaggactaaactatttagaagaagatcatgcatgtgccatgatctagcttaaatttttcttaaaccattactcagattccctcaagaagaagtcaaacttgtttcctattttcttttgtttattctgataaaatgttttgcttgtttgttttgttttgcacaagtgtaaaatacataactattaagacataaacgcatattcactttttataggtagggtggtaaatttagcgaatagtatgttaaatttgaacaacattctgaatctaccgactttgagtagttaaatgtggaaattcgattaatatttttaattggagggggaatcataatctttgagaacatgacaagatatttgaatagaagatgcttattttgactatatgttgggaataaatggatttggttaatcaaacaattagttaaaaatttaggaaagaataaattgttctctattagccatttaattacttcaccaagaaataattagtttactaacagggaattacgagagaagcagaaaacacatgaggcacatggaattccgattttaaaacaaatatagtaattatattataagaattcggttacatgaaaattgaataatagtaatatggaatattgtaccgttaagaatggttaatgtttgtaactggtcaaagtaagaattcttaaattgagtggttagtcaaagtttatagtcaccatactactaacatgtcatcactcatttttttttttaataagcacttaaatagccaacaaatatatccataatactatattatacgtaaatagaaccaaaaggaaaaaattggcttttacgttagtttttcttacaccattttgtcgacgatccataaacaaaagctttacaacgcagaaaacacgaatatgtggagtcgaactctaaaaaaaataaaatacataagtgaatattaaccacttgacttaaatcaatttttccaattagctatagaaagtgaaaatactacaactaattattttgtccaattttgatacattttattaagaaacttatattaacaagagctaagccgttgtacgaagtggtaggccatcaaagcaatgagggtcaatttgattgagtccacatacaaaggaacagctaaattggcccattagtgagattgacattaagttcaaggtgggcattggtttaggatccatcaagttgcactaaagtccaaagaggttattgagaaggaagagtactacttttgatcatatcatatctttggtcaaacaagaaaccaatattactcctgaactatgacagctttcactactgaatgatataatgcgtgtgttttgtttcttcgtcaagagttcaaatatacactgatacacacgtatttgaagccacttcgaatttgggcaccaaggcatgaattaataacaaacccaattgggtgaaaatgttacagttgtatttggtccagttatgggggccctcttggtaccactaatctattattaattcaacgcgttaaatgtatatttggtttttaagtttttttttttgtgtgtgtgtaatagcatattcaaattggattgaatctaaataataatatgttctaatgtttcgtggcttcacatgtacctttgagcatgcatggcagccaaaagaatatcatgtccatgaaacataccagctaaaataataaaaagaaaacgtccttcgaaaacttttgatcctatccagagagatctcttttatcccttgaaccatctttcttagctcaaaaaaatagattgagccagaaataatttttgaccaacccaagaggccaagactcgacttcccccttcatcatttctcgatactgcataggcagttgcgtaataatattcggatttgagcagccgttgacaatgttattatttcaggcccacatatttgcacttgcgagccaccatgcagatcctgaaccttgaccatacgagaagtgactttaaatttttctcctgatattagaaccatctacatgtgttcaccaaaatcgagcgaaaacgttcttcagtgaacaaccctctccgattaactattccatatatcctaaattgtgtcccaaacaacatgccaacatagtagagtttgataacaaagaaacctatgttacctattttttgctttaatgttttttcacacgttcattcgaactataatttgacaacaaattataaccaaaaaagaaattgagaagaaaaaaacaaacgaagagttttatgttcaaaacaataaccacttaataaatcatataatggagcatgtactgttcttaaagctttgtacaacaaacaactggatttttaacttttcaacatataaccatcactctaaaacttcttataacaaaacaaatgaaaaatctgaggtcaaaaataataaatgaaagaatagttgagaattacagctccacaacaaagatgaatttacactttttcccatcttctttccttttggttcaggaaggcccctactcttccacctcaaaactaaaacaatcacagaggaagagagcttttcagaatctgagcttctcaactttcaggaacttagtgcaagaatacaaatgctggattttcaagaagttcttctgctggtttgattcctacaaaatccttctcttccatcgaacttgaaatatcatcgattgagaaaggaatgctgtcaaaattagtagtaaaacagttagttgtatctcatacactccataaaacaataacttgacgtaaaggatggatcttagatcatttccaatccgacacgttaaaacttcttataagattataagtagtttgtttatcataacagaattttcacctggaatcatcatccaacaagaaggaatcactgtctgcatcattggattcctctgtcatgagtgtccgcatactcgatatcacctgcaataaatatttgaattttgttcagcatccacaagggttccagttaaacaagaaaattgatattcttatttcatgttggaagtagaaaagttttaggtacttcttgtgagacgcttcgggtgttatagctatcgtcccagtataaggtgcaaatacggtaaagctgctggacactgaggacctgtaaaaaatgaaaaaaatgaagagaatgttaggtaatgagaatgaccatcaagtgtgtttctagaaacttaagaacagagccttaccgggcaaagatcgtttgctatttcatcgtatgagattctgtatttctggtggataacctgcaggtgaaaaaagaggaagaaagtaatgttattgtagttcaaagtaagaatgattatcaagaaacaactccatatggaccgacatgagtttcaatcgaaaactgttgttagatagtctaactagaatggattattaacaagaatgtagtaagtgtaacataccaagaacccaacggcttgtctaatatgtttcagttcttcccaagacggcccagaatactgccaagtcacagaaaagaaaataaattttgatagaacgacctgaaggaaatttaagtattcttgtaagaaaatcatctctcagaaatttttacttctttggcttgacaacaccatagctctagctccgcaagcccggattttacaaattcaccattgctaaatgtacagcactctttacgcagaaggagactgtaagataccaaagaagccgtgtaagtgagaacagagttcatagttttgtagtaggcgaattagaattaaacttacctgttgaaaagttgtacgttaatgtatgagaaagtttgagagtatatcttctggatgagtactaaaggaacctggacatttcatgtaacatatgagaattggtgtattgaagtgaggacacattaagtacaatgccaatggaacaattatccttacatgattttctttcagtgtgacaagaagcgaattaagaccgtcgataatgctttgccagtgaactgcaggagaatcttttccaaaggacctgccagatcttagcatccctcctttagaagatctgggtgcctgaagttttcattttgaaaaaccaaaatctatcatcaaagtgcaaaaagaaacattcatcacagcattaggatagaaagaatccagcaaggaacctgaatgcatagagaaagtaaagttgataactctctcttcaagttatccctaaccatcccaaacattttctcaacataggctgcaagctgttgcttgaaaagcagagccgggtactttgcctccactgggcggaccactgcaagagcagcagcttcagctgcagcagcaaggttgcctgaagcgggtgaagagcggaagctctggtaaacaagatagggagagaggatagttaagattctgatatcataaacaaaaagttgaaccaaaaaagtcatattaacacaataaaattgtgatacaaaccatggccatccttccaaataaagaagttgaagcaggtggcttcttgctttgtgttgctccgctgccattggttttaagacttttttgaagcaaaaatagtagtgccgatgtgcttgtcaaccaatacgccaagtgactattgtcatcctcattctgaaaatatcagcagaacggtgaaaattcttagtttaagtaattttgatcatgcaaaaaataaatctttcataatccatatttcagataagcagatggcacagccactacacacaaaatgaggataattccatcatgcgtgtaaatcctacattgaaacagtgtgaagattcccaattacctcaatcgcggaaccaatcatctgaatcagacgatcaaacacattagtcttctcagattcgaaacacttccagtgaagtagacacttgtaaattgtaaatgcagccacaggttttccattactgaaaccgatgttgtcttttacacagtcaatgagagcatcaacattcatctgcagtgacaatacaaatcaagttagcagaattatcaactaacagcagtgtgaagtactatgacgtagttggactacatacaatttgacgttctgcagcagatttcccagccttgccatcaactggtgttgtaaactcggcttcctggaaaaatagactttacagattaataaactaatggaaaaatgcaaacaaaaagaacgtcatgagaaccaagtgatcgagatagctggttggaggatatatacattgaactccttttccaagttcgtttggtggccattttccaaattctacaaacagaatgaggacgaagttaacatctaatggcctggttaaaaggcagatcaacatatttcagagttgcagagaaactttctaccttaacaggtgcagttggaggatgtcctagatttgtcctcacaggagtgcttattgtttgctgatgcataattttcttctcagcttccatatctaatattttctcttcaagcctggagatgaaacatcaacaagacaagtaaggaatcaccgcaagggctctcggcaatgctttggaaggatagactattgcaaaggatacctctgcattgcagtcttcaacttcactagtttagattcagcctccaatgcttgatttagtctatcctggctaatcttggtggtctcttgaagttttttctctgtctcaccgattttcatttccagtgaactcaccatactctgtaagaagagcaatttagacaaaaaagatcaatcgtttttcagcagagtttgtcatctgaagagatctgagtagttaatattctcaaatcttaagtatttttgctcttctccggtaagtaagctacaagttcagaaattctcacaaaccttcagcttttcattttcattcgtgatcttatccattaattcctgatcaaccacaggaatctccttaataatcggggcagtctcagcaatcttcttggcagcttcacgttctttaataagcaatgcctccgtttctttgcacttcagttgcaattcctccaaagaagactgtgcttttgcactttcttgttttttggcctcttccaggtcagtctgcaatgttgaaagaggatgaaaaactctcaataatattcataaaatgcaagaaggccctgaaaaaattagggtcaaatttgcgagaaacaaaatgtggtcagcttttcaaacagcaatcacacccttatccgtttctctaactgcaatctccaggtcagctcttcaacttgcttctctagcttgttcttggctgcttggagtgctccagtttctctagcagcctaggtgtaaaatgaattaaagaaattcagttaaattcatgcaaagcaccatctttataagtgagcctctgaaacaagagacaatggaacaacactagctaaagaaagaaaccacatctcaccatcttaagctttcgaagttctccacgagccacttttgatctccatgcacattgggtcgtgatagctgctttctttagttttctgtaatgcaggcgagccaggtatccacggcaccaagtctataataacaatgagcattaccacggtcagaatatgacagaactaccaactgttttgttgttattcgtgaagtaatcaatctcgttatgtaattggtgttctctgacgagttgaacttctaatagtgcgacacttctgcaattttgatttaagtgtacctgaattattattgcagctttggtttgtcttctaaaacatagttctttccgggcaaccataccacgcataccagcttgaaccgaaacagcagcagaatatagctctgtgtaagccttcctagccagaaacctacgcaagtctctctggatttttaaagcagcagcttccctacgcatgccttcatatacacttctagcgagataacctgacaaaaaggcagacacataggtttgcaacttagtcaataaataaaaaaaggacagaacaatccaatcatttagtctagttgagctatagacatgttcgacaacattgaaaatacctctgcaaactgactgaatctgtttagcagaattacgcagaacgatgaaactctttttagcgagatatgaccgaacttttctctgaataatgcttgctgatcttcccaagacctcagtccttcgggtatccaagtcagccatttgtccagcccgcagaaaaactttcgtcttgccaatctacaaaagtaaaatgtcaatcctcaactatcaatgtagctcacacaagcagtagtggcattgcaaaaagcttgatgagggaattacctgatacccttcgagtcccactttgtccagaagcttcttgcaagcagcagggtcatcagagctattataaggactcagttaagacatgaaaatggatatcacccattataagaaattctatgagaggaaacatcttacttctttaccaacacttctggagcaagaataccaaatctggccaagaactcatcaaaatgtttcctagtaggatagccagcacaactaatccttattgcctccatcactccctaaagtcatgaacacaaaaaatatccttctttcagacataaaatttttcacgagaaactgaactatgaaatcgacagagaatgtcattcgcaccccacaacgtaattgttgtaaaatgttttcgttctcaaagattccaggcttcagaaggttatttggttttatacagcgaatatagtgcggctccgtggtatttagaatctcgagcaacgataccaattgttgctgaaaagaaggaccaaatataattaagtgaccaatattattgatataacatgtttagtagaaattgcaaactaaaatcagacttaccttgaaacgggtacctatagatgagaattttgattgtttggaatcgtcagacattggtgggaacaaacttgctacaaaggaacagctagaagaatttaacaatgcctgatgctcggcaataacgtaatctttgttcttgtccaggaaaagttccgtctgataagtgacctggaacaataccccaatggttgttagaccatatatataactactgaaacttcttgaattttttttttttttttttttttgcaaacatgattaccaatgaaagtaacagcaactcacatcaccagcataatgacaaattgtgaagtcgctacgagctagttttggcttggtaaagcgcttgtgggttttgaatgtctggtatagcttctgtgcaaaagtttcatgcgttgacctaggaaacatgctgcacggcaaaagtctcacttcagctatgttgctcgaaaacaaagcaaaatttgagaaagtataccgaaagcaaaggaaataataggcataaatcttagattgtagaataaaagaaagggttcagaatcagcagtttggggttcagactcaccaagcttcatctagcagagcaattatacctcctggtttctgaagaacacaaaacaaaacaaaaaaaatcaccaagaatgagcaatcgatgaaatattgactgtgtggcaagaagactagcaacaggagaaacaaatcgccttgagaaaagacgagataataagaagggatggcttcgtcgcttaagaagtctcataaaacttttatgagtaagctaacaggtccactgaacagtgagcataaatatacagaaaggtatcatcaaccacagaccttttctattaagtctaaaatatcttgattgtctacgaactctatatagctccagttgatttcctctttcttatattcttcttgctccattttaaagacatgctgcaaggagagaagttacagacctcagaaccaagggcactgcagaatgcagccaataatagaaaagggaaagagcttgttctgatcaaacctgattaaaatgctgttgaagtttttcattggtcaaattgatgcaaaattgctcaaaactgcattaaagcttgcaattgtaagtactaggccaaagaataataagaaacagtcatgaatatttctttaacagtcaacaatggagatatcttgtacggaaatattcatcagttgcactatatgtgttgaatcaaacagtactctccttacaaaacaaggttagtcagataacctcacaagctcacaatttgataggcagtaagaaatctcaactgtccatgttagaaacaagcactagcttgactatcaaactgatcagacccatctattatggtgaaatatcagactacgatccagtttattaaagaaacccatctaaccatttatgaaaacaacaagcataccactaagcacctgtttgtcttgaaactctcaaatccataaatatcaagaacaccaatcaagtacttcgagtcatgatcttgaccaattgagctatttatcttgtcaacaagcctgcaaagaccataaagtattagcatcgaacaatgatgtcaacgcacctttgaagcttaaggagaagccgctattaaatatcttcatcagggtagaatcgaaaaaacccaccagtcaaataacctcgagtacatgactttagccaaagcatctctactaagagtagcagcttctggatcaagagtttttgtgatggtttcatcacgagttaccatgatacgcttgcatagagaatcctcaagtgctttttcatcgcagctggaaaggaagacgatataaatagggaaacttacttcagtccccaactagaagaaaacaaaacaaaaccaaattttccctctctttcagttgaggcatttacctgagaagctcagctgcagttttcagatgaaacaaggatttatcatctttgggtatcgatgaatcaatctcttcccccttagcaaattcgatattcccgatatggagaatggctgccacgacgctgaaaatagcatcctgaaacaagatatcagcaaagcatagaatccgtttacagtggcaatattgcagctttggctaaaatctgactgatggagttctgtgataactacctgctcctccgtactgatcccgacgacatccattgcccgtcttgtggcatgatattcctccgcatcatttatactatccagctctagacatttagactgattgagatagtgatatttctttggttcctccagcttgaatttcttcacatcctgatagtacaaaaaaacatttcagataacaagatgtgagtttgtatgccaaacgaggctcagatactggacatgtatggtaagttattcggtgttactactccgaagtgaactacaaaacttacttcttgtggagcagcacaaagcatgtagaaacagtgatagtttctttcaggatcagagacttgacaaactcgtgatctttccaacaaataagttcttatggcagctcctgatattcttcccttttcgtcaaactgaatctccacgaacttaccaaagcgactataaagtacacaaataaacagttcagaaacacccaaagtggtgatattgaaaagctttttcaaaaaaaggttacctggaattattgttcctgacagtctttgcatttccaaatgcttctaaaacaggattcgactgaataaaagacacaatgaagaagcttataagaaccatatcaaagcaagaaaagggaaaatcaacatcatatgcatatggaagtgagcaaatagctgctgactattcagtttgccttaatgtaaatgactactagcattgattttctgaagtttaagttatttgttcactctacagttgctcttgaaaagtaaacacagccgaaatgaatattcgaccatcctctgaagtctgaagttttagatatttgttcaattatctaaaaacttgatttgactaaatatgatgtttttttttcacctccaacactttctgttcaacacttcttccctcagcagcagctctccctcccatgtaagcaagatatctcataagcaactttgtgctttcagttttaccagcaccactttctccactaaccagaatagattgacttactccatcattaatcatctgtctgcattagaacgaacacgaaagcaggcaagtttacatataaggatcaacaacagcaacaaaaaaataaaggtaatatatatcactagtgtgtataaattacctatacgcagcatctgcgacggcgaatggatgtggactcaattctcctaaggaagctcctttatattgagccatcatatggctactataaagatgaggaagtcttctaaacggattaacagcaataagtatacttcctgtataagtctgaaagtaaataaaatttagtccacacatatttcatagtacatatatattcgacatcgatatgaattactcacataaatctcgttaatatcatatcttgaatgcaaattctgtagaactccaggttcatgcaaataagcaagtctagtcatatcatccactccagaggctggtgcttccacatctttaggataagcattagagattttcgtaacaacctgaattttccaaaaatagcaaaaatcaataactgctttctctcaaaagtcttcttgtgattctaatttagatgagaagcaaacacacacacacacatacatgttttcctgaagtgcatagaactttgatctcatcaccattaacttgtacaacttcaccatcaatccatgcttcatcaggatcctccacccacacaaatgaccccactgatggattgaagttagcaacctgtagagcaaaagtgtgtcactaaaagaatgcttcttgagctctcacaagcttccttatggtaatcacaactctttaaaaaactacatttttgattgcttttgatttcagactataataacctcaatcacatgaaatttgatttccaatcatactagaattagaccaaacgtcaaactccaaaacagacaagtcgtagttgcagtcaaatctctataatcatacagaagaagactcaaaagtcaagcacaaagccatgatccgatattagatgcccttaaaaatcgctaaattaaactaatttcccccaaaattaaacgaatcttaccatttcgtttcgtagatcaaagacttcagctttctggatctagattaaatcaaaacgagcactgagcttctaaatctacaaaaaaaggtcctcaaagcgaataaactgagatttggtgtagaactgtagattggagaagacgaactttgcaaatctaaacgcgtttctgggaaaaatttccccccgaatattttttgagtattattattttcgtttctcttttttttttttttttttttgcttactttgtttttcccttttcgtgcctccctgctctcttccactttctgtggggatttggtctgaatagcttaacagcatcaatttgcaattaaaacattgattaagacatcttattcccaaactaccccttgattttgtataatcacggagctaactttcggacacgctaaaacaattatgtccgttcgcgaaatatatacttgtctcaaaaacgtatgagactaaaaaaaaattcttctaaattttgttcttgatgtcaccagaattattattacatgtgcatgtgggagaatttaaaacacattatctatctctttaattcattgtctaattcttcatggtgtataattaagatattaatataactaatacaccgaattcaacaaaaagacatctattaatttatcatattgtgatactttttcattagaactttgttcacatggtacacgtaaagtaagacggtgtcacacacacaaacgctgaaacgagaatctgacttggctgcatctaggaacattattttatttcactttcatacgaaataaatacagacgtatttatacgtcaagaagactttgagattttatacgtcaagaagactttgagattttatacgtcaagaaaacaaagaaaattacggtcatgtccctaagaacgttgcaaggtttggatcagtacgatatggaagacttgttcgagctcctaaacctctgcagcagcaagcagcctacacaaatttcaaacgcaattccttcaatcactattctgatcaaacgcgtaacgcctagcgttttgaaaatagcgctggaataaacaaaagaagaagaagcaaacttacgactcgagatgcaaatgtcaacatttcctctaaagccatgcctgtgcacaaacctgtaaacaattggagtcggtcagattctgttcagatacatttggtttactacgatttagtgaagcgtaataccataaagcaaagctccggtaaacgcatctccagcaccggttgtgtctatgagttccgatgaaggtattttctcagctgttactataaccaatctccctgtaacattccctgtcagtctagtcactagctgaaaatgttaagagcattgaagatattttcattaacaaaatgtagaacttgtgaggaaattatgtatctgaaaacgttatttaccgatgaattgcagaccggtaagacacttgtaaagtctgtgctttgtttcagagactcgtgtaattcatctatgtctgtctcttcttctgaccctgaaacctctgtaatgttgatacactagaagttagcatgtacatggaagaaggcatggtgtgatgttagcatgtaaaaagatttcgaatgatatattgaccaacaacaacattagttacaaattagccccttatacataagccttcctttatggagaacatgagtgatcctaagtcaaaaactctgacctttggacaatcgtaaataaggaaaactcaccactggaacatctctcaagcatcacacaaccgtgttcccccaaagtcatgatcacaaattttagctttggtaatcttatgagcatagagagaagtgcactgggagatgagggtgcccctgtccattcctgtttttcccaatcaaataagtcgaccattaaagattctagtcattctaaacacaagctatgatacaattttgatgcaagatcatgtgttactggttacaaaaccaaaacattgtcggatttttcaggtgtaaataataaagagtacatgaaccttctagttcattagaagttctcatagattcacctaagctccataagttatagattccacatattcagatttatggtaccaacaattaatactaattgatttcactaatcatcaacaaagagctttttaagaaagtggtatgctctttactatgattctctagtatttcacaacctatgaaccaattgatccgtgaattacagaactattcctagaaatactctcacctgagggaagttagtagaacaaatagcataatcagctaagtcaatgagctcatctagccctgtcctttttttctctgcattaattaagattggtatattcttgctatgtgcctgcataaaaaccatagatgagtgagaaagagctgtaacatacgtaaacagaactaagcaaaacacaccaaacagagcattttcatttcaccttttgcgcaagaagcaattcggcttcacgggaccttccatttacatatagaactcttactccatcaagaacatctagaagtagagattcagtaaggtcatctggtagcaaaggaggatatcctggagtgtaaatacaagtacgagtattcctacaaatttgttacaagaatagtatcaaaacaaatggaaacttaaatatttgctagaaatttgttataccatagaaacacaacataacaaaagacaatgtacccacgtttggttatctacaatgacgtaattaaaatgtgaagctccatctttagcactctgagacaatggaaaagagagagagttgtgtattatatctactttgaattgatatacattgtaccaaataaactttgtatatgttcttaccatacaaaacgaagtatccacaccgctagattcgagttcttctaccatatatcgcccgtgagaatcatcagcaacctaaaacatatatctaattcagttgattttggttattcaagggctacatttctgcagtctatgcctcaaatttaagaacataaatcaaagcaaagaaactttcttcaaagattaaaacgcaaaaattgtaataaaccttagccaagattcgacaaggcaaacccaaacgagcaacacatgttaaagcattcccagtgttaccacctccttggacctgaaaaatgaaccatagaaatgaaaatctccagaaccattcgatatcaaattaaagtcaacgaagaattaacaataaatgatatagtcatcgaccttgaagcttgtgcctcggatctttt

SEQ ID NO: 827 - DNA, 71522 bp, Arabidopsis thaliana
gatcgggaattggaaaagacgccactgtgactaagtaatctagacaaagttgaccacaaccgagctgcaatttgcagagaatctaatcagtttttatcagttcatgagaagaaacgagagaaatagatacgcacgacgattggttggccgggaatcgcttcgtcggagcaagatgacatgatcggagctccggctatgtgctaaattcgtagtggcagagagagggagggagaaggattcggtatttattaggaggcctgaattttggtttggttaaaccgaaaaccaaatcaaaccggatttaatagctgaaatcaaattgagtgatgactgaaacgaaatttccaggatttgattttctttttatagtcgtttgcattgcattttcttggacttaaaaatgatatttgataacttttttgggaatttcatggaatggaatgtaaattagctggtaaaagacaaatcataaaagaccaaacaacatcaaatcaccaatattatatatcaagttgagatcaaaattcatttatacgtttcatgagcacctttttctttgtccattagttgagaaagtaagatatgggttcaatattttataagaccaagacccaaaaccatttttctaatacttttttttctttgttaaaagttcattactgaagtaccatatttcaaatacttatgctttttcgtttccaattatttaatatgaaatttatttattttcatctaacatttttgctttttttctgaatcttctaataatattttcgtttaaatagaatctaaaaaataatatttgaaatcctctatatattaaaagagggatggttaatatttcattctatattattaggctactatttggactcttttgtattgtttctttttttattggtgccaacttaattctaccactaaaagtcgattttctatttatttatttttcgtcattcttgttactctagccatggaaatggaaacaaacggaaactagacagagaaaattattattgttactaataataaatgaattcgtcgccgtcgaatatcaactcaatgtttgttttttgggatgtgtaatcctcaaatatgcctcacggctacatcaaagaagagatactgtgtagccttagtgtattttaagcaccaatggatttcacagagttgtagcaattatttggtggtctgaactcgacattacacaaggcttccaatacatatacagaattccctttccacgatagattttttaaatactacttatatgcttttttcgttttcagttattaaattagctcaaggtgtttgagtattttggttggttccattaaggaaccaaaatacattttttattcaaatttcattcggttcaggtaggtttaagaaactgactcaataactaagtaggatttgaaagttttctaagtatttttcggtttagctttaagatatctgaaaaaccaaactattttgggatatatgtattaggattttctgttttttatttgagtaatttttgtaaattctgttcaattactcgaatatctttcgattatccaggtatctggaatattcaactcgaaaattttggttcacatattttaccaaaagctagagctaatttaaatcagctttactatatatatgttttttttgttttttctttgattagtatgagagttaatgttaataagaagtattcttagtttttccctctcttttctttgtttaaagtgagagttatagttacagtaaaactttttttttaaaatggtcccatcaaatactataaattaatgattgtataaatatatcaaaatatatttttacaaaaatccattgtagtttttgttagaattcattgctaatattttcaccatatcaatttattttttatcatctgttagacatgataaatgattgattatttttagttgattttagaagtatattgattataacgaaaaactctctttcaaaattacaaaataaggcaaatctctatatagattaataattaatatctttgttaattaataaaatattttagtctcaacattattaatctatagaggttttactaatatgcttataaaatcagaccgaaaacatactaagatacatacaggacatttataatgatagagcttctcagtgcaataactgttcttcgtggacagataaaaaatatctactatttgacaaaaaataatattgacaaaaaaatatatgtatatatatttatctagaaaaatatcgagtcattgatgtataacctgtttcgattttccaagttattatgtttaaagttttggagattttttagtttttatataacatgaaaaatattaagctataatctttataatcagttaaattttagtataaaattcaataaaccatcttttatttataaaaaaagaatgcataataataattaatatttatttcgactttagtttatgttttcattttttctccaaattcgaattaaatgatttattaacttttaatttaaatcaggaaaatttttcatattacaaatataaaaatgtagtttttaattaaaagagaaaaatgatatttttcaaacaaaactcataaataggatcgttttcaaagttgcccaatataatttcgtattcttaaatatagaaaatcacagatatcaaatataggactaacaatttaatgaattttatccaaagacgaaaaaaaaaattctaatatatgactaaccgtataaccttaacgatagggattagcgataggacttaacgatataaacacatatgtatatggttttcgacctctcttctccaaaaccatcacagagagagtcgccgaaataaattgaaatccggtgagaagattttggattcactccttccttctttcttcttctttatcatcatttgagctggttttggtatctctcctgacgaatttgaatctctcagccattttctcttctcgcatctgtgttttcgtgcttggagctgtacacgtttctttaatttgaatagtgattttgcgttcgttaattagccttctcgtacgagtgggctattttgggaatgatttaggtggttttaagttactgggtagtagtcactgctgagcgatttctgtttctcctgttgaatgattgattcagaaatttgaaattcacatcgaaaccaaatcttaaatcatattggtagctttttttttgttttgtgattagatactgtttttttatagtattaaattcgttttggtgtgagtgatttagtgtttgggaaattatttaatttagtggttattttctgatttagtgatgatttgagaattttgtgttgtttatattcttggtagcgggaaatttgtactttcctttgtggacctttcaactattgaatgtggaagatttgctgagaatcttagaaagtcatcatcatccatacgtaagagaacttttttttagcttgagagtgattttcagatggagaatgggttatgggaggttttaggttcaaaagggttgttgaagaaacatgaattcattaggattttggttcaatgcttatactcgttaggattcaagaactctgcttcttgtctggaattcgagtcaaagatcttgtataaaacagctgattctgagtttcttgaaaagcaagttttgagtgggaactgggatagttgcgtacaggttctagacagaatttttgataattccatggatgatacgaggaacacggctttatatctagtgttcaagcaatgtttgttggagtatttgaaacgtggggatgtttctttggccttgaatgtgttacggaagcaagctccgttgttacggatgggaaaagagaagattcataggcttgcttgtgatattgtttattcgaaagagatggaatccggtgaagtagacaactgtttagttctagatttgaggagaaagttgttggttgaactggagaagttgattcccttgccaattgttattcctgagagaaggttggaacatttggttgagactgctgtgatggaccagattgatacgtgtatgtatcataactcatgtgatgcagtatcgctttacaaggatcactgttgcggtagagaccaaattccttcagagacagtccaggtgctgttttctgccttagggaaccattggttttcattttcataaactcgttagtggttcttatagtttctcaatctcttattatcttacagattttggtggcacacaaaaatgaagtgtggtttgtgcaattctctaatagtggcaaatatctggccactgcatcaagcgattgtacagctataatatggaaggtaaatatcttagaccatttggtttctcttatttttccctaaagtcattgagaaagagaccagatgaattagctctgatgtgtaagagaaccttatgaggtttcttcttgtataactcttcacgctgtgaggtggaaaaaaatattaaggaaataacatttggatgtcttgtcttgaagcttggtatataaggtagaaagccattttgtgacaacaaaaaaggacaagaacttttatgttgtaattcatagtgatttgtcgttttgagccatgtaatgtaactagttcttagtacttcagggttgataaaatttctgtgtatttttctatggtagttttgagaccgtttctttaaggattaaacatggtaatttctaattgataaaatttggtattggactaaaacttcttgtttcaggtactggatgacaacaaagtcgaactgaagcacacacttgagagccaccaaaatccagtttcttttgtctcgtggagtcctgacgatactaaactgcttacatgcggaaacgctgaggttcttaagctatgggatgttgacacaggtgtgttgagacacacatttggaaacaacaatactggattcactgtcagctcttgcgcatggttccctgactcaactcggcttgtctgtggcagttctgacccagaaagagggattgtaatgtgggacactgatggaaacgagatcaaagcctggagaggaacgagaattccaaaggttagtaaaggttaaaagatttgcttatccgttttggtattcaaatacttgaaattcgaaatgcacaatttcctaataggtggtggatttggctgtgacgccggatggcgagagtatgattacagtgttttcggataaagagatccggatcttgaatttggagacaaaagtcgaacgtgttatctctgaggaacagccaattacttccctttcaatttctggtgatggtaagttttttatagtcaacttgagctgccaagagatacatctttgggatcttgctggagagtggaaacaaccattgaagttctcgggtcacaggcagagcaaatacgtgatacggtcatgttttggtgggttggatagttcgttcatcgccagtggaagtgaggattcacaggtaagcacattattttcgaccaagacagttgttttttggttgctgttgactgacattgatctgttgttcacaggtttacatatggaatctaaagaacacaaagccgcttgaagtgttatcaggtcattcgatgaccgtaaactgtgtaagctggaacccgaaaaatcctcggatgctagcctctgctagtgatgaccaaaccatccgtatttggggaccgggcaaaccgaacaaaccactgaactgattagataaccagaaaccgtagtagctttaaaccaggacctagttctagtagttccacatttgtgtatagttcatttctggttttttcttttttggtggtccttattggctttgcagaacaatctcttgctttttgagttttggtacactggttttggagaacttgatttgagatgagccatgaattgaaaccaaaccggtttaggcggtaaactgaaccaagctgtgttgaggagttaggtggcaattgtttggtgttcagagcaaaacttagctaactacttgtttcgttggtcatttgctaccatgtgggttccccgttattttaaacagaaaatttaattataatataaacttcggaaacgcccctaaacttatgatatttaagaatctgccaatattgttactttttttccttagtacagagacattattttttctaacaaacctgtttagaccaaaacttctgaaataattggcaatgcgtagattacaccaaaaaaaaagtttgaaagaaaatgtgttgcaatgattctaatatcttgaaaaggtatatgagtttcaattatagaactcaagaagattaataagtaattgcgagttcgaacatttgtgggtttcaattatataattaacaaaaaaatctactaagtgcatacataagaagtatttcacctaatacgattaagaatatacatgatttcagttttagtatctactatataaatatgaataccaacgtaatttaatcatatatttaaactacatatacatctatttgaaacatggaatttacatctttctatatttaaaaatatttgaaatgaagtttcaaaattttcatatgtaaagtatacgttatacaatctaaactagtattcaaaagatgataacatctacacaaaacaatcacatgaataggttaaatcaaaattaaaaatagaactgatataccctcttagatctcgaaatatttatcagtatgggccagaagggctatagttattcttagaaaaaaaatggaggtaatgtcgaaattgacgaaattaataggcgtatttttaaaaataaaggttgtttaagataatcatgaaaaattagcagccactgagtaacataattacataaacagagacacacttacttgaaatagaaaacaaaataagatccttttaacaacaacaacaacaacatctcacaggtctcgctaagacggtcctaaacaaaaaccaaactgtttaggtttcgtcgtcgacgcgctctcatcaacaaagtcccatacgaaatttaaccaaaactatatatcgagggacgaagcgcgtgacgttagatcggagatctcaccgagatcgccggtgaattagggtttctacttcctttgttcttgttaacgttatatgaaagtttggaattcaagatgactcaatctatctgttcgtcgtcacaagatcaatcttcttctcctcgctctttgatcacaccacgcaaatcggcgacgaagtttcaccgccgcaggttcttattgatacctttttgtgctttgttgcttctgaattatgggaaaaggaatggtattgtttccgttttaagagatttgagttcgatcaagacatcataaaagcttgtttagggatatcactgagaattttggttagcttcagccatttttggaaactggatctttgagttttctaaacctgaaattggaaatttgttgtttagggggaggagtgtatttaacatgctggttcagagggaaatgtcaccaaaggctaagtttgtgccaaggaaacgatggggtaagagtagatggtatactgattcttcatgcggaaccaacaacgagtctatgaaagagacgggacaaagtcttacctcatggtacactttatgtttcttgtctctttatttgcataggaccttgtttaagctcattgtaattggtgattctttatgaagggttgaggcagagtcattgcagcatttatctgcaaaatattgtcctcttggagctcctccaaggtcaactattgctgcggcttttagtactgatggaagaactcttgcttctacacagtgagtgtcatggagtgcatatgttttattctttgtttttttgcctttggattctcactgtgttttgttttgttttgtgtagtggtgatcatactgtgaagattattgattgtgaaactggaaactgcttaaaagttttgactggccataggaggactccttgggtagtaagttagtgaatgctagccccctttccttaacgttaatatgtatccttttctgcgtttgatatgtagtgcatttacaacacattactacgtatagataattcaatctcggatagtgaaatgaattttgctcatacttttggcatctgctctgttggttggttggttgagggctgttaacttatgtctgtgtctgtgtgctgccttatatctaatgttctttgagtttctacaggtcagattccacccgcatcattcagaaatagttgcgagtggaagtttagatctcgaggtccgcttatggaataccacaacttctgaatgcattagatctcatctattctgtaagttctaggaatcagaacactctgtttctttttcgtagttatgcctatcatcttaccagttttaatttcttcttgttaatctctcttgccagatcggcctattgcttctatcgctttccatgctgagggtgaactacttgctgttgcttctggtcataaggtgatttttcccttttaagtatcccacgaaacgctagctagttgcaggtggcacctccttacagaaagatctcataagtttaattcatgatattttgcagctgcacatgtggcactacaataggagaggagagggatcatcaccaactgttgtattgaagacgaggcgatctttgagagctgtacactttcaccctcatggggctccattacttttgaccgcagaggtgagctacctaattggaattcattttcttattttccattctgtctgcttacactctaaccttaagtggcaggtgaatgagattgattcattagattcttcaatgtctagagcaacatctatgggctacttgaggtatccgccccctgctattttgttcacaagcacggaaagcaatcaaactagtttggcagcagaaaatgagaacagaacatcgtctcctcctcttcccttggctacatccagtggtccttctggtccaaatagtgttccaggaaattctcccagcaacatatttcttacccgagctggagatagaacttctcctgcagttgatggcatggatgtagatgaagctcaacctgttggaagaaatggaatccctagccaagtttcaaatagatcagatttccctgagcttggacagattcggcaattatttcactttagggatcgagtttcctgggagttaccttttctacaaggatggttgatggctcaaggtcatggtgttgctaatccagtggttactcctactggcagtagtaatcatggcatctcagctccatcctcaacagccagtctggaggctgcagtagcgttattagaaatcccgagtggtgttaacttacatgcggtgtctagaagaggcggggctcaggaacaaacttcacaaccccaattctcgagaactggattaccggaaggtgtatcttctcgtaacactcaacatggaagtgatgctcaacctgtagtaaatagggtccagtctgagcttgctacctcaattgctgcttcggctgcagcagctgctgctgcagaattaccttgtactgtcaaactcagaatgtggtcgcatgacatcaaagacccatatgcacaactgaaatccgacagatgtctatttacaataccgcatgccgtcctttgcaggcaaagctccttctctgggtccttgatatcattctgttacacttgaatgcctatgatgctaagttttactattggatgtatattgatatctctgcttctttttgtgttcagtgaaatgggagctcattattcgccatgtgggagatatttagcggcctgtgttgcgtgtgtttttcctcatggtgagatagatcctggactgcagacacaagctcaacaagattcagggcttgcaacttccccaactcgacaccctgtcacagcacaccaagtcatttacgagcttcgtgtgtattctctccagaaggaaaggtaactgtcacgtcgaatatctcatcgtgctaattctaccatcttgaaatgcacatccctcatgtgtttttgtctatgaatacagttttggttcagtacttgtgtcacgggcaattagagctgcacattgcttgacctctatccaggttagtcgccttttgagaataatcagattgaatttttatggtctctttgttttgagaacataacatggtaagttgttgaaaatacttgaatatttgagaattctgggtgcagttctcacccacttcggagcatatactacttgcatatgggcggcgtcatggttctcttttgaggagcatcgttagtgatggtgaaacaacatcacattttttcacagtattggaggtaaagccttatgctactagtacatccatgttcagaacttggagatataacacagaacttgtttgtgtgggccggtcagatatacagagtttcagatatggagcttgtgagagtactgccaagttcagaggatgaagtgaacgttgcgtgttttcatccttctcctggaggaggtcttgtttatgggacaaaggtaaaccatattgaatcagatcattatcgattaacaatgttcggtttgggaatctgatcattatcgactcatgactcatgttttttttccgtaggaggggaaactgaggatcttccagtacaatacagctgctacctcaaacttcacaggaccaaacacctaacctgaggtagcgtagaattataataaagaaggttggatctttgtcaaaaaaaaaaaagacctaactataaaggatgatctagctgactaagcatatatatatgatttctacaggtgcattagagtggtaagcaagcaagaagcaaacataggtttcatcgaatcttttccactcctcttcatacagtcttgtttaaggtaaaaagttaaagacaaagaaatgtataaagaaaaaaatggaattggtttaattttggttttgaatcatgttaaaaatagggcaatagacattgtcacacttcctctacagattaacaaagaagtcttaagttatcaattttatgatgctaaatcagttttagtagcgttcaagcttgcttctcttcactcttctctctctatctctgctacaattgcaattcataatatgagattttgatgtacatactatatgtttggtgcaaccacttgacacactatttttttatgtaatgagaggttcaattaggattccatatttaaactgacttttaacccttgaataaaaagtaaaaacaaaaactatatttccaaattattcaaactgatcataccaaatcatattttgaagtttttattttataatgaagaaattgtgaaaatggcaattgtcctgtttttgacatgattaaaaaccttatactgttgacatgtggagtttgaacccaccagataaatgactcgagaaaccatccaactacaagctcccaataactttacattatttgaacctatcagatagtgactgggcaaataaaatcctactacaatctccccgtatagttacatgtcccctttttcttttgtccactgctttgcaaaaagctagtttgaaccaaacataacaaggaacaaaaggcactgtcaaatagctgaagtagtggcactttcatgggcgatgtcttaccttcacaaccttggaattggacttgtgatgttcataagtgacaccaaagcattgtttcaggcgttagaaggccatcataagtggcttagaccggagggtatcacgacatagatcttagaggcaaaaggatgacacatcataccatcttagggagcatctctatcagtagtatctcatagagtatttggagattaaaaaaaaaaccaatgaaaaagtaggagtgagagtgtttcttgtttgagaaactttatacatttttatttttttggctaatgattttatacattcaaaagtacgtccagaagggcgccaatcaaattacggatactgtagccaaaaggacctcttatttcccgatttattaatgctattttgtaaagttgtactcccgtagttaaatccactagttgatttggatgtagacaacatttgtattgatgagtaatcttaacgataattcggtaagcacgagacaacaaaaatatatataacaagaaatgataaatatgaaagaaaaaaaacagaaatgaaaattctcatattcatgtaacatatacgaattacaccacgtgatcattacaattcctctatttaaacatctccaactgatcaacgtctaaaaaaatcaaatattggagaagagagagtgaacaactatgaacgtcgaaagagaccaacacatatctccaccgtgtctcctaaccaagaagatccctatcgttgatctaagcgatccaagcgacgagctcgtggctcatgcagtggtgaaagcgagcgaagagtgggggatttttcagttggttaaccacggcattcctgccgaattgatgcggcggctgcaagaagtggggaggcagtttttcgagctcccggcttccgaaaaagaatctgtcacaaggccagccgactcccaagacatcgaaggtttcttttccaaggatccaaaaaaactaaaggcttgggacgatcatctgattcacaatatctggccaccatcgtccatcaactatagatattggcctaacaatccttcagattacaggtattgaacatcattgaaaagccgatatatagtttatagttataaaccttaacattgtataagagctcatgtaagttatataatatccaacaaaatgtatgtaattaaatagtatacaagttacatgaaacttgattgcgttatttcttaccattaaaaaacattcatcaagtttttacattcttcatgatacttaaaatgtttttcggctatatagattattatgtagctgaaaattaatagtattatttgggagtggtgatggtttcagggaggtgactaaggagtacacaaggaatgttacaaatctaacggagaagattgttggttacttatcaaaagggttagggttacggcgtgaggccttgcaataatgtctaggtggcgataaagcacagtatgtgatgaggatcaattactatccgccatcggattcagccatcggagcaccggcgcacacagatttttgtggactcgcacttcttgtctccaacgaggttccagggcttcaagtgttcaaggatgaccattggttcgacgttgagtatatcaactccgctgtcattgtcctcattggggatcagatcatggtccgtttgtgtttggtttttaacttttggaaatgtttttggggtttggtttttaaaatgtgtgaattgcatgcagaggatgagcaacgggaagtacaagaacgtgctacacagatcaataatggatgcgaaaaagacaagaatgtcgtggccgattttggtagagcctaagcgtggtttggtcgtgggacctttgcctgagctcacgggagacgagaatcctcccaagtttgagtctttaacttttgaagactatgtataccgcaagatcataaaggttcttcgtgattgatgctaaacctcagcaaaatcatgtgttgtgataagacagtggcattagccaatagcttaaacaaaaaaaagtactagagtacaacctcttattattgttttcaatgttttgtttttatatttttttcagaataaaatatataatggttcgacgcatatttttcaattttcttttggtttaattaatgataaaatgattgcaactctataaatatacataattgtgaaataaacctaattgctatgttcttaattgtcaagaatttatcttcgaatgacacgaaaatcgaatttgaagtacgagacatgatttgatctgtgtatattgtacatgtcctggatcgataaggttcccagtctagctacgtacactagtttggtcagggatagctttatggtaacgagaaagaaaggaagtgtatccaatcacgatgaatcgttttctaatctatttctttcagtcctattcaactgattacacatgtcacatgtgcgccaattggatgctgttgaaactttgaaaatgcaccactatagtgttaacaatgagccggcgtgataccatgttttctttattttcgaaaggtgtatccattattgtaattttggaccaaagcatatgacattgatgtgtctctgggcctactttaaatcaaatcggacttttctcactcgattattaacgacccgacccgactcgacccggctcggaccggataattacatttgtagctatgagaagaaaaagaagaccacactactctctctatctctctttctctctatctctctctatctctctcatttcttcctgcgtcaatggcgactcaaggtcaggttatcacttgcaaaggtacctttatcctcgatcctcgcactctcactatctgtagacatgttattgaaaaaccctatctccgattattagttttctgattttcatttcattttgacgccgattcacatagctgcggtggcttacgagccgaacaagcctctggtcatcgaagatgtgcaagtggctccacctcaagctggtgaggttcggatcaagatcctctacactgctctttgtcacaccgacgcttacacttggagcggcaaggttcgttctctccattttcattcgtttgagtctgatttagtgttttgtggttgatctgaatcgatttattgttgattagtgaatcaatttgaggctgtgtcctaatgttttgacttttgattacaggatcctgaaggtctctttccttgtattctaggtcatgaggctgctgggtatgtatgttaatggtcattatcatcatcaaattcagttttaaggtcttctcaatgctaaagttcttattttgttttgtgggtataggattgttgagagtgttggtgaaggagtaactgaagttcaagctggagatcatgttatcccttgttatcaagctgagtgtcgtgaatgcaagttttgcaaatctgggaagactaacctttgtggcaaggtgagatctgctactggtgttgggattatgatgaatgaccgtaagtcgaggttctcggttaatgggaaacccatttatcacttcatgggtacttccacgtttagtcagtatactgttgttcatgatgttagcgtcgccaaaattgatcctactgctcctttggataaagtttgccttcttggatgtggtgttcccactggtaagaattgccaccttctcttactgattggtaatatgctaaggtctttcacgatgcttcagttttagagtgtcgcctgccctttctgtttattgatgtaacatcactgataagattgatctgcacagttcttcaccatcctttttattctttccgataggaacctaatttttttcactctgtgtccttctcttctttctttgcgaatttctgactttttggtgatatatatgaacattatggtccctaacagcataacatgtatatgcatcctattaggccttggagcagtttggaatactgcaaaagtagaaccagggtcaaatgttgccattttcggtcttggcactgttggacttgctgtaagctgctacctcaaactttctagtgcttccatatttcctttcttctgcaaggcagagaaccattgtggttaagtgttttaaattgtgaatgtataggttgccgagggtgcgaaaacagctggtgcttcaaggatcattggcattgacatcgatagcaagaagtatgaaactggtaaatctcctcatctttcttcactggattggttaaccgcatataatttatgcaattcactgagttccttggttgtggaatttcagcaaagaagtttggtgttaacgaatttgtgaacccaaaggatcacgacaagccaattcaggaagtgattgtcgatctcactgatggcggtgttgactacagctttgagtgcatcgggaatgtctccgtgatgagagctgcattggagtgctgtcacaaggtaagtcatccatgtaaaatacagaagaaactgttaaaacattgtagacaagaggattttgttaagagctaaagatgattacgttgtagggatggggaacttcggtcatagttggtgttgcagcatcaggacaagagatatcaactcgtccgttccaactcgtgactggccgtgtgtggaaaggaacagcttttggtggtttcaagagtcgaacccaagtgccttggcttgtagaaaagtacatgaacaaggtaagaaaaaaaacttaaacgtaaggcaaaacgatttttgataatcttttctcttcaaacacttgactgttacgtgttattcgaaccatgcaggagataaaagtggatgaatacataacacacaacttgaccttgggagaaatcaataaggctttcgatctattgcacgaaggtacttgccttcgttgtgtcctcgataccagcaaatgactatatgggtcctctctgctttaatctatgtgttcttgtgactttcgtcttttatcggtattgacatttcctaagagcaacagactactctactcgtgtgtgtctcgtttctatcttatgcttcaataaaatatcaattaagaccgaaaccatcatgtctaatcatatagtttacagtatagtcacttcactgtaacacgaatcatatagcgaagagaagaacataggacacatgaataggtttctggtgggtcatgaagttatgggcctgggaaataaaatattacaggcccatatatcagatatcgcaagcccattacaaaaatatcaccacctctcatcaccaaaccaattattcttctccttaggtcccgtcggtccttcctcgccggataattctaccggaatcttcctcaacacagcatcaacccaagatctcaacctccatggcaatcgttcattcaacttctcaatctccgatctcgaattatacacaatcttcggtccccactctctcatataacctaaccacggcggctccaccaccgctcctctgagatactccgccgcaacaatctcatacttcaaactcgaatcaacaaacaaatcactcttcgctgaatcattcctaatcccaattccaagcaaagcagatccttgtaaatacattccagacttagaaaagctcgcgtgaccattcttcgacgagtacaccacagctttgttacttccttcaacgaattcaagattttcaggtttgatccactcgccgccactgtgttgagagaagtaaatagagtaaagctcgccggagaaattactgattctgactgtgaaatgttcccaatcacaaacgtgttgaccagttttagccaacgagagatccataagccctagcttcagagtcgctggtccgttgaacggacaaaaaatccaaaacgcaagatccgtaaacgttcctccaaatgctggcttaacgtgaacgtaaagcttcgagctctcgagatcgcctcgtttgatgaattcgcgtctttgttgatcgttgatcggtaaatcgatccaatatcgcttatcgttggttccgccatgaggtagattcgagccggtttcgtctataggttcattgttgataacagaggaatttgaattgctgcataagagtgcaccgtttttgaagaaccatgagactgaagaaggtaggtagacttcattaggatggaagtaaactcttggaccatagtgttgaatcatagcatggatttgttcgatgtttggcattgcgtgtaaactcgaatcgaggttttttagacacgcgattgtactgagatgatcttcttcaggggattgagttgtgcagaagaatgtacctgttgagactcctttgccacgcattccgcggtcggatggtcttgttttccatataaacataggaatgcttaaagaatccgatattgcggtgattatgactttatgtgcttcacacttatcggttagatcagctcgaacgcatcgaacttgatccaattcaggtttcgcgggactcgttgtaaccaaatatccgatcggtttatacccttgaggaggctgcggtaaccagaagtaaccgtacgattcgctttgacgctcttctgataaatcatttgagctccagaccaatgtataatcgagtggttgcacaagtgcaggctctgaagacttattaacttgtcttgctacaagaagaaaacctctcaagaggtgagaatcagactgacagtaatgacctaagcaatggaaatcttcaggtaatttgtcaggtttgtagaaggaaacactcttcttgttatctcgacgagagcagtatcgccatacgaattcaaaacttgtgatctctgcgacttctaattcgcctagattgattcttcctaaaccaaagccttgacctgaatcaattcaaagccaagaaaagtgcatcaaaaacctttgtactcagctaacataaatccaacggaatctgaaatcctaagacttgtccatggattggatcaaatcacatcgaaactaaagagttaaatccagaaactttgggggaaaattcgaattccgatctgaaaaggtaaaattgaaatgatgaacaattggaattatgtaatttttacctgaaggccactggggaagagaagcagggagagagaaggtttcaggttccttcaatggcggatattctttgagattgttccaatacagacatttgcatccaaacattccctctgtctctctgaaagattcatacgatgcttcgcgaaaccattacaatcaaacaccgacatatatcaaaaaccttgttgggtcccaattctttaatcttcgagttttttcgatttttctgataataattcttcaatttctttttcataaaaaaaacagagtgaaaatatgttctgtcgccccataaaagctgatgtctcagagcagtacataaagctcggagacaaaggaacagaagcacattgatgaagtttggaattcaatccagtaaggaaaccaaaaattgaaatgttataccaaaactaaaccattcccaaagggagataacagtcaaaagctctaaatggctaaatctataacaaatttaaagaaaaacatatataagccaaaatctttgtttctttgagccaaaaaccaaacccaacaaaatagaaattacaaactacttcttccgtagataaaggaagaagaactgaatcatttcattctttggtagcactaaaactttgacgagattcttttttcttttagcgaccaccaccgcggtagtaaccatttcctcttggcctgtagtcacctccatcctggtttcctctgccagacccacgcccaccaaaccggcctcttggtgcttctgttgggtaaccaccccttccacgtcctcctcctcttcctgaccaagtcaatacacatcaaagtcagaatgagttacatgctgtacactttctttcttatgaggctttcacaagacgctcttaagaagttttatgatacaaaatttgttggtcatagagcacggtttcaaaagaagacttacttgctccgcgaacaccagcgggatttggtcttcgttcctcaatgtatacttgccttccacccaagtatataggagaagcctatatattattattacacaaacggaaaatgataagaacaaagcgaaaggggaacagaagatgaaaattaatctagtgaggtaactgtggaatagaatctagaccttaatcgcattctcaacggaagtcatgtcctcaaactcaacaaatgcataacatacgcccataacatcctacatgtttagttgcataagattgttagttttggctcttcatatcacttaagataaacatagagaaaaggattaaaaaaaacacgaaatgaagattatttaccttgcgggttctgaggaacacaccatcaggcttgattgtaccgaagttcttaaactcttcctctatttcagaagcagatatgtcggaaggcaaattcctaacgtacactgatttgaactcaactgaaacaaggcacaccagaaagaaatgaatatatgacaaataactccaaatagcatatcctagtgcgagtttgagcatatgagaaatttcaaaacttttaatggtccaagaaacttacagtcttcaaaaccggagccatcttctgcctctgctccatagtcggaaacatatgtggatgagtttgattgctgaataggggcaagaggcgcagccagctgaggggaaggagtccgcattggttgatcccactcattaatatcttgagagctcttgttatatgatggttgtgtagcagctacaggtacagttgctgcttcctttgcaacttttaactgagaaaaagagaatcagcacatctccaattaaaaagataattttctatatctcaaatgagacaatactaaagttaggtacaaatgacaagaccagatcatggttattcgtcatggtacgagatagtaatccccaattcacagcattatcttttcaaaggaagtatacagtcaactattgactgactaccatgacacacatatatatgaagtatgaactatgaacactgtaagatatgtgcttccaggtcgtttttttcaatagatatgttgttttgttactatgctgaacaactaaacaagaccaaagagagtgtgcacttacaatggaagcataactcatctttgatttttcaccaactggttcctctactggtgcagcccgatgttcatgtaccacatcaactgcaacttcttccctaggtgtttcctcaatcgcaacttcatcttcatagtcttcatgctgaggttgatgttggtcctcttgcagactgtacttatcaacaagatcatctttgatttggactgcgttcacataatcgcttgcctcttcctccagcacatagtcagaaactgaaaagtcaaaaccagtgatatcaattttaagttttaacaaattcatcacactgaatcagtcgaaacaaaacatgacaaagttgacaaacaaaccttggggatctggatgacgggtaggaggattaagctgagcctcatgcttgatttcagataaataagaaggctgatgatagtaaacagtaccctcatcaacaaacagaaatacatcactgagaacaaaataacccttttcctgaggagcgagaaaaaaggtctgcacaaaactccttctgttgctaaattccttggttttcacagatcctgaaaccaccacaagaacaccaccttcccacgactcgactgaattaatcgtcttcacttcaatcgcagtgaaattcagtgacataaccatgttatgaatatgctgcaatcacatagaaattgaaaaatcaaaaactttcactaattaagtaaagcacaaacctttatcaacttaagttccactaatccactagaacctaatgaattctagaaaaatactggatcttgagaaatgggattagtagaaacagaaggagagagtcgtgtaccagcaaagaattagcagtctcggtggaatcaccatcgatacgaatagctctactaggctcagaataaaactgatgaataagatctggctgctgctgcaacacttgataatactgccccacaaagtacgaacccacctgcaacacatagtatgacaccgattcaatcacttagccaataataatagcttaagaatccataaatcaatttacgaaatgaaaactcgcctgcgtcgctccaggataaggagtcgccattatttaacaaaacccaagatctggatttaaacaaaaccctaagatccgatgaagatcgagtaaaagcttccaagaaactcaaattaatcagaagaacttcgcacagaaggaactggatagagaaaaagaagaagaagagagtatctctcaattgaatttgaataagaagagatctgaggaaggattgatgaagaagaaggaagtgagatttataaagggtttacagagaagaagggaaatggagagtgatagatctacacgagagagagattaaaagggtttttgtgaacactatagatagggtatggcaattaagaggaggcgctctttattccctttttatctacaaatgtatcttttctttccttttccctttgatttgccccataagttttgaatgcgtagaaaataaccctgaattcttataataacaatatgggtcctttatcttctttttattcatgattttaaccccaaaggttttgacattaccaaaataaaccataataacaaactgaatatttatattctcatgattttaaaccccaaaggttttaagattatcaaaccctttatattgccattacttactttttgttttctcgttttttttcaacatctagctttgattaatatgaaaagtagtcctgatgtttacaatggaacttgaaatgtaaaagtatgatacaaagtttgtttgatcaatgagagtttcttttaccaaacgatctgcagctttgttgttgtgccttcttgtccaaacaaagtcaacactggagaatttttgcctccaatatttgatctctctgatccaattgtggactttaaagttttgtgtttctcccttgactagcttcaagactatacgattatccccttcaaataacactttcttgtgtccttgtatccatgtgtgttgtattgccattaccaagctttgaattcctcgcttatagtattgcctccggagacatcttttgcatattgcattggttattaagttctgattctgatctagagcccttgatataagtattatgcagtgattataattgggcttttatggcccaatcattgagctgattaatatattggactttaatggcccaaatcatggtaaacaaaactcatcctactgatagaagaaaccctcgttactatcctctcactctccgaagcgattcagaaagttttaacccaaaaaagcaaaaaaaaaaaaacttttgttcactcgatggcggcgaagagaatcggagccggtaaatctggcggcggagatccaaacatattagcgaggatttcaaactccgagatcgtgtcccaaggaagacgcgcagcaggagatgccgtcgaagtatcgaagaaactgctccggagcaccggaaaagcagcgtggatcgctgggacaacttttctcatacttgttgttccattgatcatcgagatggatcgagaggcacaaatcaacgaaattgagcttcaacaggccagtctcctcggagctccaccatctccaatgcaaaggggattgtaagaatcccttattatggattagggtcctctgttttacgagtttttttggttatatgttgttgtttgaatttgaatttcgtataagagtggtttaattcacatcgttggattcataaagttcaggctttgttgttttatatattatcttgagattgatttggcaatcaataattctggtttctcggattcatcattcagttgaaattgtttctattgcaagaagttagttaaatttagcatctttaggctatgaagttgattccatagagttctcaagcgtctaagtatggttgattgtcactttgtatgaatggcgatcatctacttgagagctatggagttggagttttgtacaagtttgggatacttccttctgatatgtttgtgtgtgtgtcctgtcttggtttagagatctatatgtaagatgatttgtgtgtgagtcctgtctcctcttggtttaggaaatcatgttcaggttctaacttaagtgatgctagaagcgtattcaatgctctagagttctgaagcttgtttatatggttaattttcactttatttgaatggttctacctttaacagactagtcttcttctagtttgtggtacttgagcgatgaagtttgagttctgggattagttccttctgatatgttttgatgtgattgtcaaattgttatgtgtttgtttcgttaaagggtttaagctgaaagaagatatttcagcttatgtctagggtcaaagatgaagtctatcacgtctcctcttggtttgggaaatcatgttcatgatctaacttaaccataacagtggtggaagaacagattatcagccgtcaaactgtttttttctttgaaacatacctaacccggtttgagtattgagtaaaagaacggtcattgaagttccatgtatttgctgcgccttgcaaattttgaaatcaatcagagttacaatctagtgtagaaagatttttcatttaccataatcgtgcatatctttgaatagtgtcacaatcactttatatgctatagatagaagttttatagatgtagtgaaatgtatagttggatactgtgaatctcactaactccaaacttccaaagtgagataccagtaaagcttcactctttcccaatgaaaacgactgaaactggatttcactagaaaaagctgctgctttacttcttgttagtgttttctcgttttcatcaattttctattttgatgcttcattttacttttaatattttgttttcaatagtgggtatggtttttatctgatctaaatcattggaaataaatagaacaacaagtattaatcagtaagttgaggaatcactttcatctttcaatgggcaattaaataaaatgaaagatttgaaagaaattagatactaagtgacagagagacaaaagaaaaaaatgacaaaattaatccttcattattccaatagcttaataaatattgtatttatatcatccaaaattttccaaaaaaatcaaaatttatttgtatttaaatcaatatcataattgaatatacaattggacatgctatactaatcatttttctaatataccttgttaaatttttaattgggaaaataagaattggtaggtaaaaataagaatcaataagcatcatatttattactcttcttcttcatggcagacctcaaaaccaacaaacaaacaatcacaaaccctaaaacaaaaactcctcccaccgccaaagctatcgtcctttctgtgtgttgtctcttctctccacctacacacacacacaaacacccattaatggccattcccattataattacttatttcaaattttaattatcaaagaaaattaaattaaaaatattagctagcctcactcacatgtaacctgaatgatgtgtcaatattctaacatttggaaaaatctcttcttttctataacgaagtaatctatttccccactagtttttcggttttaatatcttcttccactactagttctttgttttcgtcttgtctccattagtttttgtttagtctacttgacaacgaaactacataaagatatacacattcttatacgagattcatgtgtgtgtaactatcaccgaactattaatatttgtatacaaaatctaacactcactattattcgattaaataactccttaccgtagagataaaatatgtcgctaaaatggaaaaaagttttttcatacttcaactaaagatacatatatgtgttcgattcatatcaagtatattaccgtactaattcatacctcaaacataaacagtgataccaactaattatataccaatactactaaattccaccatttttctattactctgtttcgcgctaaagtttttatttaccgttttatgttaccaattcgacctatacgattaaaactctttaataagagaactaattttctaatcatctgaaagtattatatcaaaaggaaaaatataacagtgatttaattagtgtatacctgataatggctctatgttgggaacaccatgagagtagtaactatagctaacgaagcacttctgaaggtaaacttgtcccgagttcgactctccacactcactctttgctttctcaaatccatctttcacacattccccacaatctgaatttcccaaactaccctcacactgtcccaacacatacaccgactcatactgccccgcgtaaaaacctcctccgccaccaccaccaccggatgatccagttttcacgccgttctccgccataccaaacgccgtctcccttttcccgacaaacccaggatcgttagaatcttttttcccacagacacggaacaacatctccgtaccggaagtttgccggaatcctgaactctcataccggatataacatccagcgaggtgaacacgagccgccaccacattaccgtcatctctgccgccaccgcagagtttagaaacgagtttagggattttggagacgcaatcgtaacactgagcgttttggagatcgccacggcactgaaaaacaccgatcacggcggtggtgttatcagttccggaggttacggaagcgaaagagctttgtgatgattgagaaactaaagaagtgaataagtttttgagattctgagagaaaacaccagttgggtctggagatttctgatttgcacaacctttaaagatcagatttttataatcatcatcaccggagattgcaaagaatggtaaaaagaaccagaagatgaagaattgataggtgagtttcataattgagaaagacagagagagatttttgtttcttgatgttcaaaatctttttactagtttgtttctgtctaataaagtttgtgttgtttttatgtgtccggaaaaaagaaagttttccgttttttttttgtcttttgttttgaggtttaaagacaaaaaaatgtaaataagagcaggttttgtagtatgaaaccatgaaaaataaaggagtatacttttctttggatcttgcttcaagggtaagataaaaaagaaagaaactttgagacgacaagtgtttattatatagatttggtttaggagattatgtaatacagtatcaaaaaaaaatgattactgtttcttcttttttgttgttgaatttagtgaataacctttaatgccattaaatctgactttattgtctgaatttggattttgttttaggacattgatggaaaaacaccttttgtgtatatgtattttttgtttaaggcactaagatatattttgatgagtttgatttaaattgtaggctgatacgagaaggaaaataaaatcttagaccttgttgtaaatgtgaatgattgattcgattttattttgtgtccaaaacaaaacaaaacatgatcgttttgagtttacataatttcagaacataattgcgtagtaactggagtaaataataataaacctgtgtgtttttgtaaactacaaaagatattatcactatgattattttgagttaatgataagcatgattgtttttgcaggattttggatttcacattctatatgatatattttgagttggtgagtgtggaagatttgtcaacaacccttgatctcacaagaaccaaattgcctttgtgtgtttggattatagctctcttggaacctttgttgatgtattttacctatgcttttgcttaccttttatggtattggggaatgcctatctttgttgtatgttaaaactttgtgatcttagaatccttctacctttgtacttgttttctcttgtagatgaatgaaaacaagcatttgcccaaaaaaaaaaaaaaaagattgctcggagaagtagaggtgttccccaatgtttcaaaatcattaagagttaaagactacaaaaggaaagaactaatactgtatactgtaaaagatatgtgaaactcttaattaagtatagattccctatacaatattagtgaataatttttataaaataaggttaccagaactgcctgcattggatttaaataccggagaatttgagacatacatagttacatacacatgatagtagtaagatcaaaaacaaatcttaagaggtcaataagattcgcttatttattgagtttgacccgacccaattaagcccggcccattaagcagagaagaagaagaaagagagagggtcaacaaaaagtcacagtcgaacaagatactgagaaagaaacgaaatttcacctggcactgtcctcgcgtgtactctcacgcgccgacgtaatactctgccgtcgtcaccgacattgtctctacgccgttgtcatttgcttattacggccaagattcttcactaagtaagtcaaaatcgtggaatcctttctctgtaccgagctcgctttaaaccctaaccctctcgtctctgtacttagtaagttcttctaatttccgacgaaagtcttctcctttttgagtctcatcgtcatctgaaaacgctattagctctctggaagagaaaaaacaacgttttgttagagtttctttgtgcgattgtgttttcttaagaggaaaggtttcaactttcttaggatattcaatttctgagtcttttctgctacttgtggttagtctttgctgctaggtagatgtctgtagtcttggtttgttgttgatttgctttaggtctgtctttgcttattgttgtaatgttttgagttctggccacatttatttccttactgaacggctcttcacatcttgtttcttccgcattttgataggacgaggcaaatgagaagttacaacttgtttcacgaaagcaatcccacaatcagttttagttttgttggtgcagaaacgatggcacctaatctgcatatcaagaaagcatttatggctatgagggctatgggaatagaggatgcgcgagtgaagccggtcttgaaaaaccttctcgccctttacgagaaaaactgggagttaattgctgaagacaattacagggttcttgctgatgctatcttcgatagccatgaagatcaggtatctttctttgttctctctttgatctactgtttttttttttgtaaatctgttgtaatcattgtctttgttattaccttgacattccatattgatttacttatataaaggctattcaagaaagcgaagaaaagaaggcagacgaagttaaagaggatgaaggctgtgtatgttttttccaaacaatcttccatttattagttcaatgttgctttattatccatgcttcactttgttgttgatccaatctttcaggccgcagaagttgacagaggaaagaaaaagctccatgaagtatggcaaactgaatatctttgctgtgttagagtaatgtgtcttcatgttcttgtttattcagtttctgttgtgtaatatcagtctatcgaggatgacgaagatgttatggctgagtctgatcgccctttaaagaggctgcgacgcagaggtgaaggaggctctgctttggcaagccctagcttgggcagtccgactttagagggaccttcaattaatgacgaagaaaatgctccgatcctattgccatatcatcctgtaccaattgaaaatgaccatgatgctggtgagctcattcttacaaaagtcgagcccattacaaatatgcctctcagttctattcctggtacttttttgtaaataggagtaactaaatcttatttgcattgctcattttgttgttatgattgttgaagctactttctccaaaactaatgtgtcttgtacgttttctgtagattcagtagatagaggggactcttccatgcttgagatagacaaatcaaatggacatgtggaagagaaggctggtgaaacagtaagtactgctgatggtactaccaatgacatttctcctacaactgttgcgagatttagtgatcacaagctagctgcaaccatagaagaacctccagcacttgaattagcttcttctgcttcaggcgaggtgaagattaatcttagttttgctcctgcaactggaggatcaaatccccatttaccttctatggaggaactacgaagagcaatggaggagaagtgtctccgatcatacaaaatactggaccccaacttttctgtgcttggttttatgaacgacatctgtagctgctacctggacctggcaacaaacgggagagattcagctaaccaattgccaaaaaacttgccgtttgtcacaacgaacattgatgcattgaagaaatctgcagcaaggatggcttatacttctcaggccagtaatgatgttgttgaaatctgcagcaacgaacatatgcgtgatgctgaaaacggtgcagttggtgattccatggctttggtagttgttcctgaatgccaactttctgcagatgagtggagattgataagcagcgtcggggacatcagtctagggaaagaaactgttgagattccctgggtgaatgaggtcaacgacaaagttcctccagttttccattacatagcccaaagtcttgtgtatcaagatgctgcagtgaagttttcgcttgggaatatcagggatgaccaatgctgctcctcttgctgtggagattgcttggctccgtcaatggcatgcagatgtgcaactgcttttaatggctttgcatacacagtagatggcctcctacaggaagattttctggaacagtgtatctctgaggcccgtgatccgcggaaacaaatgttactgtattgcaaagaatgtcctttagagaaagccaaaaaagaagtaatcctggaaccgtgcaaagggcatctaaagagaaaggccattaaagaatgttggagcaagtgtggctgcatgaagaattgtggcaaccgagttgtccaacagggcattcacaacaagctgcaggtacattcaacttaccaacctttttagccaagtagtccaggatttgataatctaaacccatctcagttctgatagaattgaaactgattatgatcattttaacttggacttaaccagtggagagattctgatgcctgaattttgtttatgttcctttttttttttttttttgaatcaggtgtttttcacgcccaatgggagaggctggggactcagaactctagaaaaactgcctaaaggagcatttgtctgtgagcttgctggagagatattgaccattccagagttgttccaacgcatctctgacaggcctacttctccagtaatattggatgcgtactggggttctgaagacatttcaggggatgacaaagcactttctcttgaaggaacgcactatggaaatatttccaggttcatcaatcacaggtaaagggacactgaaaatgagtttgttataaagtttcatatgactagcctagatttagaactcatttgggaaacttatatagttggtttcactctcaattcattacttctaactgtactatgtctatatgtgcagatgcttagatgcaaatttgattgagatcccagttcatgcggagactactgattcacactactatcatgtatgacacagttccttgtttcatttctaatcatttgcttatagaagactcatctgttatgtggaaacaatagaccgattagctaatctgtatttttttccagcttgcattcttcacaacaagagagatcgatgctatggaggaacttacctgggtgtgttagaagtttctccacccactcttaacagatttgtttcttttagaaattttcactagttcgggttcaagtcctgttttctttgtggttctgtttgagaagttttggacttgacctgcaggattatggtgtcccattcaaccaagatgtgtttcccacgagtccgttccattgtcaatgtggtagcgacttctgccgagtcaggaagcagattagcagtgagtaatcatcacacgatttctatttgataatccttttcctatatttgactgttatctcggttttgaaacatgagcccttcactattttgcaactaacacgcaatttgttgatgctgcagaaggcaagaatgtgaagaagcgagcatgagagagagctttacattggtaggttttgaagatatgtggtgggcgcaaactcctttttgttgtgaatgaattggcaaaaaaattccaatcgaaaaacgctttttgtaaaaaattccgacaatgcatataagcaaagtcgcggtccataaaataggtaggtagctatcaggatgaaactataatccttagaaactgattcacttttgtgatatcaaaaactcgtgtgaatatcttaattttggttctaacggctatggcttttggttatgacttatattgaaagatctctctatttatataaatcgtagtatcgaagtgaagtcttgaaagtgatttcaccttaagaagaactcccatgagaatcacttgtggaaggcttctctctctctatatatatgaggaatgataatagtacaagatcaaagcttattacattgtatgatacttttgagtgctgttggataatcctatcattgagttatgtacagttttctacgcttaaaccgaaagctgtgcttcaatggctttacctaccaagtctcggttatgaggtctccagagagaatcttgatcgccagatgaagaaatggccggttgaattccactagcgtttagcggaaacagcgtcttgtagtagccatccattatagccgaaatatcacaagtagccgcaacaccaggaatctgtttcaacaacaacaacaaacacataatttgaaacacactcccagatgcagaatttatgtctcagagagaagccagtaagaagaggaacctggtaaatctcgcgcaaatagccatagagatttgggtattcaacaagcttcttcttggtgcatttgaatagaatgttgtaaaccgaatcaaaacgaatcagagttgtgaacagacatacatcagccaatgtcaacctttctccacacaagtatctattactacccaagtgatcctcaatctcatctaaggtactaaagagttcattcactgctccatcatacgcttcttggctctgcgcaaacccgcacctttcaaaaatcaccacacatgacacaacaaacaaagccatcaactttagcaacaaacacacattgcagcatcaagaacacaagctacgcaaaaaccgcatcaaatgtgaacaattcagttgctttctatagcttttaatactaaagagttcattttacagctccatcatacacttcttggctctgcgcaaacccacacctttcaaaaaatatcgcaagcaaattaccacacaacaaagtcatcaactttagcatcaaacacacattgcagcattaagaacacaagctatgagctaaacccgcatcaaatttggaacaattcactccattcctatagcttttttgatatcccgcttacttgtaaacgccattgtaacattctataaacattgtaatgatgttttccaatttacctgtaaacgccattgttaactttaggatacacaatctgattccaaccttgtatcatctctttcaactctggtggcgagagatccaagttatcatttcgggccaatttgtttaaacctgaattgaagaactcgataatatcatagctttcgttacaaacaacatctttcttccttaaatcccacagcattggaacagtacacctcccatcgtaacctccacttctagatttgtacacttccttaagattccggcaccggtttgctttatccaaactcgggataagtttatccttatccttgattgggatattattattcttgaattcccatgatccatcttgaccaggtgatgcgattgagaccggaacggcgtcgtttaaacccttgagagcacggacaattagggttcggtgagcccaagggcaaggaagaccaacgtagaggtggagctcggaggaagcagcggaagtgaattgggtcgggtcgagacgaaattttgaagtgggtcgggtgtatgacccggatgaatcggatggagcgagttgggtcatcatgagctgccacacggttgtccaagctgttcgagcggtggagataagtagacctggaggaagagatggtccccatagtagctttgtggcggaggtgaagatgcttgtggtggtgctcgtgcttggttttggtgattggtgcgacattctagggctgaaatggcgtggcgagaaggacgggaaggttaattgtggcgcgaagcaattggccatggctgaatttttttccttcggcgagagaagagagacgaaagacgtaaaacgatatgttttgtatccatttgaaagcaggcccaactacgtttattctaggcccaagtggatataagtgtttcactaattaaaatgtttccaaacattttaattataaaattataaaatagagtggatatagagtatatagagtgtttcactaatttataaatcaatgttatgaattataatagtttttcagttctgtgaaataaaataaattttaaaaataacataaattctcatctcacaaaattcaaaaatttattattaaaaaatggtgaaagcagctgaggggctcttaccattgaaaatgctcttagtttacatgtgttctctaattctcagactcttgttcactggcctcttttaatgatgaagaatctactgttgagcttaggagaattttctacgacattactcttctccggctccggtttatcttgctatcttttaattatgtttctcgatatcttttagcaaatagtgcattgtcttctttaaattcatcctcttttggagtgtaatggttacttttatcaaaataacttgtttgcccaaatttgtttatatgaaatttggtttagattcagattgttgaatttaagacttgttttgtgcccaccccaaaacaaaaaaaaaaacaattatgaggtttccctatccaaaaattgtgtattgagtggtaattagaaacactgtggggacatatgttaatgttagatgactgaattgattgcttcattaataataaaatgacagcaattattttactttgattttaacatttcatctgcaaaacataaaaattttaaaaatactttttatgaatacattctcatttttcaattttcagaaaatcttaactggtccgatatctttttcttccacatcaattatatttattatgtcatctatgggtttaccaattcatcaacatcatatatatcatcaacgaaaaacacaacgagttaatagtgttgcaagaaaaaatgaagactacaaagctaagataaattaggctcatacaaatgttgttttctatgacaagtatttgtatttggatcaaaagttaaagcctatgaatagaaatatcaagatcttgcaattttgtatgcaagaaaacacgaaacaaaaaaaatcatcttttcagattgagaatttaatttactacaaaatatgaaaagaaaaggctccatatatagacaataatagcaacgtctatgtaattaaaatcaccgtcggcgagaccaaccgtcgtcgaaattcagatgatagctccggagatcataactacactgaatattattatgatcactcttccgagaccaccttaagcgcgatttaagcctccaaacaaactgcttcacgagaacacgtggttttccacaacatgagaacgcaaacgccacaatcgttctttcctcggtgtttcctagcgttgctgaagccgtcgtcgagcttccgattcgctttccccatctccggaactgaagtctcttcaaactttgtttgttcatagcttttagagttagtttactctgtgtgtgtgagatttgtgagagtgagaaaatgtgtaagaagtaacaaagaagcaaagaatgtgaggaacatttaaagagctaaatttgatagaaagtgagagatagagagggaggctatgggatttgcaacgtgtggatttatcattcgtggactaaaagtgtatagtcaaagaatagtcgaaagagcatcactcaccaccatatatccattttttttgtttgcctaatatacaaatatgaaaaagctaagtaattaaacattataaaagtaattcaatctatttcatctattaccactttagtgaactacctcgtgacgtatttgcacataaacttctatgttttagtggctaaatgaaatcattaataggcaaatcatggtgttttagcaagattttaaacgacccttttaacaaaaaaaaaagatgggtttaaacgaccaacataatgacatgagttagtagataaatcatcagtagattaacatatttcaatacaaaaagaaatatagtagagtgattcatgattcatatgccaaagaattatccaaagtgcgtcattcatcaccatatatccacttcttttttgtttgtctaatacactagtatgaaaaagttaatattataaaaaacaattcaatctatttcatcatctattaccacttaaataaactacctcgtgacatatttgcacattaactctatgttgtagtggctaaatgaaatcatctataggcaaaatcatggcgtacatctagcaagtttataaacgacctacaaaaggttttaaaagagctacactatgacatgacttaagataggacatcaatacattaccaaatggttaatacaaaatatagtaaaatgatacgtttcatagttcatatgtcaaattaacactcccatttattgagatttagtctttataatgaatgaatataaatttctaatgaatgaatataaattttcaagatatgtttgaaaatttagttagtgtcagctccacatcacaagcctaatttatgggtcataaacccgtcccaactttgggtggagaatcaaatacaacttttattagaaccaataaaccaacggtgaagcaaaaatctcaacgactaaattaatcccactattggcgaaaaaataataagaattccacttttgaaacccctttatcaaaaagcattatctgatgcaaactcatttttttcatcagttttttttgtctgaaattcttcggaaacattcggttaaagtgagatatgagtgtctaccagtctacaccgtccatggcataaacgacgacgttttaggatagatcatgacatggattgatacaaagcatataccaaaatgacaagattatgcctaaaaggaagaccccacgcgtaattgctttcttgttacatgacgtaaaagtaaagatacatgagtcaaaacgacaacgatgtataacaattataaacaaagagaattcaattttaaacaaccaaaataaagctaaggaaatatctcgaactagaaatcaattcatttctggatctttctgttactcatccatcataccatttattgtatctttatcatctaatcgcaaacgcaagaaaacagagttttcataagatattttgacaaaacatctgcatcaatgtgatcttaccttgaagaaactgatcttcttgtattgatcaatgaccattagtttttctagtggcatatgcagatatggaatacgtacaagcaccaaactctttccgcgagctcacctacgtgtatgaacacaatgccatctaagttaatgaaaagatatctcaagggaacttgtaaaactcaaggaaagtactatgtagttgtgtaacttacagtcattgtgctcgtttagatctttatcgcagctgcaaaatctgcagaagagaaggaaacaggtagatatatggatgtcgatttctaactgtttgggttcaagaacaatgtgaaactgatctttagagagaaacttgaccttgttgttgagtggtctagtttcaactgtttctctattccgccaaaatacagaccaaacagcggtgacctgtgataccatggttcaagatctttaacaaaatgttactttaaccaggaccagaatacaaaatctatgttgtggcatcagacctataattagatccaatgttaagatgatgaactatagagttgaaattaccatgatggaattgcagctgcggtaagggcagaaggcaatttccagagctgatgaaaacgactctcaagtatttctgttagatactctagaatctcttcaacctatataagaacaaaccaagaaagttagaaacctgatttacatatagcaagaaaactaaaactttcaataaatgattctaattgaaaaagtgaccttagaattcaaagcaatctcgttctgttttaagcatttagatctttgaagaagaagcttgcataactcctcgtattcttctgacacagtgacagatttgtaggaaactgacatgataccttcgattaaatgggtccatctgcttgttacacatcctagtaacaatagctcctgcccttaaacaatatcaccacaagtgttcaagtaagagtgaccaccatttcttacaaaccaaaagagtccaatatgaatatacctagttcaagaatcagatcaacttacaatcttttcgatgaatatatcgtcatcattcttatctgaaacacgcaaccttctcaacatttctacccactgagcttttggtgcagaaaatatcaagctggctcctgatactaatcttaacgttctcttactaagaaaataagatatcgctttcgactgccagatattccatcttaaaagctcaataggctgttgtcccaaactaagcaaaaaaaggaatcaaattaagctcatcaacaagtacaccaagattattgcaatacttagaaagccaaacataccccaagaaagttgcatcattgtcttctctatgtagggactctttaggctctatgtgcttagaaaggatcttcaaaccagtttcaagtgctgatacacaggacacaacagattgcctcttacagagtttcccatcaattatctctctaataccgtcacctgattccaccgcagcaactagaatagcttggagttgtttatccttcaatgtcgagttattcatcaaatgctctaagacaaactctctcccctttgaaagattatctgatgataaattctccaaaccctgaatttttttttccaaacaaacaattcttccaatttaaaatccaccttgagtttcactaatgataatcaaaagacataaaaacacaacctttgggaacaaagggttagatttcatctctgatatagcttcgtcaagctctctcatagattccccaaacgtatctgaactatttatgcttcttaaaacctaaaagcagaattctaagattaacaaaaacgaaagcaatgaagcaaatttaacggaagagtgagaaaaaaaagagccaacattttcgaagaagagaccccattgaagagctttcttgcaattttcagcatcccaatgagcaggaacaccagaagattgaaacccagatgcaagtataagcaaatccacaaaccctttcaatagctttatgaaatcttccttggaaatttctgggtaattccaaaccatttcttcttattttttgattcgattcgaacgatacaaaccctaattcataaaagcacaagggaattgactgattggtgtgaggcatgatcgtgaatcagtgataagcttctgtctttgggttctttcccgcgcgttcgttgccctagaagaatttggtattctgaataataaggttttggttttctaactaagaactttgtgacgtttttgtgtactgggaactacacgatgtttagccattctaaaaataagatgttcaggctcagagtctgtgaaccgaaccggaccggaaccgtccataaagaatttgacaacaacaaaaaaaaaaagagagacgaaaatacggataatttttttttaattacaacaacaactttcttattatatttttgacatcacatgtgacgaaaatggcttgtttgtttaaattttttaataagaccaaacataattggacaaccaattataaaagtgacaaaacacgattaatttttaaattttttatttacaaaaacaactattttcttattaaattttatttttgacatcatatgtgacgaaatggcttatctgtttgtttttcaattaaatccaaaattggtaacactttggttttatttgttttgtcaactgaatttatgaatttgattaatcgtatgttttcggacttcggagtagttaacatgacatctatctaataaatccattgttaatcaaatgatttctaattaatatataatgaaaatctttgaagcaaataagatcatgtatttatattcatccctacactaaccagaaagccaatcccgtcgctcacacatggataaaggacagacaaagtcaagagacccgtcaattattatgaacgaaagttaatatttattctaaatttgtcaagaagagttgtaattaacgaaatggtcctaaatatgtataaatgacaaataattttcagtacttacattaaaaaaaaaaattggaattgaagtattgaaaaagcaattcatggttgccgattgtgtggatccagactgatcaagaactgtatgagttgtgaatgcaatcacttggatttggtacaagatacatatatcttaaagtcgcaccatatatgtaatgttaaacaaatcaaaatatattagaacgtgggaaatgttcttaaggatgtaatgtaaacgaatgaggactaggttaacaatacacatgagttcagccattcacatataaaataatgttaatgtttacaaacaaaattcggtcaataatttaagaacttgcaagacatatctatatatacatgattaatatttgttcaaatctgtaatctcttcgtcttaatctgttaccaacaaaaaaaatgatttctgttagacaaattctaataattattatttcgatccgagatactcatatatattacaatttgaaataaagtatatacaaaatggaacatagatcaaagattgtaaactttgattttgcataccatatattatttatttattttttccaaatatttattattattatctcacaagagcgaatgtgtaagtattaactgtagatagctctaccaagttttaaaagtttcaaaagataattactaattgattcatgataaatcttacgatttttagtcttttgagactaattattcttatatcgagaatcgaagaatatgaatgatatcaaaagctgaaaattgtgttttagagaagaaaatatatttaaacatgtagagaaagttggctagtccaaatgtgtatccattatttttagaaggtctatgcaatctaaaagattttgatttctgaaaaaaatgatgatttatgtggaaacacataatataattgatttccttatctatgtcattaaaatatatttattttcctctaatgtatccaaaaaaaaatctacagttgaacacgttttagctgaaacgaagtatgaccaaccaaaatcgccaagagagagcagtcattcatcgcgacctccaaaccctctttatacatgttgaagcgatggaatccatacatactgatcttccagaaagtcgaatagtttcataggtcttctcaaaagagatgattttaacaaaataattgtaatagttgtgtgaaaatgacttctaacaatcattattcaaatgacattaggaattagttgtgttaaccctagaaattctacaagttttttaggcccaaagactaatcatacgaagctttgtatttgtgtatacactcgaaaatattctaaatttaaagtgcggctaagtggataagaagacgactcgaatccaagactctgtactggagaattaccacaggaccaaggtaattaacttgattaatcgatttacactaatccatcaaccttttaacatctttttggttgtacatacacatacatatacatagatatgtatatagttatacttatttatatctttttttaatagaattgatcatatccggagtataaattagctaagaatacatttattcagacagccaacacagctgattatattaaatagcatgagctggaatggatgtttctcaacttatttctccaagttgcctatttcacatcaagacatggtgcccactttcctccaactctagatttattgtatatctatgtgaaaatgtgctgtcgttcacattcatccccaaagtattttaatgtatattgtatttgatcacatgaacatgacaaaatttatctgtaaatgtcttataataattgaactaaaaatgttatatttttaatctttttgtttgtttctattggataaaatgcaaataattatttggtagctatagacaaaactaacgtcgtgcaacaaaagttaaaaccatctttaacaaaagaaaaaaattgatgacaagatatgtataacaatatcaatgtctaatgacattctatctttaaatgtaagaaacaaaactagtattttggagaaaatattttaaaccttactttgtgtttttgttgacatttcacaaattatttaaggtgatttgttaattaacaatatcaaaaaaatcttcctaaaaaaaattaacccatacatgtgatgctatagttagtagtactagaactaaacccatccagtagtaaatctaataaacttcatttttttttgtattttgttgacttgcacttcgacatactctatataaacacaaccatattagagatcagatcccaacaccactaataaactcaacatggctagatccttgttgctctcgctaaccctcacattcctcttcgccggaattgtctcagctcgtgactggaacatcctgagccagctcaaaggaaccacaaccaccacgaagactagccaaaccggcgtcacatctttgaaagctcccaacctaaacggatactgtgagagctggagagtcaacgtggagcttaacaacataagggactttaaggtggttccacaggaatgtgtatggttcgtccaaaagtacatgacctcatctcaatacgaagatgacgtggagagagccgtcgatgaagccatcctctacctcggaaaaacttgttgcgagaagaagacatgcgatggcatggatgcttggatctttgacattgatgacactcttctctcaaccattccttaccacaagagcaacggttgtttcgggtaaataaactaaacttaaccatatacattagccttgattcggtttttggtttgatttatggatattaaagatccgaattatatttgaacaaaaaaaaatgattatgtcacataaaaaaaaattggcttgaattttggtttagatgggtttaaatgtctacctctaatcatttcatttgttttctggttagctttaattcggtttagaatgaaaccgggattgacatgttacattgatttgaaacagtggtgagcaactgaacacgaccaagttcgaggaatggcaaaattcgggcaaggcaccagcggttccacacatggtgaagttgtaccatgagatcagagagagaggtttcaagatctttttgatctcttctcgtaaagagtatctcagatctgccaccgtcgaaaatcttattgaagccggttaccacagctggtctaacctccttctgaggttcgaatcatatttaataaccgcattaaaccgaaatttaaattctaatttcaccaaatcaaaaagtaaaactagaacacttcagataaattttgtcgttctgttgacttcatttattctctaaacacaaagaactatagaccataatcgaaataaaaaccctaaaaaccaaatttatctatttaaaacaaacattagctatttgagtttcttttaggtaagttatttaaggttttggagactttaagatgttttcagcatttatggttgtgtcattaatttgtttagtttagtaaagaaagaaaagatagtaattaaagagttggttgtgaaatcatatttaaaacattaataggtatttatgtctaatttggggacaaaatagtggaattctttatcatatctagctagttcttatcgagtttgaactcgggttatgattatgttacatgcattggtccatataaatctatgagcaatcaatataattcgagcattttggtataacataatgagccaagtataacaaaagtatcaaacctatgcaggggagaagatgatgaaaagaagagtgtgagccaatacaaagcagatttgaggacatggcttacaagtcttgggtacagagtttggggagtgatgggtgcacaatggaacagcttctctggttgtccagttcccaagagaaccttcaagctccctaactccatctactatgtcgcctgattaaatcttatttactaacaaaacaataagatcagagtttcattctgattcttgagtcttttttttctctctccctcttttcatttctggtttatataaccaattcaaatgcttatgatccatgcatgaaccatgatcatctttgtgtttttttttccttctgtattaccattttgggcctttgtgaaattgattttgggcttttgttatataatctcctctttctctttctctacctgattggattcaagaacatagccagatttggtaaagtttataagatacaaaatattaagtaagactaaagtagaaatacataataacttgaaagctactctaagttatacaaattctaaagaactcaaaagaataacaaacagtagaagttggaagctcaagcaattaaattatataaaaacactaactacactgagctgtctccttcttccaccaaatcttgttgctgtctcttgaagctttcttatgacacaaaccttagacccaatttcactcacagtttggtacaacctcagttttcttcacaacaaattcaaacatcttacccttatattacctctttatctcttcaatcatcaaaacacatagtcacatacatttctctaccccaccttctgctctgcttccgagagctcagtgtacctcgccatggaaccaaacaccatggccagcttcgacgatgaggtaagagaaaacaaaaccgaaacttgtttcctaggttttgttctttaccaaattctttcatttggattcacattaaaatctcaacgtaatgtacatttcgtggatgcagcatcgtcattcctcattctcggctaagatttgcaaagtctgtggcgatgaggtcaaagacgatgacaatggtcagacttttgtggcgtgtcacgtgtgcgtttacccggtttgcaaaccttgctatgaatatgagcgtagcaacggtaacaaatgttgccctcaatgcaacactctttacaaacgccacaaaggtagattaacttaaaccctgttttcctctcaaaactatatctagcttgactctcatactggtgaattgttttgcttgaaggctctccaaaaatcgccggagatgaagaaaacaatggtcctgatgattcagatgatgagttgaatatcaaatatcgccaggatggttcctccattcaccagaattttgcctatggatcggtactatttgactttgattcatgttttttctttatagtctctctttcccatttggatcaaattctgagtattttctcggtaatgcaggaaaatggagactacaacagtaagcagcaatggcgtccaaatggtcgagccttttcttccaccggaagtggtataaatagaaaatatgtgtgaaatatgtaaatacctatagatgtgcaaacgcaaaatttgagacctgtttctgtatgatttgatttgaagtgttggggaaagactttgaagctgagagagatggctacacagatgcggagtggaaagaacgtgtagataaatggaaagcgaggcaagagaagagaggtttagtgactaaaggagaacaaacaaacgaagacaaagaagatgatgaagaagaatacctgtaataaacaaaaatctgtttttccttttatctcaagtattaaagacttgaagcgtaagtaactgagttcttgttgtttacagagatgctgaagcaagacaacctctctggagaaaagtcccaatctcttcgagcaaaatcagtccttaccgcatcgtgatcgttcttcgccttgtgatcttagttttcttcttccgtttccgtatcttgacaccagccaaagacgcataccctctctggcttatctcagtcatctgcgagatctggttcgctctctcttggatccttgatcagttcccgaaatggtttccgattaaccgagaaacctaccttgaccgtctctctatgagatttgaacgggatggggaaaagaacaagcttgcaccggttgatgtgtttgtcagtacagtggatccgctcaaggaacctcccataatcacagccaacacaattctttcgatcttagccgttgattacccagtgaataaggtgagctgctatgtgtctgatgacggtgcatcaatgctcctgttcgatacattgtccgaaacttccgagtttgcaaggagatgggttccgttttgcaagaagtacaatgttgagccaagagctccagagttttacttctcagagaagattgattacctaaaggataaagtccaaactacattcgtcaaagatcgcagagcaatgaaggtcagtgaagaaagatctcttacttttaaaccacagaacatatcttctttacttacttgtcagtgttttgcagagagaatatgaagaattcaaagtgaggatcaatgctttagtagctaaagctcaaaagaagcctgaagaaggttgggttatgcaagatggtacaccatggcctgggaataacactcgtgatcatcccgggatgattcaggtcaccacgaaaacctcaaatcccaacggttacgatataccatcaaaggttccacctttggatctaaccaactactttgattcaactttttcaggtgtatctcggcaaagaaggagcattcgacattgatggtaacgaattgccacgtctcgtgtatgtatcaagagagaagcgtcctggttacgcacaccacaagaaagctggagccatgaatgcaatggtaagcaaagcaaagcaaatcaaacagtcaaaagctcactaagaaaccaaatctaacttgttttcgggtgatgtcgcaggttcgagtctctgcagtactcactaatgctccattcatgcttaatctcgactgtgaccattacatcaacaacagtaaagccataagagaatcaatgtgctttctaatggatccacagcttggtaaaaagctctgttatgtccaattcccacaaagattcgacggaatcgatcttaacgatcgatacgccaacagaaacatcgtcttcttcgatgtaagtcttcattagcaaaacccccgaattcaaaattcaaaacccttaaatctgatttttgtttataacagataaacatgagaggcttagatggaatccaaggaccagtctatgtaggaacaggatgtgtattcaatagaccagcattatacggatacgaacctccggtatcggaaaaacgaaagaaaatgacatgtgattgttggccgtcgtggatctgctgttgttgcggcggaggtaaccgtaatcacaaatcagattcgtcaaagaagaaatcaggaatcaagagcttgttctcgaaactaaagaagaagactaagaagaagagtgatgataaaacgatgagcagctatagtagaaaacgatcatcgacggaggcgatttttgatttggaagatattgaggaagggcttgaaggatatgatgagcttgagaaatcttcgttaatgtcgcagaagaattttgagaagagatttggaatgtctcctgtgtttattgcgtcgacgttgatggagaacggaggattgccggaggcgacgaacacgagctcgttgatcaaagaagctattcatgttattagctgtggttatgaagagaagactgaatggggcaaagaggtaaataatcatatttatactttatagtgtggaattcctaatattgcagaattgctaagagtaagacaattaacaaaataactttcaagtaatacaaaaatattttgaaataataataaaaactaattttcaaaacattagtttaaaaaaaacaaaaataaaataaacttctattataatttctaaagattaaaataaaatcaaaaactttttcctttgtcaaccacatattactcgaaaatttattttatttttagtttacatttttaaatatttatccgtaactcgcgaatttaaatgactgaattcatcaactaaattgaattttactagttataattgttttgtagaatatatagattgactaaataaaaagtttgatttactagttattttgattttacaatttgcaatatatgtttaatcaatcctttttttcttttgcaaatataaattagaaagataaccaaaaagctgttatctaatactaatattgatttgagtatggattttagtgcttgactcttgatttttgaactatgtttcattgttgtgtttcagattggatggatttatggatcagtaacagaagatatcctcactggatttagaatgcattgtagaggttggaaatcagtttactgtatgcctaaaagaccagctttcaaaggatcagctccgatcaatttatctgatcggttgcaccaagttcttagatgggctcttggttccgtcgaaatcttctttagtcgtcattgtcctttgtggtatgcttggggaggcaagcttaagattctagaacgtcttgcttacatcaacacaattgtttatcctttcacttctattcctctacttgcctattgtactattccggccgtttgtcttctcaccggcaagttcatcattcctacggtaagtgctcatgatctatgtatactttaaactcctaatggtttttacactttaaccataattcatgaaaaaataattattttacccaaacgtttataagagacttcttttgcgactatattttagaaaccagttccatcaatcctacggctagttttttttaacccttaaactcctaaaagtttgcactcttacccctaaagtttatatcctaaattccaaatatttaactcttttaccccttagttatataaaaattcactgttaccctaaatgtatttgtcacaaaatcgaagaaatgattatacttttttttttgacaattagaaatgattatactttattaacacccttttgctctcttttgattcagatcaacaatttcgcaagcatatggttcttagctctgttcctatcaatcattgcaacggctatcttagaactccggtggagtggtgtaagcatcaatgacctctggcgtaacgagcaattctgggtgattggcggtgtctcagctcatctcttcgctgtctttcaaggtcttcttaaagttctctttggtgttgacactaacttcaccgtcacgtcaaaaggagccagtgacgaagccgatgagtttggagatctttacctctttaaatggacaacccttctcatccctccgacaactctcattattctcaacatggtcggtgttgttgccggagtttctgacgctattaacaatggatatggttcttggggaccgctttttgggaaactgtttttcgcgttttgggtcattgttcatctttatcctttcctcaaaggtttgatgggtagacaaaaccgaacaccgacgattgttgttctttggtctatccttctcgcttcgatcttctctttggtttgggttcggattgatccgttcttgccgaaacagactggtccgttactgaagcaatgtggcgtcgactgttaaatgaggaaccgcattttcgttttggaccgctattttgagccattttgcttggcctatttttccgatttgggtgttctttgttggattatatggatttgtaaggaggaaaaaaaatacaaaactttgattcacttgtgaaataaagtagacaaatttctgtaaaatacaaacaaatagaatgaatattactaaatcaaatcacacacaaaacacaacgattttgttatcaaccacacacacacaaacaaacagagtgataaaaataatttcacaaaggcaatgtagtaaccaaacatgtgtggaattctttctctgttgtggaattggagttctaagaacttcgactgtacttgttcgttgccattgagtgactgttccagtaaccaccaactgttccaattatcggtgattcagggcttctacttggcgatttccttggcgaattcgtagctgagaactgctttatctcctctgcagttaacgcgcccaatataggtctttcatcatggcattgaaccagtttcgagtatttcttcttctcggacattgtggtttcaacactgctacaaccgctggtcgtggtttgtgatgtggataaccaagttgaaagactagcatcaacagctatttcttgagttctctgtttctcagtttcatctcttgatttccggttcaagctgaatgttgatgataaatcatcaacctgagactccaagctgaaggaagcaattatcacattctccttccgaggctgtgtttgagttgttgttcttcctttggctttcacagctttccattgggaaagattctcaatcgggttcagtactgcattgacatatccacttctgtctctaacactcacactacccttttcttcaaccctctctatatccataacattatccgcaatctcctccgtataaactactttatcccagttgtgcagcttgtcctcataattgtcatcattataatagtcatcatctagcagcccacaatcatcatcatcagtatcctcaagatcgctatcgtcacaatccgttacatcctcctcttcatcatcactctctctgcaattctgatatctatggttagaaggataagaccctgacgagttagaagtaacatcgctcccttcagacgaacatcgagcctgcctcgacttcacctcttctttcttctcttcaaagagctcaacagattcatctactgcaatgtgttcatatgttttaacattggtgtcaaaagttactctcttacgatttggacttggactcggactctgtttctcctcaaccttgtcactgcagtttaaagaaaagaatcaaataagtcaaatctgttgagctaaaacacaaaacatgaatctaagtagaaagaacaaaaccacaacacttaccagatatcagtgatcggagttacagaaactgtagggactttctcaacaacgttcacatgattatcctttggagacacctccgagattttagggacttccataacagttgaatcttttgcatactttgggacttcttcaacagtaggaaccctaagattcaaaagaacatcctttgcagcttcctcagagattctctacataaaacgaaacaaaattacttcagataaagcaaaacccaacaaaaaattgaagctgaaattagcttaattgcagcaaatcaacactaagaagaagaacttacgtttaaacgtggctgaaaagattctctgcgtctctgacggcgacgattcttccgacgaccgaagcaaccaagtaagcaacccattctcttctacaattcaaagagctaacaacgagagagattgaaggtaatagattccttcgagagcttataaatcgaagattaaagagtcaacattgcaaagagatgatttttaactggacttagagagaagaagaagaagtgttgtactcatggatttgggggtttagggtttccttttttatttgtctcttcagatttccttttttatttgtctctttagatttccttttttctctttctaatttcaggttataatttattaattttggcggagtaaaagtagatgaccgttacaagtctgatttattagactgtgaaattggaccgttgttatgtgggccatggcttttattaaaaaaagaagagaaggtatattatttaaattggagataatgggccgttttaaacccaattattattggtccactaaagtttttatatcctctaacttcgacgagcttgatatagttttggaccttttggtgtgaacggtcacattcaactaaattaaaaagtccaacaaacaaaatctggtcatgaaaagcttggtgtgatgtttctaataagtaaatttactgaggttaattggttggtttaacttaaatgtaatccaaactcctctccctttagagattttcagttgggaatgaaaacctttaaagcttgcaccctaaaatgacattaatggttatagatatagtttgttttcatgtttcttttttttttatattttcctttagttttttctagggttgggactaaataatcggactcggatccgagatccgatttgaaaagctggatacccaattgggatggatccgcttccggatcctgaatttttagattcagatgaatatttttttttaaactaaagaaagcatatcagcatcacatttttgtggtgatactgcttcaagaatctgtcacatatctgtccaaaagaaaagaatttgtcacatattgtataattttaatatatttattgttttagtttgaaaacaaacgtggaaaaaaacatcttacaggtgtcaggtgtgccgcgtcgtcccactcaaagcctatatcatcaattttctggctgttctaatctactcaatttatttttttattgttaatttactgaagatcggcgatgggagagagagacgacgaagcagaaggtattttagagaaggcgaagattcctttgttaaaggatcaaaatgtggcagaggaggaaaacggagaaataaagaaagagatatggctagagacgaagaagctgtggcgtattgtcggaccagctatattcactagagtcacgaccaacttgatctttgtcatcactcaggctttcgctggccacctcggcgagctagaactcgctgccatctccatcgtcaacaacgtcattatcggcttcaactatagcctcttcgtatatatacgcaacaatactttttatgtagcttatattataatgttgggtttaatttgttaagaaactatatatgtttatatgcagattggaatggcgactgcgttggaaacgctgtgcggtcaagcgtttggagcaaagaagtatgacatgtttggagtgtatttgcagcgatcttggattgttcttttcttattctccatcttgctcctcccaatgtacatctttgcgactccgattcttaagttcatgggccagcctgacgacatcgcagagctctccggtatcatctctgtttgggccattcctacacatttctcatttgccttctttttccctatcaaccggttcctccaatgccagcttaaaaattcggtatgtaacttatgatttgaaaggtcagttggtcacaacggtgggggttagtccaaatatcttgtgaactagacggctctatttttggggtagacagtgtttgcaaaaatattgatcagtttccgtgtgaaattgatgagtaaaactaccatttcttcattgatgttagattaacttattatagaaagttaattgattttttctagatgctagttatttttggcaatattcctttgttttatttatttgtgtgtgtgtgtttgtgaacgatttcttgcatttagaaatcctaaaatgtctttgtatagtatgtttgtttttctcgttcatttttaaatcttggaaacttgaatgggtcagcgagcttggtggaccaataattgatgaataaataacatttacccaaatggtcaaccacgtgttcctcgttgaacaacaagctgtctcatttgatcgcactagtgaattaaccactattaaatacataattagtggactaattgggattatttgttaatctttcttgagtttctagtttgttaattgaagtttaacataatcggataatgtgttagtatcatgggaatagaatagtcatgtgctccattttcctaggaatataagcttaatactatatgtttttgtatcatagatcagttgttgatctatcctaatcgattgcataaccatgatccaatggtttctttattaactgttcatatcatgtgcgcatctattattattagtttattgctttcttgcttattatcttgtttgtctattagcaaaaaaccataaaaatatatcgccttagcttattatgtttagtaattaatggcctggttctttgtggaatttgaactcgctatacatatcactgcaagaacaactaaaccatacacttgtgattatcggttcgggttaagacttgattcaaatctttaatagcaagttatttgggcatataaagggatttgaatggtgtgcaacaagagtaacatgatgaacataaaaaaaaaaaaaaaaagtaagagataattatagggaaaactagttttatgtctataaactagttgggtttttttttcttgatattaatatataatatgtgttaggttaatatcctcttactttttatttatttattttggttttcgatgttcttttacattaccataggtgattgcaatttcttctggagtgtcacttgtagttcacatatttgtgtgctggctttttgtgtacgttcttgaacttggagtcatagggaccatcgctactgctaacgtgtcatggtggctcaatgtctttatcttatttacttacaccacttgcggcggttgtccgctcacttggaccggtttctccatggaatctttcacgagactatgggaattcactaagctctctgcctcttccggcataatggtttggtattactcgttaaacgccactagtcgatcgtatttgtttcttttggtttacagatcagaacacaacttccttactaccgatttatatcaatacagcttggagaattggtattataggatgttaattgtgatgactggaaatttagaggatgcaagaattgacgtagactctatgtctatatggtatgtcaaatatatggttttcgagattaataatatattttatatcaaaatttttttttataattcctatatatttgtacatttttctgtagaaagttttatgaacataatctttattggcagcatgtcgataaatggtttggagatgatggttccacttgctttcttcgcggggaccaggtaaactattctctcatttctattactatcatatacagtagattgtcttccatttttgtttagttcggtttatattttatatttatgatctaaagactagttagatctggtttgtctagctgacagttcctggcttctaaataatcgtttataggattaactaggggcagactggtatgtcaaatatatagtgaagtaatgaaataactgaatagttattaacaaaacaaactaaatcaaattttcgcattgtaaaactataaaacattaaccaagtcgccttggtccagtggtgtataactctatctcctatgtattctaaatgagtgaataatgaaataaaattttaccattcacatttaaagttgtgtccgacatgttttttgaagtgttatcctaaattttaccattcacatgcgtatatagtacattaattaatatatatatgatgataatcctttctttttttaagcgtacgagtggcaaatgaattaggagcaggcaatggaaaaagagcaagattcgcaatgatcatatcagtgacacaatcgttaatcattggaataatcatttcggtgctcatatattttctgcttgaccaaatcggttggatgttctcttcaagtgaaactgtcctaaaagcagtcaataatctctctattcttttatcctttgcgattcttctcaacagtgtccaaccggttctctccggtacgctacataaacaaattgatttggattttttttctttgttaaccgaatataaacgtgttcaacggttgtgtggtgacttttgattttgcttaggtgttgcggttggttcgggttggcaatcactagtcgcatttataaatttgggatgctactatttcattggacttccacttggaattgtcatgggctggatgttcaagtttggtgtcaaagtaagccaattttctcaatttatttgatatcaaattagcaagcatttgaagattaatctacatgggctgtgatcatgctaaatagggcatttgggcgggtatgatcttcggaggaaccatggttcaaacattgatattgatttttattactatgagatgcgattgggagaaagaggtaactcaattttttttgtttgttgcttttggtttgcgtatatatgtggtttattttaagtttttttttttagtacaattgtttcatgttctttttttttaaacatttgtaggcacaaaacgctaaggttcgtgttaacaaatggtctgtatcagacgcaagaaagtgaaggttgaagaataagaattaaaaaattgtatttaaactataaaatatgcatacataataaattttgatcgtttttaactaataaaacatatggtgtatcatttcaatctcacatgaattaaatcttggtgtgtatagactatacagtatagtagtttgttttgtaaaccgaaatcagaacactggctgctggccggtttacttaatttatgaatctatatatacatttttgcagtcattttgtgaaataaatcctgtagttgggacttatttacaatggctgccactggattttaatgtttgtttttgataattagaaaaaaaatcttcgaattaaatattttacatttaacaatcttccctaaatctctccacattaactacacggttagttactaaaattaaacttccaaaatatttaatatcatttaattactacaaaattatcatttttgatattgtttttctccatgactataacaattcgactataatcatcaaaccgcagagatatttgatagcatttaattactacaaaattacaaaatatttagacaataattcataaaaatatcataaataagatcaatattaataaaataaatagtttttttacgggatgggttggcgggacgggtttggcaggacgttacttaataacaattgtaaactataaaataaaaatattttataaatagatacaatttgcaaacttttatgtatactaactttaaaaaataaattgttcccgcggtgtaccgcgggttaaaatctagtgacatatataatataataaggaagtacgcacacttctagcatcctacggtctgaaaactatttccaaacaaaaaaaatccaactgttcgaaacatgcgaaatccgacccgaacatatatgttctaagaattaagaacagatagacgctaatagaaaatatatatccttataaaatgtttgcaattaactaattatgtaagggctaactaggtttttaatcgactatatacaaatttgatcaaccgaccatatcaactgattaatgtaacttatttgaccaaaccaatcgctgaatcgcaccattaacacctatctaacgtaagtgttgttatttctcaacacatatacgtcagggaaaagtaacaaaagagaaaagtaaaaatttgtaagaaaaccatataaataactttgcatgtccatgaaaaattcaaacattacacactattagcctcctcgacgtaatagaaaaagaagtgaatacgtggagacaaaacagtttaatttctctagtaaaaaaaagcatacaattcaaagctttttaaattcaatcatatcagacaaaatataagatagttaacgcgtttttctgatggctttgcttgattaacgcccctaagattcgacgcgcataatatagtttggcttagtccatttacgtagactaaagatttttcaattattaaaaaatttaaagtccaatcttcttcttttttttagcgaacaatatcttatcgtatttgcctttgttaaaaatttcagttaacacgtgtaactaaaaatcacttaaaaagaatatattgaataagatgactacgaattaatgtattaatgaatggaataatagtagttacagaaataagacatgaatggattttaaacatggggcaatccaaaaaaaaaacacctaatgtaaaatgctgcaaaaatgttaaaaaggaacatcgaaagatgttgaaatgatatcagtaggtgcatttcataccattgtgccattattaattagtgtaataaaatatttgttttgtatttattggatatacttttctttaaatagaatgtcccttcggagacatcctgtaaaaacgtggatcgatagttggcaaaaaagaaagactagttttacatgttctagtctccggttcaagaagattatggatctaaacccgaaacttcttagttatttttaacatcgggttatttattcagtatgtcaaaattttacataatctttgaacaagattattttatacaagatgggagggtagtaaatgattgtcaagaaaaacatagtaaacaacaaatctttttttttgataaattcccgcgtaatatagtaacttctaatttattggtatttttctttttggtaatcacatatatctacattttcttttcttcgaatcagtacttctttttttcaagctttcaaaataattcacagagagagaacacaaaatgttaggtgtaatgtttgagcatttgatggttttggttgaacatgtgtttgatatgaaggatttccgaaaccaattgttatggtccctaatagtaggtccgttactatacttagaagtaaattaaaggcatgtatttttcgtgtttattgttatttaactatcgacattattatatcattcaattggatgtaattaaatctaattgagttggcaaactgacgcctaactacccgaaatcaatgacttcttgtcatatatttaaacctatctttcgatttgatatcatagttttgcaatttttgtttgttaactaaatcggtttattactctatgattaaagtgatgtatatccatacaagtactgtccattagtctatccgggggttagggctccaatattaagtgtatcagtttattttgatttccagctttaattgtctcaatttggtgaattgtaaagacatatttttattggggaaatgaattgtttatccatcgattttgatggagagaaaaaaaaacttttagatgagtttaaccagcttaatttataaacaataattaatcgattatatttgttggaattatattttagatcttttcgatttatctgcattatttgtatttatgacaaagaagaataaagtaactcatggaaaagtttgaccttaaaaatttactttatcaaattttagcgtgtagttgtgtgtaagtgtaaatgtgtgtatattgtattgtacacgcaacaatcttgcaaggatcatgaaaatcttaaaatacttgcattcattgaattctatggatggttaatggtttaaaagtttatagttttaatttataagaatagacatcaacccttcattccttggttactctaaaccaacttacctatggagttaattaagagattcaatttgaactatgtgatgtttagaccctatcaaggaagaaatttttatataaagtttgtggattattctgatttggaagagtcatgcatctatttgaatcctccatcaatcaagaagtagtatcttacatgtgaagttgagatagcaaacaatgaaaaatttatatatacgtgcaacctatgcttctaatcatcaataatagggggcgtgtatataagtaaaaattatgaacatgcagcaacattactctaattcttgtcaacagtcaaaatattttgcttgtctcgagtttcaggttcattctcatcttccgcaattgcatggtgatcatgctgatcaaatctctatcgatcgactatatctgatggagaacttaatggtattctttcttttgttattgtcactggtcgatttgcttagcgcttacaccttatgcgtctcaagcattctcgagggatattttctaacacttaatcaaatgcactcgaacctttccacacttgataattttaggctgtgatataactaaaattttatttgcttagatattacattgagaatgttctcattacaaatcaatactcccctcctactaactccaacttatttttgcaatacatcgagtttcaccattatgaagatggacgtatagtttgtcaaaaagctttcaccaaagaaagagccgttaagatcactcgaaacaacgagggggtgctttataagaaatttcaatcgctaaaatctgatgagattcataaaaagatttaaaaagaatgcaaatgagtataaaagagaaaagggggttgacagagcaatatttttgtgaggccaccttaatggggtgtatggggtcgagtattttgggtgtatgtatggactatacacaaatcagagcaattacgattatgcatgaaagtggtatgtgtctattctaatctacattatgatgggtctgcaagaagtcatcttttatagttgctgtatgattattttttttctttgcgaatttattagctactgttttttagttaatgactcattcttgacaactaagagagatccccaatcgtcattagctaagattgaaaaaataattacaaattgagatgaatagattcaaagaacaaaaaagataaattataaaaataattaaagataaatttttctaatatctgaaaaactttttgaatttttttttaacaaaaaaaaatctgaaaaggaaatttcttaattgttagtaaatgttttatcatatagtaccactagttgattttaaaatcccattatttgtttgttatatacttatatataataaacataaattgatttgacatattataactatttcataaagacataaaaaataacttcacatatcatttggtaataaaatctataatcagaatctatttatgagattaagagaaaacaaattcaaaaaaagcagattcctttttcttcaaccccaaaagctctttcatattttccttacttgttccattggtaacccaaattagaagatatggtaaagaagaaaggacaattaagtcatttactcacgaatggcattgttcgtaattttggcaatattaaagggtaatttattcttccttcttctatatattgtcgtaaccctacttgaaatctccttgtcctttcatttctcctcctctctcaaatcgtctaattctctctctatctctctctctatctctacttattatttcttaagttaaagaaacagagattaaaaaataaaaagccttctcgggttgtttaaaaatactgtttcaccgcagtaattaatttaaaaattactgtcgatgacgtggcatgcacttaaaaagaaacagccatgaatacaaaaacgatgcgtcttcccccacgccgagttacctccggcgccgtcgccggcaaacaaacggaatccgccgtgataaatccaccaccgccgccgactaaatccatcgtcaagaaaacgccgatcatccctcgaccaactaccaccgccactgtagccttagccgagccggtttgttcgaatcagctcttagccggttacttggctcatgagtttctcaacaatggcacactcttcggagagctttggaatccaactaaagcccaagccggcccattaacgacccaatctattgaccctagaaagaataagccgagccatgatatagagccgagtgatcataaacggaggagatatgtggaggttgctaacatactccgggtagatgggacccatttgcccggtatcgttaacccgtcacagcttgcccgattccttaaattgtgatgcgtaaatccacgtggagtcgtattattggttcgtcgtttagaaaaacaaaacagctgtaacaccgaaacattcctcttctctatcttttattttttgtccattaatgtttttttgtaaaaagctctctcttcatcgtcttcatcgaaattgactcagaaatgttttagggtttttttgaatgttgcaaatctggtctaattatgcttttaaattgaccaaattgaacccagattcaaccatttttttgttatgttattattacttattttgaagatgaacaaaaatgattaatgcgtaatgattttagattacttaacctgttgaatcaatcttagatccgtgttaattcaacaatatgaatctcctgatctgggaagcaaatagagtgaagatcagtccctttgtatactttgattcttgcaagaacttattaatatgatctctgttttgagtttgtaaaaattttacctttattttgagatgattatcagaagttactggaaatgctaattataccgatcatttttgaagacactaatttacttgaattcttaaacaggaattaagagcctgagtttttagatgtagtatatcatctgatgatgatgatgccctttacttgactaatttttttttttttttctatttttagaattgaattcgtgtgttttgctggttctataaagtttcttaatcacaggaaaagttcaaaggacaatacttgaatacttgggtaattcagaacatggttctatgatctcattgtggtttgttcgttggattttgtagttagcagtggacaaaaaaaatggtgattatgttttcgattcttcagttcaatttaaataagaatctatctatatcaacatttgtgaagctctttgttgtttcttggtgatacagaatctttgactcccaagcatcacggcattgaggttaactgcattaaccagtcaggtcgaatatttgttatccattgaccatttgtttgattatgggtcaatggagtttcaatgactcttcagcttcaattgttgcttataacttacattagttttctaatagtattatcttttgatctgtttccttatcactcttatgacttatcttatgctcttacttttccatttcgaactcaagcttctcatgtttattgaacgtttttgttggtgattactgtgtacatatgtagggaatctgagaacctcttgaatttaagtacatttctcatgggttggtgagttctttaattcttcatattttatttttgctcatctttaattttttgaaattttgatcgaagcagaacagctgcaaatttgaaaatctcagacatatctaaagcaatgtgacccacattggttggaatagagggtctctcagtacaaccaactgggtatccatatatgtaatgtctatacacaatctagttttacttcatattggtagtatattaaatatatatactataagaattattaaagttagttgtaaattgtaatgaattagagcatcgtaagtaaataatctttttttttcttttaccacaataattgttatgcctttacagaaatcaaagaatacatgaagggagcgaaacaagaaaacactaatacaaagggaaaacatgaacaaggccttgaaatcaaagagcagaacaataaagctcaaaaccatatcagtctaaaaccaacaaagtcttgtaggggaagaaatatcaccttcacgattaatcaaattcctcttgcttttgagttttgataattatcttgtcctataaccaacaagaccctttcactagcgatataagatctttcgtgatgcttttggaaatctcaattgtagtcccattgcaaggttctagtgtacattctactttccattcgatgaatttcaagaatcaactatcaattgacaaaacaggggaaaccaacgtggatgctcaatcgcctctaccagttggtgagaagaaagttcaaaatgatctgttttgtcttaggttactacggcgttcagtagcccacaagaaactcatcaaatccgtttgaaaagattatgtactttgaggatgatcatcttcaaaatgatggttgaaagtgtattgttccaataatataccctcaatttctagaagaatttgtattttggataataacaaatggcgtaaaaaacaacaaacatactcattgaatatatacttacaatgtcatgtacgaaccacataaaactaacttttcacttaacttttcaaattcctaacaacataaaacttatatttatcatattatgtagtataacttttttgcttctcctttttcaactctcaatgttttggtcatagtattttttttttctatttccataattttctcagaacaaggctactgttatttaggccttgtaatatttttgatgaataacattgcaataacagtgaaaataacaaattacagtcaatttggattgtaatattgtcaattaggctaaaacatataattcaaaagttggatagctcgtaacacttgcaaaatctctaaaaaaaatccgaaacttccaataaatagtactacataattccaagttggattgtaatttgggaaccaaatggttattctacataattgatgattgattgagacgtttacgctacaaataaaccaaagtcctctgaccataccggttcaagaagtcttccctctctcgcgccaactttgaccaaagactaacggtgaccacacgtcgtcaatcctttagtcatccaaactccaaaaccaaacaaaaccgaatattttgttaacctactagttcataaaattctacaacaaaaaccaaatttcaataaccgaaattaaaataatccccttaaaatttcgtaataatggtctcattttcagaaattgtattaattcacattaaatgtagtgtacaagtaataccaaccaaaccgaagcaacccaaaccggatgattttgacgaggtcaacactaacggcttttcacattagagttgaccaagagagagcattgacctgagagagttcaaataattgagtgagtctgtatattaaatacgcaaatcatcatcttcccaatttcgaatctcacacaccgaaagttattttcgaatccactaacgaatcttccacagcaaacacttttgtgttcctctgtaatttctcagtatatatagataccaaaacaagcagtgaaaaatggctatggcgagtttatatcggcgatctcttccttctcctccggccattgacttttcttccgccgaaggcaaggtacgtacggatcaagtttcgatttcatggattgcgattataaactaggtttttggttacgcgaatttttctgtggttctgatgaatcacgatctccagactccaatctcgatttcgtttttgtttttgtcttcaatactcatgagatcttacaattcgttcagaacttgaatcaaacgcgttttgtaaaattagatactggatttggatttgaattgtgaaaacacataatgtagtcgttgacagtgatcatcacttgtgaaccttctaaggtcagtgacagtgatcacagagatctgaatatatctccaagtaatttcagtgatagtgtttctggaagtagtacgcttggtggttatatttactggagatgtacttgttaatgttagctgtgttgatgtctaaaaagtatttttgatcatttgtggcagctaatcttcaatgaagcgcttcagaaaggaactatggaaggatttttcaggttgatttcgtattttcagacacaatccgaacctgcgtattgtggtttggctagtctctcagtggtgttgaatgctctttctatcgatcctggacgtaaatggaaaggtatgcaagattgaagcaaattatgtccacactaaataaatgatggttttttataaaaagttttcctctcttccaatagggccttggaggtggtttgatgaatcaatgttggattgctgcgaacctctggaagtagtgaaggaaaaaggcatttcatttggaaaagttgtctgtttggctcattgttcaggagcaaaagttgaggctttccgtacaagtcagagcaccattgatgatttccgcaaatttgtcgtcaaatgcacgagttctgagaattgtcatatgatctcaacatatcaccgaggtgtatttaagcaggtaaagcataactttgtacacactgttttgctaaggctcagtcatattttcaagttttaaaacgtctggtggctataattgcagactgggactggtcacttttcacctattggtggctataatgctgagagagatatggctttgattcttgatgttgctcgtttcaagtatccccctcactgggttcctcttaaacttctttgggaagccatggacagtattgatcagtcaacagggaaacgtagagggtacataatcttttcttatctttcgcttaggttcttactgtatcatggatgtaatatttctatataatatggtctgatttttttctgtgttgttctcaggttcatgctcatatctagaccacacagagaacccggattgctctatactctggtatgttcgatgcaatataggttctctttaagtttgctaatatctttttcttcaattttgctattctattaatgcaattttctcactcacaatctcttccacatgtattgaatgaacttgagatccttatgagcattttggtaagacaaaacttgtggattggtgataattttgcttttatatatctataccagagctgcaaggatgaaagctggatcgaaatagccaagtatttgaaggaagatgttcctcgtcttgtaagttcacagcatgtagattctgtggagaaaatcatatcagttgtgttcaagtcacttccatcaaatttcaaccaattcatcagatgggtggctgagatccgaattacagaggactcaaaccaaaatctcagcgcagaggagaagtctaggctgaaactaaaggtatcttcaggataatttttcatagaaacctaaagctgcatggaaactgttctgttggtttatgtgacacatgattttaatcataactttaatctaccgcagcaattggtgctgaaggaagtgcacgaaactgaactgttcaaacacatcaataagttcttatccacagtgggttatgaagacagtctgacttatgctgctgcaaaggcttgttgccaaggagctgaaatcttatccggaagcccatcaaaagagttttgttgtcgggaaacttgcgtgaaatgcatcaaaggtatgtcgccatgtcgattcttcaaatttcttatcatagttaaaagttttggtgttagatcaactgttaattttttgtttcctattaaggtcctgatgactctgaaggcacggtggtgactggagttgtggtgcgtgatgggaatgaacaaaaggttgatctgttagtgccatcgacgcaaactgagtgtgaatgtggtcctgaagcaacttatccagcaggaaacgatgtgttcactgcacttctattggctttacctccacagacatggtcagggatcaaagaccaagctcttatgcatgaaatgaagcagctcatttccatggcttccctcccaactttgcttcaagaagaggtaacgcttttaccaattctatttatcggtaatcatcaagagtcacggttctctctctagtggaaaatgggatctttgtacttgagatatataagtcttttggaaaagaaacaaataacttaatctaagttgagattgacaatgactattttcgagttcatccttagatatagctaaatcaaatgccgaatctaaatgagtacttggtgaaatgaatctgtgaagcagatgagtaacgtggtgaatttggtgtaaatgcaggtattgcatcttcgacggcaacttcagctgctaaaacgatgccaagagaacaaggaagaggatgatctcgctgctcctgcctattagttcattgtcccaaatcctctctcttccccatttgaatcccacgttctcaacacttaattgttagaaagtctctttattctctgtacgattcaaactctatttgcaatgagagatatatgtaacttgcattctataaattgttaatcacaataagttaagaatcctagaatcatatttcatcacactcaaatgcagattatgaatccactatccacaaataagtaccaaaggcttacattcaaaacaacagtatcccttagtcccaactgtgtacactgttttgctaaggatcattcgtattagacagtcaaattttgaatccggattctaacagatcctattgcagactggatctggtcactttttcaccgatcagtggctataaatactgacagagatatggttttgattcttagaaaatctctttattctatgtatgattcagagagattttcaaatctcattctcctacttaaatgttcattgtggccatcaatatcttcacttgacttgattatctaatctctggtcacagcgagatgcagtgacacaagtgcatggaactgtaactgttggagcacgtcagaaagttcttaacttcaggagctcttatcttatctggaagctcatcgaaagacttctattgtcgagatagttctgttaaatgcattgatgcctggggttgaggaagctaaagtgacagcagggatggtagttaataccaataatgaacaagaggttggcctattggtgccgtcaacccaatctgtcaccaaaggttctgagtatggtccagaagcaaagtacatagcaggaaacgatgtcatcactgcacttctgttcgctttacctccacagacatggataaggaccaaaatccagatctttcagaacaaaatgaagaatctcgtttccattggtaccctcttcactatgatcagcctaaataagatcaatctcagcaaaaccaataacatatgcaatctaatataatatataagttattaaccataatcattacactctactgcagattatgaatcaactctcacacacacatacacaaagtaagtaacattaagaccctaaaatcctcaaaagtctatacctcttatcaccattccaaagaccgaatcctgcgtaaaaaccgtggtggctgctgcttcggtttctcaacaacaggaatcacaaactccatcaacttctggtatctctctttcctcttatcttcaatctccttagaaagcaactcattctcttcctcaagcttcgcagccaaagcttctaactcaacttgataagcttgtttcctctctctagacctagctgcagattcacgattcttaatcatccttctctgtctctgtgcagctgctttatccaatggctcaaccatcactctcgctctcttccctctagctcctcctccgtaaacatctaaaccattcccaaacgcaactattgatccttctactttatcaatcatctgaaacggattatgcggcggtgcagaatgatcgaatccgtaattcgtcaccggaatcttcacatccaaatcctccgccgacgccgtcaccgctgtttcgtcttccaccgcagctttcgctagaaaatcctctaacgtcattatctcttccgacgtctcttccttcatccctttaccttctcctgataccatctctctccaaatctcatcaacactcttcccaccacgcgtcgtctccgttcctccgccgtgatccacaacatcagaagccgtcgttgttgttatctccattggtgctggagaagcatccatcagatttatcgacgcatctaagagtgaagattccgttggtgctggtggatctgatgcgaaagtatcgtgtaaaatcccttcgaccgtcatcgaatttgaactgtataatccgtcgtttcttccgccgtaaccgacacttgttagatctcgccggaactgttgttgaggtcttatagacgaagaagaagtagaagcagaagagatgcgacgagatagatccgagtttctcgaatttgaagaacgcatcacctgaaacgacgtcatttctggagaagatgatgaacaagttccgtttgtttcgtcctctttcgccggaatcggatcagagaatcactctgtttctttgactccgccaaatgttgaactttacagaagcagagattagggctttttgtgtcgaattgagaacctttgagaacttttggtaatttatcccaaattgtaattaattgacttttattacttttttaaaataccacgcgcatatgtggcacgtgagttttaatttttagacttaccaaagaaaagagctgattttggtaaattggataaggttaaaatcaaaatggataagattttctaacttttggagcgcgtgggaagttttgtcgcgtgtcatcaaactgtagttgtcaaacttgcatcaattatttcaagatcattaatgtattataacttgactattattacttgaatttagttaaggtaatttaatgacgttattttaactcgatggtagttgtttttagagaatattacactgtaagatattttttaaaaaacatttttatggttagacactttttaaagataaagcattttgaatagatgatttgactcatttatcgtctaatcacatatcgttttatctctctccttctcttatttattctctctttttcttttactttatcgagaaataaacaaaaatcaagccaaaaaatagatttcttcctttttccttcttccatcttcaacaaatcatccgcttttatgagaaagagagattgaaattcagctttttaaattttccacatctgctttgatctgacttgaaggagaattttttcaaaccatcaatttgagaatctgcccgatctggctgatttagttacatgactcgttgaataattgaattggatttgcggtttggtttttgttttatgtttttgttatttgttgcaaaattaatctgattacttgctctttaattctttgtctttcttctccaatttcatattcgagattattctcttaaattggagattaaagcctcgcagtggacttcgaattatttgatagcaattgtcgaatcactaattgatggaactcgttgcttagtccatgttctgtgaatttgattcatgattatatttgagttgtatatattcagaaaatctggttatcttatgtgttcatcataaacggtttataagttttttgatggttgattcacttattgaagaaccttgttgctagttctggttctgtgaaattgatggagattttagcttagatctgagactaattttcattcacagatgttagactgatttctacgtttgtgtttaagatatagatgttaaaaatttggagcaaaatcgagaagatcatcttaacagagttaaatgaacagatctctgtggataacgatttctggacacgttattctttacttttttatctcaaaatccaatcgagaagatcaccttaacagagctaaatgaacagacctctgtggacagcgatttctggacacgttcttctttacctttttatctcaaaatccaatcgagaaaatcatcttaacagagttaaatggacatacctatgtggacaacgacttctggacacgtttttcccttgaatttgtgatcatttatgttatatcttgagatgttctgtatataaaatcaaacttggacttgtattttaaaaccttaaaatccaatcgagaa

SEQ ID NO: 828 - DNA, 84544 bp, Arabidopsis thaliana
gatcatcttaacagagttaaatgaacaaacctctgtggacagcgatttctggacacgtacttctttactcttttatctcagtttacttgaacttatctctaagttttttgctatcaaattctatggcttttgaaaaggaatgaccctgttctttttgtaatcgatacgtcagcgatcggcgactgatttttttttaacttacttgcgtgtaatgtatgtagagactaacaggggcggacgcaagtgtatgagtactggggcacgtgccccatgcaagatttgataattttgaagtttgatgtgcaatttgtattggagatgaaagaattcgtttgttgtgccccatgttatagtgattttttttctaatcagttggttattactcattatttttactattttcaagtaataaatgttttcagtatttaacttatttttccaaatttatctttttctataactctttgaaagaattatgctaatacaaggacacttcaattttttctttttccatttacatgtcttttaaaaaatgtttatattgtattttatttttaaaatttatatgttagctatgttgtgccccaggttaattatggttctagatccgccactggagactaacatcatcattctcatgaaaagagtcgcaacgactataaaagtgatcgccgtttagtctagtgatgccgacgataccaacatctcatgtaaaagtggtcgcaacgacacccttactatttattctccgttttctttagagaggcttctccgtaaagaaaaatacagaagctacacgatcttgacaaactctcaaatgtttgattttgcaaggaaagaaaaaaagtaataatgagaagagagagaaagagagtgaaaagaagaagcgacgaagaagaagaaaaaaaaaggaacgtggaaagatgaaactttttttttttattataatttcttaattttcagagataaattggtcaaaagtttaatgaaaaagttggaaaagtgcttcatccgtgacaagtgcctcaaaaagaataaaattctttaaaaatgtctaaacgtgtcaaattcccttatttttaaccgccatagaaagtgagttcatgcttgttaaaacaaaatgcacgactttttaacacatcttccaaaatatcatattgacaaacaaagttttaatgattcttatacaaacaaataaccaatgtcggctcaaaccaatcaaaaactgatatatagtatataatttgatttgatattctatagtttatacgagaattgtagttgatatcataggcacaaatttgctaatgaggaaaaagcaaaaacaatgatcatgtaaaacaagtttcaaggtttgtaaatttcttcccacaaaaaaaagtgtctttgtacatagttctttcgattttaaataaaaccgttgttgttggttccacaaaacactataaagcggcgtatataataatatacataagattgaaagagggtccaacctgagaaacctaagcaagacaaatatttcatgaaactaacacaagcttacgcatcggataagtctcttggtcgccaatctctaggtggaaccgtggaatggactggctttcgtggttgtctgtctgaaaattgtttccgaggctcttaccacccaagaagatctgacttctccctcttcttcccaagaaactagtaaaaaaagcaacgaaaacggcttttaatacgtttaatataccaaaagatacaaacttgtaacattgagcacatcaattttgctatttcatacatgcataaggaacatgatgctgaccagtgttgaacaaagtacctcttacgagtcactaaaatggagattcgagtggttcatcccaaacatctgcactcccattcgagacttcctccacatcttcctccattgacaacctcacatactctctctgagcaaatcggtcccattccgtcaatgttggattctcacgttcctgtcaaatggaaaacaaagttggtttagaagtagcagagactggaacagatacaaccggctgcagtagtaggtgactatctgaacttataataatttttgcgaatttttatggcattaataaatattcagtagtaacagtttcaacagctaaacgaaggattgaataaccaaagggaggaaaactctatagaaaacctatgtttacctgacgaatgagaaaagggtcacgggtttcaaacgccatgaatttgttcaggttaaagagtatattgaaaatatttccagaaagtttggatgctttcagatcctggagtgtgatgcagttctccttctgaaagagtcattcgacaaattgatgatgcgaataagagcaaaggaacagacaagccaggaatatcaaaagaccatgttatggtttaaaagaaattttgcctctggtttaatcatgtcgaatatttgacataggatatcttcaaagagtacaggttcctgggttatacattccatgcgatgcagctgctcttcgtagaaaaactgcatctcgttgggagtgatcaccccatctccatctaggtctatgcacttgaacctgcaaagatggttttaatcaatatcaagggaaaacgaaaaacaaaaaactgccaagaacctgtgtttaacatcgatgggagatagatgagcataccagcgaggtatgccctcatatcagcggttcaactgaaaatgttctagattcatgagatgatgaatgaaaatgttctaggttcatgagatgatgaatgaaaatgtcttagattcaagatgggtatcctatgttcatgaaataatagtactactaaatgtttagtgcgttcaaaatatcaggtaggcttgtatcatcaagaaggccacatatgccacaagttttggctcagaagttatacatttatagtgacatactgtgagctaagcagctaaaggacaaaatggctaaagagaagtcactaaagacaaaaagagaagaggggaagagacatgtaccaatactcaagactaggctcagatgacttatcctcctcagcgagaataaagtatgcaaaatcttcataactcatcttcccctcaactttgcttgtaaatttcctaggaacctgagtgagagacagccgtaatttcaattaagaaagaaggaaacacactccataagataacaattaagtttcgagaaaagtgttcattaacattttgacaactggagccaacctgtgaaaatattctgtcgacaatcctgtaggtaagggcatgattaccatatttgatgagattttccttatcaataaggaaatcatggtcgccatcgagttcccaaaatctgcagtatatcacgtagaaatgctcataggagaagtacctgaaaagtaaagaaaaggtcatattgaatggtcaaatcatgcatgatgtcttgccacagtatcacaatatgaactaccaatacacttcttcctctttatgagttttatgggtagtgcttatgtctaagaaacaattcgaagacctatgcactacccatattactcacaatgctacacaccttgctgagcttgaattcttaaacaacttaaagtggtctttattatacaaataaaactaaaatcttaatctttttaacgtattgtttaagaaataatgaaaaggaaaacaaagtcacctaataactttattgatgtcgtcttcttcatcaacttgttgcatggcagtaataagattcccacgcttcagctctctaagagtaatgcaaccagtacctgatctgtttatgtagtaaaatattctgtagatgacggtctcagctgggttgacggaatagaacacagagatgaatgaaacaagcacgggaaaaattatgaattagtcaatagatgtataaaacagtaagcacctgaaaatatactatatttaagaagcatctcataattttcaaaatgtaattataatgaacaagtacatagaattaaaattagaagaattattgcctaggccaatcaagccagctaaagatgtcactttcaagttcgtcaatgcgttttgaaagatcatatatatatggaaagaaattgtacgaacgtcttagtagaaaacagacattctggtagaactatttcacaccataacatcaatgtatcaaaaaccaagttcttaccatatctttcttgaaactcaggtgtattcctcaggaattccaagccgggatgagttgtcagaagctcatcaagaactggtttgaagtcagcctatcccaaatccaaaagaagacattagccttcaggactaaagaaatcaagtgagacaataatcattggtaaacaaatcaaaacagcagtgaagagctgggaaaagaaaacaaagagacctgtctaaggtacttgcaacctggctgccttaaaatattatatatctgtgaggctacgtccattgccaacatatgtccatcaacccaatacttgataaatgcatccctgcaggaaccaaatatggtgtatttaaaagatactagctaaacagaaagattacagctgctgtatatttctatgatattactcatgatttggctaatttaaagatgtatcaattccaaacaatatctacagggtagaaacttcaatattacttatcacaaatgttctaaacaatatataaaatcgagcacactaaatttattgaaagtaaaaagaaattatattcgagtggcataaataaataaaaagataacaatcaggtattaaaattactatgccacattccatttcttttaagggtgagcaatttatgaaacaaatagctgagcgtgcatctggaaatccagaccaatgtgatctattattatattacatgaaacacatatgaataccagtggatatatacatttaactacaattacatatgaaaagaaagaacacaatgatttaccttgtaacgataccggtgccactcgtgtctatctttctaaatagtacagaggaaagaaaagaaggcagcttgcagacttctttagtaatggatttgaattctgcaattgaacaatagcaagaatgtgtttgtaagatcaactgtttgtctattcattacagaacgggactgtgatgtaaaaaagcttgtatttaaacatcaccatccatatgaagtccgtctatatagttactaaaaaattgatcaaccatggatatacattgctcccttagttccttcgcaggtggacgtccatgttggaagtaaaactgcatagcatatcaaggcatagaagcgtcaaacaagaatgttgaacaatattagctaaacccttcaactatgtaagatgtcaaacggatgaccataataaacttacttgttgtcatcgttttgttaaaaaaaaaattgtacctatgctacttgaacgaagaatttagtttctattgtatttgttctcgtggttctccatctacttagaaaactattacagtctagtttcaacaattacgtgagcatatataaaacaatcaaatcatgatgtcaactgtcaagcaaggtagtgccttctcatgttgtttgtaagacatccatatgaggagcagttggataaaaaatcgaacctgtggaatgagttggcgctttggttccctgactgatttcagaggagactgtagagaagggcttgtcttttgcctcgagaaacggggagacccaggtgagcctcgtggggatagtgggggagtgccgctgttcagaaaaacagatggcaatgcactcccgcaagcaacattgagactagtacaatttttggatacactgactggggtactagatttagtatcatcaattaaagacttgacctgcacaaacatcacacagatgaactgttaaaagaggaccacgtaaaaccttaaacgaaaaacaaccaccaaaagtttcttcaccaacatgagtcggcaatcggcatacaacactggaccatattctcaggagctttaagttaaatctggtactacacaaatacaaacacttctcaagtttagcagagccttgtaatatcccagtactattatcacctaagtcattataacccctaaatgtgctattcaagcactctttatctaacactaagtaaaatctataagaaataaacaaaactactaaatatgcaacagccgaggattcagtaagagcaataagcatgttgaatcttgctctgcagaaattgacttgaaatcagataaagtcacaacaaggacttacgaacaggtatcagcatatacataaaacaggcgccaactattaaatgaacaagaaaccaaacgacgctaaggagccactgagccagaggcttgggaataaaattaccaatcggccagtttcaggaagtgaaagccactgggagaagagttcttcagcaatatgaggattttctttaagtgatacaggagacaaaccgggaagctgcaagagctcaggatccaaaatctgaacatcgtttccaccatcgatttccatgattatcttctatcttattcactgagaatcagaactacaacaaaaccccaatatcggaattccttgagtcaattctaaaattggatcgaaaccctaatttcttccaataacttgaagcagtaactccaaaacaggattctcagacttttcaaagatctataagcacgaaatccaaagaaaattcaataaaagcagctctgaccaatcgagaaactctctaactagttgagaaacaccagctcgaagaagagaaactaaacgaaaaccaaaataaacgattcgataaaccctagattcccaaattctatcaacaagcaaaacagagtcctatacaaaacttcttctgcaattcaagcacaaacgtggaagaaattggaagatccaaagaacactgatctctctctccgatcaataacaagctcgacgacgagaggaagtcgtagagaatttttccagggagattgtgttattgatgagaaaatgaattaaaaaggaaaaagtatttaattttgattttaatactctctctcagtctcagacgcagtagtactagcggtggtggtggtatttttgttttccacttttagtcctcaacgttgaccaaaaagtcaaccaaatccagcgttctttatccgtttttgcgatcatgtttatttgagtctcgagtcaattaataaatcgcagaaattagcgatcaaattgtttgtttggttgttaaacttcatgacgtttcgactgttatcatcaagattgcaactgattcattaaagtcataaaaatgtgacttcacatgtgtaaacctagttttgaagaatgatgatgaatatttgtcatttctcaaaaattgtattggagcacttgcttttttagtcgaaatgcaaaagtatgtaggagtagatcatatgaatctaaaaatgaatgtattttatatgtgtaacttcaatatgaaattcagttttgccactttattcgaagatgagcgctaacaaaatgtgaagagtttaactataaccattcaagtatacgatcagtgaataagtaaacatttgaagtatggaaaaaataaaaataaagagttttagattggagtcatctaaagtatgatttgactaagtagatgagctaattttactattaagccaaaatttcaccgtttttacatgatttgaccagagtatgcctgccccaaaaaaacagaagcattaaaagagaccaaagagcagttgattgttttgtttattacagtaccagtacagataggttcgaagtaatcgaatatacggatagaaattttaccgtttttacatggaaactctctctacatttttgattgttatgtttgtctaacacatatcacgattacataaacaaaacgagtgaaaaagatctctgcaagctgaagctgaaattacatgtaaaaagatctgaggatttcatcaggttcaaatatatgaattccctcaaaccaagattctcatctttcttcagaggtaatttctttgggttttcatggagtttgctgtctctctctccatcattttcctttatttccgaagagagagaagctcgaagcttcttaattgatcttcccgagtgtttcttgccgctgttgcacgagagaaagacagagtcttggattcatatccagcttgcactctctggctagttgagggacggccatttccactgccgctgccaccaccaccgcttgaggaaaccagacgacttgaagttcggctttcgcttggtccacctgcagaacttggccgggagcttgaagcagcaacggctttcctagaagaagatgctctatatcttgaggaactgtttgctctttcggagtctccatgctgcacaaataaaacaaacacagttaggtctttgtcttatttagcggttctgatcaacaatgtatgtaaagagtaagatttttactgtctgcttagagaaaggtccgtcgtctgagtttcttgatctagaacgatctcgaggcgaagaagttgtagtcgggtgtcttctggagaatgcctccactgcacctgggattttatatcgggttgtttcctttcctacacgaatggtaaataaaaaaagagtagaaattagagtgaggaatggatgtgtatggttttgagatttttaatagaagtaggaaaagcagaattttacctaggatcctctcttgtctttcaataggatctgcgttgaatccgggtttcgctgttgtatgatgctggaaaatccaaagatttacatttacgtaagtacagagaaactcaaaaaccatgagggtaaaaacacaagtataagatttttaataatcacccttgttcgtgaactagaaccagagctggatccgatttgaggatactttaagactgtccagtcaaatacataatcgaattgataacctgtaagagtttcaacaatatgaaaaagataagatgagagtggcttgaaacagtaagcgaataaaatttctcggaataatgatgttaagataagaaccttctcggataaacaagtcacggaaaagcctcttgaggtaagagtaatcaggtttgtcatcaaaccgtaaagatcggcagtaatgaaagtatgaaacgaactcggacggttggtttttacacaatacctacatcgaaacattccaagctcagttagaaaagctagattacctaccaatgccaaaatgaaaatcctttcggtttgtcaagttgttgtaacctaacctctataggagttgacacttttttctcgctgattctgtcatacttctgcttctttgtcccagcttttaatccctgccaaggtaagctgatagcccaaaaaaacatatggtttaaactctgttcaagaaaatatacagaattttacagactcaggtagagaagctgtagacgctaaccttcctttgagaaaatacataagaacataaccaagtgattccaaatcatcccttcgactttgttctgtttaaacatcagcgaaaactaattaagtatttgacggaaaatttttatgaatacatataattccacagatcaacactcttaccgactccaaggtgagtgttaacacttgcataccgagctgtcccagtaagatttttgttttctctgccaaaatattagaaatttccattgagatcacgtaaatcaagatgcaaaaatgcagatccttgagtaaggataaaggaaaaagggagaacacagcatattcttacctgtaaggaatgtgcttgtgagtctgaaggtctctgtatttcttccctagtccaaaatcaatgatatacacctgagatataaagagagataagttatctcagaagtttgagacagaacccgccatcgcaactacatttaatgtataatcataatatgtccaagaacaagtttttgcacctgatttgctttgcgtccaaggcccattaaaaagttgtcaggttttatatcacggtgaaggaaacctcgagtatgcataaactcaaccctgttaagctgaaacataaacagataaaacaatctcctccattacaaacaaattcatatattcagtgaaacagaagagctggaaaccagttagcagatccataaactcactaattggtcggcaagcatgagaacagttttcaatgttaactttctgttgcagtagttaaacaagtcttcaagactaggacctagaaggtcaataaccattacgctgtagtcaccttcaactccaaaccacttgatgttcggaataccagcttcaaaacaaaacaaagcaaaaactgttttagttatttgcaaagaagcatatgcaatgaatcatcgcgaatcgagaaagttctactataatgataatgctagtttgtaagtgacacttacatcctccttgaagcagcatatacaactttgactcataatgaagttgtggatgtttggtcttcacattttcctaataattggcatcaaacaaacggagggttaaaaaaagagtaaagaagcaaatccaaagcacacaacaacaagggcgtctttaataacaaatttctcatagccttcatgtgacaagaattatacaaacaacatcacatgaaagttgcagctgaacaaaaagaacatttctttgtttggcatagagagattaatgttgttgataaatgtggtaaattcttaccagcttgacagcaacttcttctcctgtttggacatttacacctgcaaaaatccctcaacattaacaacatgtaaaattgaagaaatctacaaaatttacaaaaaaaaaaaaaaaaaaaaatcgtctactttgttacctagataaagctctccaaatgatccactaccaattttcttcccaagcttaaatttcccaccgatcacgagatccatcttctccgatctctctcaaacctcaaaattcccaaaaatcgatatcaaaaagaaacctccttttttcgttaattagcccctggatctgttttccaattcagcatttaaaactcagattcacggatttaacatcgaaaaacccttcagagattgagattccagaagtcaattcttcatcaacgaccttcgaaaacaaaaacccaccatgaaatcaataaatctccgaaaacttcatcgcaagagacccgattgccaaattgattaaaaccctaaatcagatttagaaatcgaactaatcccaatacgaaaagcacaaacttttagatggatttgacccgagaattgggcacgaaatattgggtaaattggttaatacgaagagagacgagaagaaatggagatttgtgacatttttttgtcgtgcctttgtgttttttttgttttgggtttcctttagaaaagatttttttttatttattgataagttaggttttaattatttttacagtcggataaattaacaaaaatatccagattaaggttttgtgtaggaaacaaacaaaaaaaggtgtgtgaagaggggaacaaaagttaatatggtggttttttggtttttgatatttagaggttaagcgtgacatgctctaacagttgttaaattttgcaaaaattgtttttacactagtattttaatattttttattgtgttacagcaatttttgtgttgaaaaagaaaaactataaacgcaaaaggcaaaacatgtacatgcttttctatttttatatagtttattaaaaataaaagtaaaacgttaagatttagtatttatttagatttctctactatgagtaggtatttcggtttaacttcgggtttaggttgggttcgattcgatcggatattttgccatgcgagtgttaagaaggatccgctccaaaccaaaatttggacataaacagttaaatattgagttaatttcaaataaggcatttgttttataaatatatttgcttttaggcacttttgacccagcattcaaaaacaggtactatcactacgtgaaaagtcatctttctccctcattcactagtgtcatcttctccacacgttctatttactcactcgcaaaggacgagacatgtgaacggtttcaatcgttgaatcctcaacgtttggttataatagtttattaagttaatgcagcgttgaaattggaattcagaaactgatcaaaatggaatatctggccgatgaagatgatgaatagagaaatgtcggtatcaaaaacaattttgatattccatggcgatgtctgattccaaattttatgatttctcaaacaaaaagccaattaagtgaagtttaaagaggaatcgagatgcctttgcgttgatttagaattcaattataatttatgggttgttgttcagtggcataattacacaaatacacatgtatatacatgcatatatacacaaaatcagaactgaaattccataaaatctataaaattttttgattgggttccctatatactatcttaaggtttaatattgtgtaattaaaaaaaaaaattaagtttgcttgaaaaattaagaagaaatcgatttgatcagattctgcaactatgttcgatgaagaagaagagaaaagaagacaaggacaaaattgtcccaattgaagcaataaatcgatactgttacattcaactgtctaaaatacctattttgaaataactttatttaaaatgcctattttgaatataagctcttaaatattggcaaaatagtaatttaattaaaaacgtggttttacagaaattctttcatgtgtgataaaagttatcggattctaaacaatgaagtaccatagaaaacaaaggcatctgtagaagcagtgctcttattcttactgatctcataaacaagttaagattcatcggtaatatgccatttgtctagacgacataaatggagaggtaacaacaggtttcttcttcgtctttttctcaactttggtttcagaccggagccaagcttcaacaacagatagcagatttggtgaggttttgagatccttgatctcatctaacttggccgagagtttcagctctcctccattaatgtaagccaaatgactagcccatgtctcgagcccgtcgaaaatatgagttgcatatacaattgtagctcctctctactcaaatataaaacatgaaaatcagcatttgatatttctaaacataagatgagggggggttagtgaatggcttacctgttcacattcttctttaaagaactccaacaaatccatcctagcaacaacgtcgaggtcaacagtaacttcatccagtagtaatacctgtgatcattacaatttaagtatcagatatgatcaaagaaaaaacagagaccacaatgaagagttgattgttgtttatactaccttgaacggatgtaatagacccatacatatttgcactcgacgtctctgcccatcagaaaccttatgcatacgccattgaagattgatatcaagaagatcaatcaacttctctcttctgaaaggatcaatcccttcaactaaacacaaaacatattcagagtataagcacaacgaaacaattcactaaaaactcatactaggatcagagaatctcacctccaaatatcatatgttctgctgagaagtctccttggagtggaatatcaccctaaagaattttaaagaattagaaacaaaacgttctcacatcaaaactcttgcagtgtattaactttgagatctcagtactcacagcagaaccagcagttttactccatgatcctcctaggtaagacaaatcaccactacaaacaagctctgtatcatgaaatgctgagcgatcaagcacttgtacaacattctttcctccaaccatatgttttccagcaagaatcttcaataacgtagttttccctgtcaatgaaacgcgcaacgacaatcaccttctcagcagaatcaatcaaattcgagtattaacatgatacatatagtcgaaaaatcgatcttacttactcaaactctatacatatagtcgaattcgacgaattaaaccgaattccaacactaccaaaacagaatcacacgaaatcacataatacattctatattcgtcaaggtcccaaatcgatctacttcagattcacagaaacagaaacacacacaaaatcgaaatgattcgaataatttttaccagatccattggcaccaaccaagaggcaacgagatccagcgggaagatcgagattaaaatcgaagaaaataggatcttgaacatcgtaagaaaactgcattccactaaccctaattgcaccgtccaccgcgctcgcatttttctccgccattttttccgatcaaagagtcagatagagagagggagagattagtaagtagtaaagtataactcctctgcttaatctgttggcctttaaatacgttccgttttaaacaaagaccttattagccattagatttcggccacgttatgtacttttctgtccattagatttacatactttagtcttccgctaatacgtttaaccagcagatagctgccacgtcactctatgttgctcaccgacaaagaattaaaacgacggcgttacgtcagttttcattaataaatctaattattaatttaaataataatatatggtaaatatgtttacaaggtcccacaaattatttatttattaattagataaaaacactgttattttattgaaaaaattatgcacggattaaattagatatttgaaattaaaattaaagcatttgatgtattataaatagataaagaaaatgaggtaatataaatttgttaagcatgacaatattttggcgacttgtctaatgttaatattggattattatataaaataatatgatgattcaaatgtattaaatcataaaaatcagaactagtctctatgattaagaacctaatttagacctagatttgtattaacttgatcgaaaattgaaaagattttattcagaaaaggagttgcattttacaggtaaacctcaacaaaactagtcacattttcgtacattattattattactacgtactgtttaacttccttttacagtactcgaggttcattgttaagctgcagttttaagctcttaagctgcagccacccttggccttccgtagctagctgggccactgctgtgagtcaaagtggtctcgagcgtgttgaacttgaccctccttgcttcttcgggtgagatttggaacccattggttatgacttcaagtggtaaacctctcaagactgaggttcgtcccgccagagtgttgatttgcgcgttagcgtttgttttgaactcaacccactggaatcggttgcttgttgcgcgtttcaccaccgagaaaccttgtggtacggctatgagctgtccttgagagacttgtccgtcaaacactctgttaccattgtcgtttacgatctggatttgggcttccccgtctgtcacgtaaagaatagcgttcgcgtttgcgttccactgtggaagcaccattgcgttctacacccacacacgtttcaagagtcatgtttaaatatagaaatggacatattaacatgcatcaggcatgcatattttactaggttatagtaacataatatttatgtttacttacttgacggatagatccacggagggctgagagacggatgaagcgaaggatggggagatcgtaactgttgagagtgctgatgtaaccgagctgtggcttgtacacgtcagcacgagacgggtcatcgaggttatcggtgcacctggcgctgcagatggtctcctctaagccattaccgtgtcgtccatgtcgtccttcttcttcttcctcctcctgaggtctctggcccctcaaaggcggcctaatgacaccgaacggtccttggactcggacaatgtttccacggttgtcatcttggttctgaagttgctgtgctgtctgaagatcgatcttcaaagcttgagcaataacctcgggtccaaatccattgaaaatgttcttctgtggctgttgctctcgtccttgtagccatacttgaccttgtgggttgtttccggctaagtaaaatggcttcattcataaaataccaaaaagaataaaccatattatttttgttaatttgtaattaatataatgattcttttgtaatgaggttttgttatatatatatatatatatatatatatatatatatatatacccttgggttgcggtcaagctggttctggtgactggctagatcgaagacgctgacgatgacaagtggttcctgtccgtcgttgtagaaccactgtgctacaccgggtgttgtggcaatggtatcaccgctcctaatgtgctccactttctggtgcatgtcacggaacctctggctttgaccttgaccttcgaagcgtggttggaactctgatgagtcttggaatgtttcggcgcatccagggatcacttttcccataagacctcgtcctaagaatgtaacacataaattatataggtttaattaaagttgaaagattatggactaatcctaaagagcatgaaccataaagtcatgaattcgaatttcgatatagaaagagtcgtacgtacccttagccacgaaagagagcttcgcggtgttaaagaaagagggcaagtagagacccttagactcgatgatgtaacgtgcaaaggagacacctgagcaacggagctgaggagcgtggtggtcccacacctcgatgcgaccagcctcgctcttcagtacgtgtgacggctcgagcgcattgagctggtcgagctggcactcgttcggaaactgctgaccctgctgaccctgttgagccgcgtagccatggaaaaggatcaaaagtgttaagcagaaagaaagaagagaagagactcgagccattttgttatttcttatatttcttactttttgtggtttctcacttgcattatgtgaagctatttatagggaatttatttgatatttttctattaaagttgttgaggataaattgaatgagataagaaccaggtatatagagtcgactatgtacaatttacacttcacttaaattgctatttatgacttcatccgaaaatgaattttggcttcactctgtaaaaaataaatggagttgacacatttcaatttgcatggcttattcaagtgcatgtttcttacacatcagcttttgagataggcacattgtatttgtaataggacaaatctttattttattatatacagcggtttcatttctctgtttttgtatttgtaataggtcatattgtttattttattttattatcgtaatatatatatatatatatatataaaactgtcacatacgaattgagaaaatgttttatgttacgattacgaaagtctttgatgatcaattattgatacgtgcaaatgataaaaagtttatacgcattattagataatggtaaactataaaaagacgatcgagtgaaaagacgtggcgacaggaaacagctgagacacacgtgagagatgtggcggacgcgacgaacatgctgtgagacgagtgtacggttgcatgttgttcatcatctgatctcccacagtttttaattttttttgttgaaaatttagtttcttgagattttttcccctttcagatttatatttttcaaaagagttctttccctttgaaaattctttcatatgtagatacatgtatatatatgaaattgtaagttattctagtttatctttagttacattgtattgagttaaaaaaatcttcagtgttaagagtgaatagatcttacaaaacgttgtatatacattatgttttttatgcggatttaaacgctatatgtatagcataatttttatcaaattcttttttgttaaggctgattttgttattataaagagagaaacaatgaaaacttaaaactatgaaactccaaattgtgatcaaaattgactagaatatatatcttttattgtgcttaggtctagtttctaatggatctatatacaagattacaaggtagcatgacaataataggtaatggattatatatatacaaggtggcctgatagtctaatagcccaagcggtacatctccatggtccagtattggacgctctatgtttgttcaattcaattttcttgtgctcttcaactacatgccgtttggccaagagaaaagcatcatgtacttttataaagggatattgagagcaacacgagatatatgcttcacatgtaaatgacgctacaccaagaatcatttatgataattaagttgatacctagtagtttctagactattttatttgcttcttgtaactgtgagaaaaaatctttaaaccgctttaacaaacttttttgtatcaaacccaaaaggccataaccaaaaaaaataaaatgtgtcaaacaattgtttggttgattgctaactggtgaaacggctcgaaatcatcggttaataactttttattgtgactgccttaacgtgttttgaaccgatttaaccatttaatcaaaccgactaaacattctaccaaaacaaattgttaagttgaatgctgatcttcaaaacagttggtaatcatcgatcaaaagggttcaaacaaataaactatttttttggatcgacaaggtccgatttatagacaatttttactatataggataacacaatttagtggaatcgaattccagtaaaaaaaacataatcaaatagacttaaccacttgactaaaagcatattcccgataaattaaatttttgtgatcacaaatttacaaaatatattttcttccttaaacgacctgttaatgtcataatataacactacattatacagaaaaaaatataagaattccaccatatgccaacttgttcatcccaggctgtcacttagccagccttgtacttttgtccattgaatttcttctttttgcaccatacaatgaaacaaacacttacatttcacatacatgtctacatcttcgtgtgtacaatgtatatatgaatagcatctatatttttgtattcacggtaatgtcaacatattacaataggcgaatttaggggattatctctatagaggctatctaatttacaattatgcttcaactcgctttttcttaagaattgcgttcgaattcaacatatgtctaatcataaagttagtaatattttcctaattaaactttactaatcttttttttagtttaagaaaataccaactttctagccaatatcaaaagtgtttttcattattgattcatttatgtatattaattatgagtataataaattatcaagtcatcattttctttctttattagactactaagtaccaaccattaattagttgggggttttgtgactaagagggtatatgtgttagtgtcggttgtcactctaagtaaatagtgtatacatttacattcatagtaaacgaacgattaacaatcttagtattattcataatatacaattttgatgtgaattgtatatattttgatcttataactcattacgatattatgcacctaagtttcaaaataacttgttaggatcatactgcacaaacgaattatatgtaaaactgtatagagaatccaactttgtcggcaaatattttgtcaaaatgacttattagccaatcacatctcattccaactaagccacacctcatcacttcaaacatttttctcatccatataaatcatttacctctcaacctcacttttccactatactcaaaacacataaactcatcttcaaaactcaatggccaccactcctctcctcctccttctcctcaccgccgtcttcctctccacggagataaccgctcaacgcgctgctccggctcctggcccggctggtcccatcaacatcacggcaatcctcgaaaaaggcggacaatttgttactcttatccgtcttttaaacacaactcaaataggaaaccagataaacatccaaatcaacagttcatcagaaggcatgaccgtgttagcaccaacagacaacgctttccaaaaccttaaacccggaaccctaaacaaactaagcccggacgaccaagtcaaactcattctttaccatgtcagtcccaaattctacacattggaagatcttctctctgtaagtaacccggtcagaactcaggcttcaggtcgagacgttggtggggtttacggacttaacttcaccggtcaagggaatcaagtcaatgtatctactggtgtcgttgagacacgtctcagtacttcattgagacaagaacgtcctcttgcggtttacgtggtggacatggtattgttgccggaagagatgtttggagaacgtaagatctcaccgatggcgcctccaccaaaatcaaaatctcctgatgtctcagatgattcagagtcctctaagaaagcggctgctccgtcagagtcagagaagtctggctccggtgagatgaatactggattagggcttggtcttggacttgttgtgttgtgtttgaaattcctcctttgagtttgtttatatatattgatttaattgtgcgggttgtaataagaaatttctatatgtttattatgatgcatgatttgaaaactgaaataagagattattatttcgtgtgcatatatatgtattttctgaaatatataccatgttctgaagatatttgtattattattagttctttcgatctgaaaaattgacagcctcatacgattgcaatatacaagtccatgaaggatataaagaatatagacttgtcacttgtctctcgtgcgaacgtttattatctataacctctgacattctgcaaaattatccctttaggccattaccaatatatcgtatatagtgtgacattttagtcaatcaaaattaagttatataaatttaacaatatatctagctgtaaattttgtctgaaatatagcaaaaacaattcagttcaatttctttcttttttagtttaattatccctttcttgaatcaataaagacaaagattaagcatttttccaaccttttacagaaaaagaaaaaaaaaatcagatttttacgtgttatgcaagaaaaaaatatactgataggcccaatagcctcttacacattcaccgcgatagcttttaaggaaaatgaatgtgaaaaaagttccaaacgttcctggatcacctgcactctctgccttgcttaagctcggtgttattggtggacttggactctattgcattggtagtagcatgtacaatgtcgatggaggacaccgtgccatcgtgtttaaccggtttaccggtatcaaagatagggtttgtattgttttcttataagagttaaattactctgtacctctattacttttttgtttattatccagagggtactcattttaagataccattgtttgaaagagcaattatctatgatgttcgttctcgaccttacgttgagaatagccaaactggaagtaatgatcttcaaacggtatgtgtgtttgtgtagttgtgagggtatgcttaagctgcaactctatctgattttgtttctgatgcttgtttgatgttgttcacaggtgactattgggcttagggtacttacacgtcctatgggagaccgcttacccgagatttacagaacactcggtcagaattatggagagcgagttcttccttccattatcaatgaaacactgaaagcagtagtggctcagtacaatgcaagccacctcattacacagagagaagttagtatctcaggattcttactctaatgttctgtttgtcaaaatcctttaaagtttgtaactcttcttccaggctgtgagtagggagatacgcaagattgtgacagagcgagcagctaaatttaacattgctttagatgatgtatctatcacaaacctcaaatttggcaaagagtttactgaagcaatcgagaagaaacaagttgcggctcaggaagcagaacgggctaagttcattgtcgaaaaggccgagcaagacaagaaaagtgctattatccgcgctcaggtaggttatcttgtttttgtttaagcattatgtgtctctggtttattagaagttgtgtgtaatgacaattatgtgattcacagggagaagctaagagtgctcaactcatagggcaagctattgcgaacaatgaagctttcattactctgaggaagattgaagctgcaagagagattgctcagaccatagctaaatcggcgaacaaggtttacctaaactccagtgatctcttaatctccaagcaatgaacttggagcccagccctaacaactagagaaacaaaagtcactttggacaggtttagttttcatcttgtttttgctatttatggattagtttgagatttgaacagtactagataacaaaatattctcattcacctagttttacaaaaaggtgcaagttaacaaataaatcaaatcgtgtctaaccaagaatcaaaatcatctaaaactttggatgaggtctggttcgactgtggtatgatcgatactggagtactttcgagcaaatcatcaagcacatcattaaaacccgtcatgtgaatcttttgatcagatgggttccctggtttgttgaattgttctgtgctactatgagatttgagaagagaatcaagttccgtttcaaaagctgaagatttacctgaggcactggccactgggtttggctgtgtatgtgcttcactaaaggagttaaggagcaaatctagatcagcttcaattgctgaagatttctctgactcgtctgtgagtattagtatgtccttaacttgatccagcgactcagcttccctgactgatgattctcctggtacgacaatagggtcgttttgagctatgtgtgaatgactcggttcttcattgcggctaacttttgtttgggatgtattctgcatattccacaatatcaagatatgtcaaacgtatatcctactgttgttaatgagtcgtttagatcaagtaagtaccagctcgggcagcggcaaaagatcaggatcaatgtagagtcgctcatgcaagtccacattctctagcgtctttgccaaaacattcaaatttaaggagaggaatccaggcttcacttaagaaagttagcaaaatcgtaagacgattagcaagttaaaacctccattttaaccaaaaacaagagtagtattacctcttgatatgaacctgatccatcttcttccacaacgaagttatcatcttccatccatgaaagtataccttcccctctagccgagatcatagatccaactacgcgactaaactcatctgcaacaactcataaatttgaataccttgcccgaacaacaagaacaaagacagacaaacaaaatcgatttcataccgtgcaaaagatcgtctaacgacgataaacaatctaaattgttctcaatctttgaattagactcagcttgagcttcagatatcaaatgcagataatctgctcctttgctttttggcacaataacatcagaatgtaggcttatcgatgaatcctcagctgcatcaagttcatcatcataccgatcccaattcgacggaagtgcagagactcgtcgagattgaaccggactcttggtttggtttccttgtagcttctccggattcttctctgagactccaggaactttcggtttatgaacagaatgcgatttcttgctgtggtgtagagtatgagctctcttcgatttagctagagattttgagtccatcgcagagtaatctttacaaaacaaaatcaaaagtattctcagaaactgaaccaaaattagggtttctactccacaagttccattccaaaatcggtataattcgattcctaaacgaaaatttcaaagattaagccctaactaatctaagattaggttttgttaatctctactaagagagatcgaaatatgcttacctttggaaacgaaagctgcactaaggaagatcaacgaagctttgatttggagggatttgagagagagcgcagagcgagaggaagaagaaacaaatcgagtcttacgaaaactaaaacagaaactatcgagattcggtgcatacgacagcgttttgaggtatttaaatttgggccataaagcccattatcttacacctaaaagggcttctagtagaaatgttttttttttgtaattacctgtttggatcaaaaattatattcaaacaggtacaaaaaatgatttggaatgggttcgagattctctaagttaatgacaacattttaataacttaatatatattattgtcgttctaataattggaaaacaattgatattacaaaaagttaaaactcattggaaaaagatgtgaattcagtccaatctattacaagtcttaatataatacttttttcttttcattataacgaagattgagatcttttgcatgtaataagatatttttttttgttattttgaaaatggttatgtagtttatagtcaatactttatccttttttcttcttctaattataattttgataatacaataatcataacctcgtctctctaatttctattgaatgcttagcaaaaagaatttcaaaatactattttatcattttatgcctgaagtataactttataagtaaaaaaatactaaactcaattttccgaatctttaccagtcttttaccatatttaggttttgatttttttttgttcaaatcttaaagtaatatttggatttttattcttttggtccaattattttgcttacgagttttcgtacatccctcgactggaaaaagttttctaacattgaataagaaaggcgcttctccatgttgtttcaagaaatttcttaaactatgtttcataacttaccatctaatcagcaaaacaaaattgacaattgagtctttatcatgggggcgtctctctaactaacttggagataacgaacttgctaattttttgcttcgtggtggtatgttttctagtcacaagaatgttattcttgattactttttcatccacaatttttcctacctcatctcatgggtactcatcatttaagtgacaagtgattaatgaatgaaatttgaattttttttttgttagtttgtgtgaaaagtgaatgaactttgaattttttgttagtttgtgttatcatgctaacaaattttggtactacaatgcgactgaagaaaaatagactcatcagagccataccgaacaatagttacaaatggaactactttgtgacgaaaaagatttttatagggttgcagcttattggccacaaagagtctatcgaattgaagaccatagtgagactatccatgaccatgaatactggttagcggtcaaacataattcttttcaaagaagaatcacataaacttgaagctctagcccttctaaaaactgcatcagtggcatacgaaattcaaacaatacgaccaaaatctcctagctaggttggatgttttatgtgattctaaatgacttgctgaattctttgttttgggatattagtaagcacaactatgattttttgtgtcaaatcttgaaacaatatggtgaagcgtatttcttattcaatgttagagatttttttcttgactaagggtggataaaaaaatgtaaacctaaaaaattgaaccaaacaaaaaaaaaaactaaaatactatattaatttgaatcagaaaccaaaaaccaaaatagggtaatggactcgtaatggttcgagcgcaagtatgacatttacaatgttttaagaatttgggaaacaatttgacacaaaacttcaaatcatttgtgcttaatttgcagataaactatgcttttataagccataaattatggacaagttggatgagaaaagaaagaactatggatcaaagtgggccaaagtttgaccgttttgataaggtccgatattttataactcgtcttttctaatttttattccatatgagacatatgtatatgtgtattaatgttaatatgtcttattttatcatcaataatgattgaatctgacagcaagagaatataactaggtatcattactactacccttgtgagtaatatgtttataaaatctagaataaaattacaaatgatattctaagttgtatatatatagaagatagacatggaaatattagtctgaatatattattgcaaaatgaaacttaatttgtgtgtaacaacaattaacaaccacattttttttttttttttttttttttgagcaaacaattaacaaccacatttaagtttagagataactatctgttagcactaattaatggatagtccgagtctctatcaactttgtggaaaaggttggagagtgtgactttatcttttagttacttttatgacccatgaaagagaatcttaattaaggtcccatttcagttttcataggaagttgcatagaaaagttaacagcttatataatataacccttgttacgatttcactatttttgtatattaggaaatacgactactatgggcgtatttatgttttttgttgtattctttagctaaaaacataggttaccttagataaatataattaatgtgtaacaaaacttgacatatttcaacgtaaattcatctcgagttctagttcaaacaaaatttcactgaccattataaaaattcatataacaggtgatcaatataatcgaaaagtccatgaaaagtggaaaaaagttaagaccatctaatccatttcatgtgtaaaatacatatgcttaattcatatcatcactcttgatcagtggtctacctatatgattttattaagcttgcaatatcggtttttcttctttctttagcatatatcccgttggtaataaaaaaagtcaagaaacaaaatgttttttttttgtcttgtaattattgtctatagtgattgtcctaatgtattggattggtcaaaatgggagtaaaaacaataacaccattatcattcactaaatgacatatgtatacttttaactctcgtcgtatataccttatttatatgatacatatcaccgaattttaatgtcatgaatctatcatttgtcttctttgaaatgtcgtttatcgatcgtaccctcatcgatgtatataccctttatactcgtgtatatatataaaattgagttcaaagttgtataagtatataactctaattctagactatgggtcaaaaccttaaacagtttacactagacagaaatttaaagggaccgataaatagtgatttttgattaaggaaattttagtatttttggggtccataatatttttttgggtggaggacaatctggattcattttgaaaaatcgacattcatcccatacaaaaatcgaactagagattctataagacacaaattttgaaaattagtcatatgtatttattcaggattttctgtaaaaaaaagcttcttatattattatcatttttacaactttattttatatctccaaaaattataagtcaattccgcaaatcataaataatacgtaatgtaacacatcgtaagttctctattgcatcgttgataattgtatatataatatatggacactctaattgtatataatatattttagttaagatatatatgattgggcatttttttaattttatctccgaacgagtatgaggcaaaatcacatagagatacatacatatatatatatatataacctaataatgcatctgcaaaaaagtatatattcttctactttcttatgaaccaagagcatgtggtatatctgtaatgtaccctctagatccacatctgtctaacttctgagaagataaagcgtgagtaccctcaacccatcagtcatatattttatctaacaacctataaatacacacacaagtttaatttaattctgttgtaattgttacatatgaaaaagaaaaagaaaaagtcaaattcaacaaacatacatatatggaaattcgaaatcattttttcaagaatgttaatctatatatatataggagaatatatatatatatatatatatatgtttatatttggacacatttctgtcttggcatctttattgtatatcaaagagaacaatactatacattataaggtcttgaaaattgtaggagaatattctagtgccaccagagttcaagaagaaaactccaaaatttaatattaaaaataagtttaccagttttaatacaaaaaggacactcttaaaaacatcattacattatgattaaagtttaaaaattatactcaaaaagaattgttaattaagtcagcccacaagcagtcgacttccaaaaccttacctgccttttgtcagttctatgtctcacctttactcctttttaattaaaccatgataatttcacgtcttatcttagggcaaaaataaactattgagatttagttaattcttctttgttaaaggatcgatatgaatatttttaaaaatcatgcatcagttgcaatattgaactcctaacgaggtgcatgcctcaaattgattgatatatacaataattaagtggtctagtactatatatgtttgcctacataatatcacttgtataatcaaattatgtattagcatgaaaactatagtgtcaaggggaaaaaaaaaaactgagtgtcaagaaacctagagcgtataaagattttcttgttaactgattcattaggtaagagagtttaacctcatttaggtacatagggtaaatgtagaagatcaaaatctattaacatatttaacataaaatatattgtaaaatatacaaataatctaacgtagctgcataatgtgcttaattagctcaaatgacaattacaagtattaagctgattgattttatttttttaatcgatcaacttgagaaagagaaaagacacagttttaatgtggactggctagaggtttatcaaaaactgctttcatgtataaaatttattaaactcagggattattagtagttaacaaataagaataagataaaaacagcttatgagtttgtatgactgtcaaaatgtaatgtagaagtatagaattcaaagaagattaagaactcaaattataaagaataactctctttattagtttaggaagattctctcaaaacctaaactctcttaatctctcaaactcataagttgtatcacaccttgatacctccttatataataagcttttaaccttatcctaattattaaataactcctaatattataagataactcctaacaatatattctagattatctcctagaataataaagcttaatttccttttctctttagtaacttgctcttcaagttacttcttcttcttcaagcttattccaacaagaagaagttcagattgatgatattccaaaatagtgatatatattcgcatgagatgtaaatgaatttcgcaaagatgtgagaccaatacattcttatgttttgcggaagagataaaaatttactttgttaaattacaaatatttatgtatatactttttccaaaagaataataagctttgttacttgataccactttcttaaagaaaaaagaggggagaaattttatcatcgaaaagcaagaaaaattatacttttatccaccattcaataaagacaccaaattttcttctcaaatcgaaaaaaaaagtgttagcaaaaagaaaaaaatccaaaaaaaaaatattcataaaaccaaaatgttaaataataaataaataggtaggcgaatcagtttaagagttgtaggttctgaagagattgatttcagctagcttcatcgtaataataaaatttcaacatttgattttactgtcgaacgaactctcaagtctgaatgaatgtctaatttatcttaggtatttttgtcgtatgttgttggagtatacctaaagagcacgtgcatgggtacacgtgcatggcaggctttgttcgacttcgacaaacaagagatgtgaccataaccgttggatctgttttacctctttcacatattgtgaaaaattctgattcatgaataactaacaaaaatgactatgtccgtatatgatatctgatgggagtgaatagtgatcccgttaactgtgtatttaaactgaatacaactattgcaaagaaaaaggtgatagataaagttataattttcttattgatcactaatgtcaatcaatttttttaatacattgttttgttacttatactgcataccttcaaattaataagcattatagagattgtgcaattgataaatcagattaatgtttttatttgttggcaaagcaaatgtatcttattgtaactagatatacattacaatactttgtaaacataattcatttaagataaaatttacggatatataaaaacatatatatatatatatatacatataacaatttctttatgctatctgtatcaaagtactccttgaatccaaaaagattaactacactccactacagcctcatcattctttaggcagattgatcgatgcatttcgtattatatactctacaagcttgaaaaaatcacaaggcgtacacaattttgatctcccagtagtttgtttacatatgcgtaaagccctttctagtgcctaatattgttgtatctagatttttgtttatttttattttatttttggcaaatgaacctttgatgctacgaaaagatcttctaataaactgttccttttggtaaataacttcacattttatccccaaaaaaacatatagaaagaagtgtaaaaaataaaataaaaaacaaaaaaaatatagtaagattgtttttttgcactgagttaacatgagcatgtaggaacaaaaagtaagtaattattggacccaaaaaaccagaaaaaaaaatggagaggaaagggcaacacaaaaataacgagataatcattctcaatagaaaagatagaaatatcaactttctatgtgtcataacgcactactacaacaaaattacttcgaatatcttggtaatttaattacattttttaacagctcgcttcgaatttgcaaggctattaatcgatttttctaagatttaatataaatgaagcatttgatgctgtatgatgcataaatacatgattatcatttgtgaaaaaatgtaattaaaattactcttagcaaataccatgtctatacaaaactaaggatgtatgaacatgaaataaaatgaatcaaactaaaagaaaattgtttattatattgaaataattcatagtgaaactgcaaacatagggtgcctataaagtaatcaagggatgttaaattttttctatctctgcattttgaaattttattggctctgctgctatcactttcagcttatgattttccaccgccatccactttgctcttttaaaataatctcataaaggaaaagaaaaatacaattaaccacatattttaatcaaaatggctgcaacagtttaacatatcaaggtgctaatatacccacacacacacacttatatataggagctaatatagagtggtataggttaagacaaaagccatatataagtggagaacccaatatatctttgtctttgttgttttttccttctcgttcatagttaacttgcagatttcttagtatttctaatctttttcttatattaaccttttgtctccttctctctctctctctctctgaactatacaaaaacctacttttaatttctcttccaagaagtcaagaacccagaagaagacatgacaagtgaagttcttcaaacaatctcaagtggatcaggttttgctcagccacagagctcatcaaccctggatcatgatgaatctctcatcaatcctcctcttgttaagaaaaagagaaatctccctggaaatcctggtaattatttatattaaatctcagctagcttgatcatcacctaaaaagaaaaccctagtatcttttctatttttttgccccctataaattaattttcttgggttgttttgttctggatcttgacctaaatcaaaagtagtatttggctgcatgagttatagatcactggctcatgcttaattaatgtgaaaatactaggccttttagtaaattaaaacttttatttgatctatagagttcttcttttttaaatcgcattatagtttccatgagaaaatatatttacataccctttattattattacctccaccaagaaaagcacacacattatttttactaaagtacatgatccgatccaaaaatagatgttgttttccgaattgacctaattaaagaaaccacaaatgttaatgatgatccacttagatccggaagctgaagtgatagctttatcccccacgaccttgatggctacgaaccggttcctatgtgaggtatgtggcaaaggtttccaaagagaccaaaacttacagcttcatcggcgaggacataatcttccatggaagttgaagcagaggacaagcaaagaagtgagaaaacgtgtctacgtttgccccgagaagacatgtgtccaccatcactcctctagagctctaggcgatctcactggaatcaaaaagcatttttgccggaaacacggggagaagaagtggacgtgcgagaaatgtgctaagagatacgcagtccaatctgattggaaagctcattccaagacttgtggtactagagagtaccgttgcgattgtggcaccattttctcaaggtacacttttttttctttctctgtcaattaaattaaaaataagcttcatgtatatatgtgttgtcgtttgtattgatcatgttcgaaagctattctatagtagctttatagtatctacatcttcgtttttgtcaatatgtagtttgattaagttttataagtatgttttgtcatttcctatgtgtttgtttatctcttttgaagtagggtaaagtttcttgcttgggaaaatgtttttgttagtgtcatgattgaggcaaaaagtggtataaatttataataaccatgatgaacatataacataagctagatataataatatatacaaataatggagtacttcatgtgtgtatggttcaaaatggtaacattatttattacttaatatgcggaaaaagtgtcaacacaagattgacacatcaatagttatgttacggaaatatgtacttaggtttttctctacttttactgctgcacataaagaaaaggcagctaaatgttttcaagtattttcatcagttaaaactttgatataaatgcattgagataaatgttgattaagacgttaactaatggtggttttggttgaaacaggcgagacagctttatcactcatagagctttctgcgatgccttagcggaagaaaccgctaagataaacgcagtgtctcatctcaacggtttagccgcggctggagccccaggatcagttaatctcaactatcaatatctcatgggaacattcatcccaccgcttcaaccatttgtaccacaaccgcaaacaaatccaaaccatcatcatcaacattttcagccaccaacttcttcgtcgctctctctatggatgggacaagatatcgcgccgcctcaaccgcaaccggactacgattgggtttttggaaacgctaaggcagcgtctgcttgcattgataataataatactcacgatgagcagattacgcaaaacgcaaacgcaagtttgaccactaccactactctctctgccccttctttattcagcagcgaccaaccacaaaacgcaaacgcaaattcaaacgtgaatatgtccgcgacagctttactacagaaagctgctgaaattggcgctacttctacaacaaccgcagcgaccaatgacccatcaacgtttcttcaaagtttcccgcttaaatccaccgatcaaaccaccagttatgacagtggcgaaaagttttttgctttgttcgggtctaacaacaacattgggttaatgagtcgtagtcatgatcatcaagagatcgagaacgctagaaatgacgttacggttgcgtctgccttggatgaattacagaattacccttggaaacgtagaagagttgatggtggaggtgaagtgggtggaggagggcaaactcgggatttcctcggggttggtgtacaaacgttgtgccatccatcgtctatcaatggatggatttgaaagagtttaaaaatttcggggttaatgcataaattacgtaaaagaagaaggaatcttttgtcatttccaccattttctaagataacatatgtatatggtaatggaagttgttttcttttattaattcaatattctaaaacttatgatatatgtataatgaatgtgtttatcttcaagatatatgtcaatgacattcacaagacattcataatcttttgaatttttatcatacgggaagtacattttaaatgtaaccttaatttttgtaagtaattacataggtatgccattagaaataaaattttaaagagtaaattaatttatctctataaggattaaaaagtcaaatactaatttaattaattaaattaattaaaaaacgaaatacattattaattttcaaaaataattgccaatcaaaatcaacatataagatttgatatctaaattttaattaatttaatttaattagaaaaacgaaatacattattaatttccaaaaaagtaaccaattaaaatcaacaaactatatttggtatctaaattatcatattaattttttattaattattatagttcatttctcatctttatatgattctatttttacggaaaaataatatcatcattataaaaaaataattagagttttttcgcatatgccataatttaaatttttaaaaacgaatataaactgttcaatacatgaaataatattataacgggtgaaaaatatatttaagaaaactttctactgagtaacgagacataaatttgaaatatttatattcaatttcatacatattatattgaaaatttataatcttatatactacaatagttaataacatattagatgtgattcaatttttaatacaagctggaaaatcctagaattgacgggtttatatcgatattaatacaagatggtatactacatgtgaaactcttaaattaataatcaaactacaagtgtataatcttaaacactaaacaatatagataatatcaacaaaacatatacaactcacagtctactatacatttaaaatcaaataaaataatatcatatatttttaaatcatctttacaataaaagtttttagtttaactaaaatataagcctacctgcgatatactgcagattaatctctagattataggacttattggatctaaagacgggtcatcaaagatttcctaaactgaagcaaaatatactgaatattcaaatatctatctgttaccaaattataaacaaataactcaatttgatattttatatatgaaatcaactaaatcttaatcacataaaattagcacaaaaaaaaagtattcaacaattaaaaaattatcaaatctctgtgttatataagttttgatactatatttgaataaagtgtaatatacctttttaatttgtattctttaactaatttaagctaactaatatatttgctaatcttatatctatcaaaaccgactatcgtttcttatctctatagtatttttgcaagacttttttggtggatttggataaaaatacattcgggtcatatggtacattcccctattaaataaatatggtgcactcctatgttattagctaaaatatttagattataatttatagtcatatcattaataaaactaatattaataaaatagataactttttggcaagacggatttggagggacgggtttttgaatcaacattaataaaaaagtaaaatataattaatccaccgtttcaatatggattaaatttttaatttattattttttgagaccactaatattaaacatatcaaatcatcctaatttagaaaaaaatatatagaaccaaaaatgttatgtggtatgtataatgttactatatataaaattaaactataaaatataaatgtattagagaatgatacaatttgcaaaacttttatatataaaaaataattctaaaattataaaaattactactttaaaaaaaaatcatgggacgggtaaaaaaattacagaacatgttttttttttggaattgggttatatggtggatgtatttgaatcaatatttataaaattttaaaatattattaatatgctgttttaataggggtcaaaacttcagtttttttaacaattgtctcatgaattcgtggtataacgttacttaataacaattataaactgtaaaatataaatattttgtaaaaataaaatttgcaagttttagtatatattacttttaaaaataaatcgtcatgcggtataccgcgggttaaaatctagttttcttttaagaggatactaatataacaattattgtaagacaataaccacaatggtttataattttatattatgatgtaacctactttaacgtttttcggaaaatttactataaataaaagttttcgtattcaaaatctcccctttgccccactcatgttatttttcgcatcatgtaaatgacatttgactcagcatctctattatattcatcttcgaatttcactatttatcttattctcctaaacaatcaactttattgaatcagggtaataattaattatatttatagtgttcaactctttttccatgggatgcattgtctattatattgaaatcatataaatgggaaatggtgtaaagtttgagcatcgtcatttaacccaaaacacacataaagttaactaagttgtatcatcgatcaagagactgattcacgtatatattgggtcaaggaataaaggaattcaaagaaataatctggttttataagcatattcggtgcagaagataaagtgaagatccatgcatattctccattaaagagtaagaaaggtcttttcttcttgtatgcaagaatatacaaaaacaaaaagcatagatagagtggagaagtggtggctgtggggacaatgaaaggtggagacttttgaagctcaattattaaaatcataaccctaactcgaaggcaaaaattttatactttatagtggaggaaaagaataggaaaagagaaaaaagcttgatattcctagcttaggctttttccaccttttatcttatctcccttttgctctctcatgaagaaaattagattcagtcaaataagaaaaatagaaattaaaaattctccaaaacacttttaagttttcttcaaaatttatcgacaatataaacagtggcggttcaaaaatataattgaaatgactacaaatattttcgaaataataagatataacattttctttaaaagccacaagataagttcaatatttaagggtcaaacaaacataaaatctataaaaacatgtatataatggggtcaacacatacaaaagtagaaaatattacaaacattcaagggtaataacaaaaagttgtaattttagggggttcaaacaaaaaaactacaaaactttaagaaccataaaatcaattcaccccctaaagcttgctcgataacatcatataatattattttttaccatgtagtcattgtttcggagatgtaagatatgcatgacatatatagtttaaaaaagaaagtaatgaacatttagggttatttttaatgacaataaaaagttaactactaaggctaaaattgtatacataataattatagtatactcggactctacctatgaaacataggtcactactatattgcctcagtaaccttcaaagacgaaaaaacctcaccaaactgcttctaaccgtgaccatcagattctttaaaaataacatcttcaatataatacaattggtcatgtcatttctgttgcttatgaaccagagcacacagtttataaccctcaccaagcatagccttcaaagcttcaccaacctactctaccttagcagtttgtatctcatctaccttactagataggccgttgatttgtgtctcagcagcagtctcaccaaactgctccattgccaaatttttagtttgtgcctcaacaccaagctgatatccctaatcatgacacatacaatatatgtgttggcgacgattgggaggttgattagatagttaagcatttaaaaattttgaaaactgatttgatgaaactttgtaatttttttgtttgttgttgtgcaagtgagattttatttatttgaacaaagacaattagggtgatatagtagtttcaaatcatataaacgacatagtatgagtaaagactcttcttcagcgcaagtatctcctactcgagctcttccttcttgaatcctttctcttagccactattcctcatcctttgcctcttctcataccttctagccattcttccctttctggctcctttactcacaaaggctaatgacacgacaagactatcaaatttgagtaacaagtgatttgtgtttaaaaacaattaaaaataaaaagataaatacagttataattgttgaaacacaccaacaaaacatctccgatttgacccaataaaagaaacatgtagggcaactaaattcattgtccattcaggacaaaatattagaccaaccaccaaactttagcttttgcctatgacattgttcttatatcctactattatgtttgcacaaactcgagtataaatgtataataaggcattaagccattaaattgtttaagccattaaattgtttttgtaaaatatttgtctataaaatatttgtttgtctataaaatatttgtttttgtacgaaattgcatagattcgtttgagcatttcagcccaagctttagaggaagaaacattggttacataacgaactaccaagcccattcaaaagcccattagtgtataaaacgaaagccctaatttctccaatacgcaaagtgagtgtcgaagagagagagataatcgaagaagaagagaaatgaaattcacagattctccggtgatcgatctgacggtgaacggcacaaaactctcaatccaacaagacaatggctctatgcacgtcggaacttccgtctggccttgctcactaatcctatccaaattcgctgaacgctggtcaacactagactcatcatcatcaacaacatctccaaatccatacgccgaactcttcgatttccgtcgccgtcgaggaatcgagctaggaacaggatgcggagtcgccggtatggctttttacttactaggtctaacggagatcgtactcacagacatagcaccagtcatgcctgcgctaaaacacaatctgaaacggaacaaaacggcgttaggtaaatctctaaaaacctcgattgtttattggaacaatcgagatcagatctcggcgttgaaaccgccgtttgatttggttattgcggcggatgttgtgtatattgaggaatctgtagggcaattagtgacggcgatggagttgcttgtggcggatgatggtgcggtgttgttaggttatcagattaggtcaccggaagctgataagttgttttgggagttatgcgacatcgtttttaagattgagaaagttcctcatgagcatctgcattctgattatgcttatgaagaaactgatgtttatatctttaggaagaaggtgaagaagaatgaagctgaatcagtgtcatgaagctagttttggttctgtaatgttgttgttacattgatatgtaatttgtttcttgttatagaattcgaattatctcaactatttatattttcttagatattggctactaaaagatgacaaaggctgaaatcaaatttttgtaacgatttttttaagaagtatacaagttttgttgtgtgtttttgaaatatatacaaagtaagttctcttgcccaaagaaatatgtgaagtaaccaacattgtgtttctatattagactgataaatttgttcacaaatgtatttgtagaactctcaattgggtgattgtatttgcgagttttattccacatcgttgtggagcggctgcggttgaagaaccaaagttcggattagaaacagctcgaacaagccaatcccaaatcaaaccgcatacatacgtgatatggtatttctatagtgaaggaagtgtcagggtattactttcacctttcaatgttagctctctactcatatcataatctatggaaggaaaaacaaaattaaaaaatagaggaaaaaaaatgatctatatatcggacatgtaatttttagagcacacatattatcactagagaatcccatctaagcacatgttatgatgtttgtagtaagagttctcatatatatatgtatatggtgtaagacactgatgacagttctcatatatatatgtatatggtgtaagacactgatgacagtaaccaaatatgccgttttgagcagccacattcaacaatttatgaaatataatcaaaatctaaattgttcttgaaatcaaacttaaacacttccatctttctttgttctttgcataataaagctcttcatgagctattcaatttctatcttaatatttctcaagcttaatgggcatcagtctaatcttgtttattacaatttgaagttcatgatgattaaaagggggagctaaaccacattttctatatgctaaggtcgtagctaaagcatctagaatcattttcactaagaaatatattctctcttccaaactacacgtttactcttatgaagattggaaaatcagagtaaaaaaaaatgaatcgattggacgacaaaagaaattaataaacaggcttagttatgggctaatttggataatgggcctttatagaaccaaatcagtgaaaactactataaaaaaaagtaagcggttggatttattacatgaactgggcaacggtcaggtccaagatccaaacacaaagcgacaaaacacaagtccaaagaagaaaaaatatatttattttaaaattaaatttgataaatgcaaagcgagagaaacaaagagagagaaacgcgagccctgaatcaaactccctcgattttcacaaaaaccaacccaaagaaaaaaaagaaaagaatctgacaattcaccaaacaactctctcaaagtcttaaattaaaattttttgtcaatcaattcacaaactcaaatatctttttatttttcaatataaattttcgaaggaaaaaaagaaaagtagaaaaaaatcatgattatgaaagaaacgaatagtcagaggcaaaacactgttgttgttgttcgttcgttcgttcgattgttgttgctgttcttcttctcacgatttcatcttttatttcttttaatattaaaattgttctcggtttatattaatgatcttgtcgatattgcgagactaaaatgtttaatgtttttgattttatttgtgaaattcccaatcacattcttagtagtagagagagaaaggttttttctttttggtcttttggtggacagatttttattcttctttacttcttcttcctctttttcgtcaaaccataaacaataatccaaaccctttgttcttcagatatgttcttctcttgacacacacctaatctttctccaccaaaatttccgaccaagtctcatacttttgatctgtttttcaactttctcatcagcccaagtaagtatttttttcttacccatgactgaaatcaatttcattagtttttgtaatttctagggtttccaattttgtggatttggggattgttgcagaaaatggaaggtgggtctgaaaaaacaacacctgaaggttgtggtggtgagagtaagtctaaacggaaaatgaaaactgctgctcaacttgaagttcttgaaaacacttattcaggtttgtttctgtcttcctccattgtttttatatgaagtttctgttttgtgtttttataagtgaaagttttgtgttttaattttattttcagctgagccttatccttcggaagctataagagcggatctctcagtgaaactgaatctttccgatagacagttacagatgtggttttgtcaccggcggcttaaagaacggaaatctactacgccgagcaaacgtcagcgtaaggagttagtaactccaacggctatggaatcctgggaaccacccgtcaatgccggtgatttagtggcgggaaatgagcttgattctagaagagctgctcgaggcagtggcggtagtggtgtgacggttgtgaggcggtttaatgaaccgtcttctgctgaggttagagctattggttatgttgaagctcaattgggagagcggttgagagataacggaccggttcttggaatggagtttgatcctttacctcctggtgcatttggcatgcctattggtatataactactatacaacactatattttgcttcttagtatcgatagaaatgttgcttaattagctataatgtttgcagagatgccaagccatcgcaaggcgactaggcaagctttcgagaccaacatatatgtccgatccgatgtcaagcctatcaaagttagttttctattagtattgattgtctcatgatatgttgttgttgatgcttgaatctttttttgttagttctcaatgatttgtcatttttacattttaggatcatgtgaggcctattcgtgaatatcagttcattcctgagctgccatcttcgaggactgatcattcggaacgagtttctccgtcacatcattttggagttccacttgatggttcggttatgagggtttcagctgtgtctgctggacatcgggatgactataaaatttcacctcagataccaaatttgaatcttgcaactcatcaagggaagccggggcatgtctattcgcctaacttggtcgaatatgactcaccgtatcagaaaagctacatggatactgctgcacaagttcatgatgatccttttgtgaaatcagagagagaagttggtaatgaggatgaggatgatgatgccctgcaattagagagacaccgcaaggtttgtaaacgaggttttcgtgcgaattttttgtattgtataaatagctggcaactgtactcataattttttctcctttatatattcattgtagaatgaagaagcaagaatagctcgggaagtcgaggctcatgagaagaggatccgaagggaactagagaaacaagatatgctgaggcgaaaggtcttgttctgatttaagctaagcacatacgtttttaactgtatttgttgtttgtgttcattgtgtcaattggttttgcagagagaagagcaaataaggaaagaaatggagaggcaagatcgtgaaagacggaaagaggaagaacgtcttttacgtgaaaaacagagagaggaagagaggtaccttaaagagcagatgcgagagttgcagcgaagagagaagttcttgaagaaagaaacaatcagggtaatgtgaaatatgcgctacatttaagtttcttgagaactcacttgaaatgttgtttactcattagcatctcttattatgactaggctgagaaaatgcgacaaaaagaagagatgcgtaaagaaaaagaggttgccaggcttaaagctgctaatgagagggccattgctcgtaagatcgcaaaggaatctatggaacttattgaagatgaacgcttagagctcatggaggttgctgcgttaacaaaaggcttgccttcaatgctcgcccttgactttgaaactctacagaacctcgatgaatatagaggtgaatcaataactcattttgttttattttatctatttttctgattcatttcagctgtttatgggaattgtatcttacattcatctgatggattatattatttcagacaagcaggcaatatttcccccaacatctgtaaaattgaaaaagccctttgcagtcaagccgtggaatggttctgatgagaatgttgcaaatcttcttatggtgacttttcccatcttatctgtcgttaaatttttccactttgatgtgaatctcaataacagtatatacatagaaacgagtttttgctttattttagtcaccagctaacattcttaacgtggttgacaacatgtaggtgtggagattcttaatcactttcgcagacgttcttggtctttggccatttaccctggacgagtttgctcaggcattccatgactatgtaagtgtttcactctttttcaagtctatacaagatctaaacagtatgcttctcttaacttttccttgttggtcatgtaggacccacggctaatgggagagatacacattgttctattgaagactataatcaaagatatcgagggtgtggtaagaacgctgtcgaccggtgttggagcaaaccagaatgttgctgctaatcccggagggggtcatcctcacgttgtggagggtgtaagttacccactttctagtatctctattgattataatggaaatctttctcctattcctcctaatgtttagtatgatgcaatttttggattaggcatacgcgtggggttttgatatacgcagctggagaaaaaacttgaatgtttttacatggcctgaaatcttgaggcaactcgctctctctgccgggttgggaccgcaactgaagaaaatgaacattaggactgtgtctgttcatgatgacaatgaggtgggccatctaacgtatttcgttaatttcggtttttctacaatattctgacttctggttttcttcaagtgcaggccaacaactctgagaatgtgattttcaacctaaggaaaggagtagcagctgagaatgcttttgccaagatgcaagagaggggactttctaatccacgacgttcacggcatcgtttgactccaggcactgttaagtttgctgcatttcatgttctatctcttgaaggtgaaaaaggtttgaacattcttgaggttgcagagaagattcaggtaaagatggtctaaagattgtttctcttaaacttactatctaagcagggttttatttcattctccttttctttcttattgatcatagaaatcaggattgagggatctaacgacgagtaggacacctgaagcctcggttgctgctgcgttgtctcgagatacaaaactctttgagagggtagctccttctacgtattgtgtacgtgcttcctatagaaaagatgcaggtgatgctgagactatatttgctgaagcgagagagagaatacgtgcattcaagagcggcatcactgatgtagaagatgttgatgacgctgagagagatgaagactctgaaagcgatgtcggagaagacccagaggttgatgtgaaccttaaaaaggaagatcccaatcctctgaaggtagaaaacttaattggagtcgaaccattgttggaaaatgggaaactggataccgtgcccatgaaaactgaactgggactgcctcttactccctctctccccgaggaaatgaaagatgagaaaagagatgacactttagcggaccaatctctagaggatgcggtagcaaacggtgaagatagtgcttgttttgacgagagcaaacttggggaacagtgggttcaaggacttgtagaaggagattactcgaatcttagcagcgaggaacgtttaaacgcacttgttgctctgattggtattgccaccgaaggaaacacaatccgaatcgcccttgaggtatatatgattcttatcctaaaaataatcttgacttacattctctttagttttttaccataatcagattctgtgtgttgtgtgcaggaacggttggaggtagcaagtgcattaaagaaacagatgtggggtgaagtgcaactcgacaaacgctggaaagaagagtctttgattcgagcaaattacctctcatacccaacagcaaagccggggcttaatatcgcaacccctgcatctggaaatcaagaaagttcatcagcggatgtgactccaatctcctcacaggacccggtgagtcttccacagatcgatgtgaataacgtgattgctggaccaagcttgcaattgcaagaaaatgtacctggagtggagaatttgcagtatcagcagcaacaggggtacacagcggaccgggaaaggctgcgtgcacagttaaaagcgtatgttgggtataaagctgaagagctatatgtatataggtcgcttccgctaggtcaagatcgaagacgcaatcgctattggcggttttcagcatccgcctctcgaaatgatcctggttgtggtagaatattcgtggaacttcaggacggacgctggaggctcattgattccgaagaggtatatatgaaaagacttaaatctggaattgaaatgcaaacatttgtgtttataacaatcatcgaaccttctttgctacttgtttttttcaggcttttgactatttggtgaagtcactagatgttcgcggtgtaagagaatcacatttacactttatgttgctgaagatcgaagcatccttcaaggaagcattaaggaggaatgtggcagcaaatcccggggtgtgttccatatcttctagcttggattccgatactgcggaaatctccacgacgtttaagatcgagctaggggatagtaacgccgttgagagatgcagcgtattgcaacgcttccatagtttcgagaagtggatgtgggataatatgctgcatcctagtgctttatctgcatttaagtatggtgctaagcaaagcagtccgctttttcgcatatgcagaatctgtgcggaactacactttgtcggagatatttgctgtcctagttgcggtcagatgcatgctggtccagatgttggtgagttgtgttttgctgagcaagtggctcaactcggggataatttgagaagaggagatactggctttatcttgcgtagctcaatcttgtctcctcttagaataagactactcaaggttcagttagcacttgtcgaagtgagtttttctatacttttccttagttcatcatctaattttctagaaattttggtgtctaattgtttttggcaaataacatagaagaaccaaatggaaatagaaaacttttcgattcggtctgaaacggtttcggtttctagaactaatgagtattgtgattcttcttcgccatggacaggcttctcttccacctgaaggacttgaagctttttggacagagaatcttaggaaatcttggggtatgaagctgttgtcatcaagttcccatgaagatctttatcaggttcgtatttcctaattgttgcagcgatttatagttatcttgtgggcaattctgattccttgaaactcacctgtttcaggttctcacaacgttagaggcagcactaaagagggatttcttgtcttcaaactttgaaacaacttctgaactcttgggtttacaagaaggagctctcgccagcgatcttacttgtggggttaatgtactaccgtggataccaaagacagcaggaggtgtagctttgagactctttgatttcgacagctcgattgtttacacacccgatcaaaacaacgatcctctaaaagacaaagaatctgaagatttcgtggtaagtatataataacgaatgctgatattttctttattcatatactgaaagttgtcttgtttacaagggtttggagacaaatattctgagaaacttacatgagaaggacgtaatggaaactccggtgcaagttgctgcttataagcaagaagagaactggacggatcctggtttaggtggtgtgtctagctctgggagaggaggtcgaccaccacgaggacgtggccggcctcgtgcccgtggcaatggcaagaaaccggcagtttctgttaaaccaccacgaggtgcagcaaactcaaatggtgaaaccatgttgagaccgagagcacaaccacgtgggggtagaaagaatgggcggcgtagtggcaccaaaggccgaaagagaccaacgcaaggaacactcggtatatgtaatgaagtaggaggaggacgtcgggttaaggaagttgctgtaaccgccaaaaccagtcttcctgataacgatgacgattggatcgaaacccctgaactgcaagacgatgacggagaagctagcagctcggggagatcgtttcagtatgaggactatgatgatgatgatgtcatggctccgattgatgattttgatggcggcggcgaatcaagtaaattagtaggtaggggggaatttagcttacatagtgatgatgaatacgaagaagaagaggaagaagaagaagacatgaacatgaaaatggatgtgaatgttgttgatgatgaggatgaagattacataaacgaagactcgtatggtagaaagcagcatgggattagcattagcaacgatgcagcgactcggaaaaggtttaataagtttgaagatcctgatctaacatcttcatcgtcttctgattttcaatgactgattttagacaagaacctacgaagcttgtttttgtattcttcaaaatgaattcttttagtgtaacaacctttttgtaaggtaacgtcaatgtaatccttttgtctcttatgagcttgcttatacggttattattattagagagctttggtccggtttagctctggttacccgaattctattagagtcggggatcaacataaaccatagattttcagtcggttttgttgttctggtaaacagaattttattagagtcaggaccaaaataaaccgtgatttttcgggacttaaccggatgttttgtagttcagccggtttatttgcggttttgatctatctggttcggtcttctttattttatcttcggtcacaaggtatcgaaaatcacttctttttttctactaaagaaaatcaccctaaaagtattccacgttaaacatgttcaactgttttatctcatgcaccaaccaattttagaattcagagtattattacattatctaaaccgagccatgaattatatgtagcaaattattgtcgtaaattactgttttttttttaaagaattcggagtattagaccatcaacattgagatgtgaatctatatgcattagttattggggatgtaattttttgcgattataaaactgtaactatgttacattattgttgttggtgttgctattgtaaaaaaaggaaaaaagaaaaaaaatcaaagggtttgggatctgtaaagagtgacatggagtgggactgagaacgacgtcgtgcatatgtctctcattgagcttacagacaaagcactgctcgcctctcatgacacagaagaaagacaaaactatcttctccacatatcacaacccctctcctgattttttatattattaaaaatatcatctcaatcatgtaatggaaactagtattttaatcatgaaaattttaaaaagtttcataacttctatttttcgtacaagtttaagaaggtgtcttatatgtaattttaagacctcttcttaaacactgaaagacaaaattcaaaattttccttttgtattatctgattttaacagtagtgtataagtacacttgtttgccaaataatttttttatgtgttgaaactaaatgaataaatattatcaatattagcatatacattaaataatagtacaagtggagaatttacctggtgtacaatggattgggaatggttgaaattgagactaggagtctaggattggaaatggacaatatatttcagaatgattttatctgacatgtttttgttacgtatttggtattcaaatataatgtcccaatttgttgaacaaatccagcatatataaaagctttctcaggaataaatatcatagtgcatgtcccaaaaccttttaaaatgtccgaccactactctaataagtacatctaaggaaataggttttttttttttgaattcagagaaattttatttttcaagccgaagacgaccataaaacattttttacagttaagttttataactggaaactacaaataattttactatgcggttttctctaaatagtaattttaaaatatgtttatatgtgtatatttgagacaggaaaaatataattatttcactaaccaatgtaaataatttcgagaaaaataaagggaagaagaatgttggaaaaaaggtagaagaacgaaaaatatctgtaaggtttccattatagttatctttcgaaatttcaataattaacacatgtacgacgatttctacatttctgtcgaatgtcatttaagaaaatgatattcaaactttattgatagaagtagacctaaatgccaaaaaatgctacaattcatgtctctcactattatgcatgagtgtagtttgatttgacgggatattaaatcgcattgaattatactgtactccatgattctcatcattatgacataaatatgtcgtaagactaaatttcatgtttggtttaatggtttcctatacttttctactatgatttcgggttaaaaagaaaagaaaaaaattctctatttctcaaaaaatataacttgtatacatatctatttcatttagataaaggagtacttctaaatgacattatccaaactgattaaacatttgaagaatgttacgtgtagaacaaatttgatgtggcatgttgtcactgaaaatctttcaacggtaactataaagttttttgacaagccaaaaagaatttctataacctatagacaaatattctttcatcaattgaagtatttactaagtttcaaacgtttaagaccattaggaatgtttattccattcaaattatggattatctcttgttaatctatattgatattgacactttttgtaaaatgttggtaaaggcttcaattattacaacgctcatgtgatttgttttttttccttccttttgtgaaccattttctttttaaattttgtcatatttcagttgctttgttctcctatctttgtttgactttgtcttacttttctttgaatatttcgaccaccaaatttgattaatacgagtaacttagtaataattaatatagctatggaagtttttatactcaaaaacttacaatagtgcgtgtacttaagtgcatcttgcaggaatataggtcttcgaatttgttgattgcgaagagagcttttgaaactagaagctcaacgagaaaactcaataacgtatttatattagaaagactggattattataatctttatgattcaagtcaatccgtttgacataattctattcctttctttttgtttttgataaagaatttattcctatcgcaatagtaattaatcaaacatgtagattgaatgagatgggaagaaaaagagattaataaaggagcattatccaaatgtggctcacgagaaggtcaatttctacgcccccacttgtttatacgtctcgtctccatcatattttgtctctttgttttgtataaatctgtgcatatcatttcatttccttttaaaaatatatttcaatttcattttgcaataatagacctctctttatagttgcaacattattttctttaagatttttttatgtatgattaatttttcacatatgaacacgaaaaagatgtaaaaaccccaaaaaaaataacaactaaaacgttgtcgtctggtgaagactgaagagtaagcatgacatgacattttcacatattaaaaattctcaaaataattggagtccacatagcaataaataataataaataaaagaatatagagaaaaaataacaaaatgtaatgttgccaaccccgttccactgcattattcatttcaaaatatatatacaagcacaaacatatttaaaagggaaattaagttatatattaaaacaaaagatgtggttgagatcccaccacaaatttaatatataatactatatgcactttgatatctttttttaaagaaaactaaaatctttactattatattcatacactatacacataaaatttgcagtttttttactgtcaattcctataagtgagtttcttatgtaaaccaactgtttgtttttatttattaattatattttatgaatccaaggtatccgaatgttaaattaaatagacttgagttttgaccccaaacatgtcactgtcctattaatgaaataataaattttacttaaaaagacgttacgtcgtaacgtagctctgtaatagttgtactaaccactagagttaataatataattaatgccacaccaaaaaaataaccattcacgcaataagagtacacattaaatgcaataaatcatgcttctaacgccaattagcatcgtcgtttctcttagcaaaaaaaatcagcatcgtttcggtgagaaatgtaacgctattaaactgttagcttatttgcatttgcacatgcactgatgcacatgtggataaaaaaacagtaatgtgaaaagtaacgcttttaacgccaagtagcaacatttcttcgagaactgtaacgcagttaagcttattgtatatttgcatccaccagtcacgcacgtatggataaaaagtttaaacagaaaagaaaactgtaactcccacattttggtcaaagggttattaaataatgctaattgtttgtacatcaaatttgggattcaattttgaaactgcagattattgaaataaataaatttataggaccgtttttagagtgacgtaggtaaacgggtaaaccgttgtcaacttgtcatagtccagtctttgaaaacatgatgttcctgattttatctaaaataaaactctaggtgcagataaaactgtcagtggtcgagttatttgtataatcccttgctataaaagtggcaaattagatttagcagtcgaaagctaagttaatcatttgtaataagatacggaaaaaaaatgacaagtatatatagatatatatatataaattttaatatatagtacgacaaacaaaattacacataaaagtttcagttttagtataagccgcaaatacaggtgtaagtgcaatagtatttaggaattgaatccacatagacagaaaaaaatacaataaatttataaaaatttaaactaagctagaacaacaaaaaattatacgaacttatgtaagatttcagaaataaaataattaaataataactaaataaatatataaatatataaaaaaattcgtagaacttggaaaacttatcagaaaattgtataaaaaacatgtaagttcaataatgataataaattgaatttctagtgtaaattatcatgctggcgttgcagtaataatatttgtgaaatagattacgtaaagaagtggatataaaattatcagtagtaataaaaatttagtgaggtttgtcttaagcaattctaacaaacaatataaacagaattcagtaaattaagaaagcacgataacatcttttggtttgttggctataataattggtgtagctaaacctaattaccaagtcatcactaaaatgagaactaatttggttaaagtgagtaagttaagatatttttctcaactttctcctatatatgtggacttgtttaacaagagaattttgatttattaattggatcgacaaggccaatctataaacaaaaacccaaaatacggactaatgcaactatctatatggaatcgaatttcggtggatattaaaccacttgactaaaaaatttctctattcgacatatatatttgttcatcgagttattagttttacaatcacacagtaacaataaagagatccattattggttgcttgtataccaaactcatagtataccaaactcgtctaaaagatttgggaaagctaccgctcataagaaactatggtaagttggtattgaacacaacttatctcacatttcttacaatctatcctttttaaaaggatattactcagcataattcgtctcatatttctaataattcatttttcttaaaaggatattgacataactcacattaatgtttcatttactttttacggcttactgccctgcaagcccaagcttccttgtggcccctcaagcccaagctagtttgggctcatggccaaatttatattttattaataatggaagtcatgaataataatctgtattagcgattcctgaagaattaagatatgtcagctctctgttttcaaattagttaaacaaacaaattttaatatgaggtgaataatcttctcatgtctctcgttttccagggaaagtcgtataggatccatgcatcttcctacaacaaaatattaaaccccaagcctaatcacattcaaacgtttaaggccaaaacatctattacccgaagtaatatttatctaaacgatggaaaatacattttttcactcaaaagagatgggtttgttattaatatatgcctttaagcactttacataccaaaaatattcaattgaaataatctcatttatccggttttgtaatcttattattataatttatgatttttgtaccaccaaatattgtggcatacctatatatgatctcattcctctttattttgaagtgcctagaacactagtcttcttcttttcatggttacgaaaatgtttacagaaaatcatggatgattcaagaaaatagaccactttttgagatacttttccgtaaaccctaagtatatccataatatctctacattgaccaatgacaaatagtagtttagatattgatggacttatgggagctagtttttattattaactagattttaacccgcggtataccgcgggacgatttatttttaaaagtaatatatattaaaacttgcaaattttatttttacaaaatatttatattttacagtttataattgttattaagtaacgctataccacgaattcatgagacaattgttaaaaaaactgaagttttgacccctattaaaacagcatattaataatattttaaaattttataaatattgattcaaatacatccaccatataacccaattccaaaataaaacacgttctgtaatttctttacccgtcccatgattatttttttaagtagtaatttttaaaattttagaattatttttatatataaaagttttgcaaattgtatcattctctaatacatttatattttatagtttaaattaaattaattaaaatttagatatcaaatcttataagttgattttgattggctattatttttaaaaattaataatgtatttcgtttttaattaattaaattaattaaattagtatttgactttttaatccttaaagagataaattaatttactctttaaaattttatttctaatggcatacctatgtaattacttacaaaaattaaggttacatttaaaatgtacttcccaaataatatagtaggataaattgttttatctatgatttatgaatatccacatcagttctgtaaaaaataaaactaaaagaaaaaccaaggagaaaacaaatcgccttgtaaaaaaccgtttttgataaatgtaacatttaggttttgtgttagttaagatccgaaacaagacaaatcttatacacgccataatccagtatgtcgaaatctacaccgtattaattattgctactatgaacaaccattctatccgatcatagactttactcttatttgtcgttattatcataaaatgtcgtttaaataaattatttgtaggataccaattctttaattatattagttcaaacacgtataattttggtggtttttgaggatgaatatcatcaaagataaatgcattttggtgaaataaataatcaaataattattttaaattatctttatgcaccactatttttaataaattggactcttacaacgttttccttaaaaaaaatcatggatcttaaaacttatacccaaacaaatatgtagaaaattattattatatatataaatatatatatatatatataagctatacaaaatcttattatatagtagtagcgcttgattctaaaatagcataattagacgaaaaagcatgcattttgtaacattttatactttgtaagtaaaacacataaaaaataattttatgaataagaaatccacataaaaaaaaaaagaagtaacatactgtgaaaaattaggaaactttttgaggcaccaattttttatgccactttcaaaaaagcattaatgaaaatttgtttaaaatatcattttaaaatttgacgtacaaaagtacaaaacctcatacaatttcaaaactttacaaagactcaataacatgtgttatagagactttataaactttcttataacatactctataattttttatatccatatatttgtgatatttttgaaaatggataaaataaatttgatatttttataaatagaaaatattaatggtatttttgaatttttcccaaaataattattagtcttatactccaaaatgtaaaaaaaaatcactttttattaaaaaaatacttacgcatttgcttaattgctagtcgtcaaagttttgtcattttatgcaaatactaaaaaaatgtagaaagcatttcctctttatttttgggacaaccaagaaaggagcatttcaatagtgtatacatagacaaaaatatttctcatttcctatatttgactctttaaatctttaatagctcttgtaattttttccattcattgtaatacagccataatgtttaaaaggaaactgtcaattataaacttatactagaatataaaatatggtattgaattgaatattttcaaaaataaaatattaaatttacgaaaagaataaaaaaacttaaaaatctctctctcctatctctcaaccacaacttatttttcatgtcagtatccaccaacacatatatacggcatataaaagattttaataaaaccttggaactatctatatctattcagacacacacgtctatatatatatatacactcatatactactttcactgtatcattcttgttttctctaaatttttcaaaaaacctttagaattttcatttttttacgattccgatgttaactgtttctccggctccagtactcatcggaaacaactcaaaggatacttacatggcggcagatttcgcagattttacgacggaagacttgccggactttacgacggtcggggatttttccgatgatcttcttgatggaatcgattactacgacgatcttttcattggtttcgatggagacgatgttttgccggatttggagatagattcggagattcttggggaatattccggtagcggaagagatgaggaacaagaaatggagggtaacacttcgacggcatcggagacatcggagagagacgttggtgtgtgtaagcaagagggtggtggtggtggtgacggtggttttagggacaaaacggtgcgtcgaggcaaacgtaaagggaagaaaagtaaagattgtttatccgatgagaacgatattaagaaaaaacctaaggtgtgtttatttcccaattatccatgttagattagtttattttttttcttctttaaaggtaaaaaatcccattaagaaatcaccaacctttttaaggatttcattaaaaaaacataaacttctagtgtttctgaatattttttttacaaagttagtgaattagtgtatttatcatatacacaattattattaagtttgataactggagtagatctaggaccaaaaccaagttttgtgtagtaggactatacaaatttgtgtgtttatttggactaaatatttttttttataaaactgtaagacaattttctataaaaaaaatgaattccttttttttcttttcatttattgattaattaatatattgttccggcaaatcaggtggattggacgccggagttacaccggaaatttgtacaagcggtggagcaattaggggtagacaaggcggtgccgtctcgaatcttggaaattatgaacgttaaatctctcactcgtcacaacgttgctagccatcttcaggtaaattttagactaaaactatacaaactaattttaacaggaattaatcaagtgctataacccctaacatagtaattacctaatttatagattacatgtttttccttcaaaattttttatgaaaagacaagtaaaatactaaccaactcagatttgtgtaataagattaatttgtgttgtgttcttcttgtaatgatagaaatataggtcacatcggaaacatctactagcgcgtgaagcagaagctgccagctggaatctccggagacatgccacggtggcagtgcccggagtaggaggaggagggaagaagccgtggacagctcctgccttaggctatcctccacacgtggcaccaatgcatcatggtcacttcaggcctttgcacgtatggggtcatcctacgtggccaaaacacaagcctaatactccggcgtctgctcatcggacgtatccaatgccggccattgcggcggctccggcatcttggccaggtcatccaccgtactggcatcagcaaccactctatccacaggtaataataattcatttgtaaaaatgttacatgtttttccattattagttgtatggttaaatcatgaaaaataatcgaaatgacataactaaatcagctttgttgaacaatcatgacactgcaaaaagctagtctttgtacactattggctttttaacacatgcaacatatataagtataaaacggaatcattgaattagattgtggttttgtctaacaacgcaattagtaaaagattgcaagatcatgaatcatttttatgtagacaactaataaagatttagagctatgaattatgtatggattttacaaaaacatatttctaatcatggtttatgtgtatatatgtgtagggatatggtatggcatcatcgaatcattcaagcatcggtgttcccacaagacaattaggacccactaatcctcccatcgacattcatcccgtgagtgcaccttttttggtttcaattttgtttattagattttgattatgacataacccaaaaaagttttcgaataaattttggataattaacaatatttcattacttgacggttgcagtcgaatgagagcatagatgcagctattggggacgttatatcaaagccgtggctgccgcttcctttgggactgaaaccgccgtcggttgacggtgttatgacggagttacaacgtcaaggagtttctaatgttcctcctcttccttgagaaagatctccaaaatttgtcgaaatctcaaacttttaacttcatttttttggtatcttctatgtatttttgcaagggaaagacgataaatccttgttgcttgatcatatgtatttctctatatgagtgcatgtatcgaagttaagcaactttaatatatcgttataatcttcgatagcagaatctgtaatttttattaactttcaactcccgaagcatcattgcaaaatgactaaatgcaacactttttggggttaaaaatgcttaacattttaaaacattactatcatttattcaatcaacaatttatagttttatacaattgaaaactagacgggatatatatcgcatgtgttttttcaatggcttattttgttttataatgccaactttcacagctatggattgtgactatttataatttcaaagaagtcaaatatttttaaaactcaattaaagtccataaaaaaatttgcaattgataatgttaacatatcgtggcaaaaaaaaaaaaaaagtacaacacataattggagtttagatatacgaatattcttttaattggttccatgtaaaaaacttaattcaaacggattcgattggtgacacaaaatggtaaaaacaaaaaagcggaaaaagttttaaaaatactagaatagttgaaagaagtaaaaaaaatacaggtacaaaaaatacaatagtacaaaaaaatactagaatagttgtagatatacttttgtgtttagtaaactattaaagcattaaatattgtaccatgcgatagagattaccaatcaaaagccaaagtgatgatgcagaataagttaataacaattactttggggtaagaagtttaaattactcttgaatgtagaaggcatgaaagtggcatgtttgatggattgtgtttgtcgagcattgtgcagacgcagctcaataacgttaatttatatacattcaactcttgaaagacattgaagctgtatctttggctttgacacactagcagctctcgatggagttatgcgtgatctagttagttactatatctcattctccatcagataaatgtaagttcgtataatactttttcggaagcttctaatgcataaaggagctgtatttggacaaatactttgagaaatgtaagaagcgtacaatgtgatgagaaagaatgatacaaagtgattagtgagtactatggagggccttcactcggctactttagcccaatagactagtaatgacatatcagttgatcaaggagcaaaagttaatgaggacactgatattgaacgaaaccacttaagaaaggttgtaatgaaaatctagaaaacccaaactgagttcagactcatcaatctaaagattacattgaccattcagcaacattgacaacttctaaagttttgttttaagatcttctcttccgatcatcttcaccatcgtcatcggagtcaccgctctcacggaatcgtgggttcttctcctgttacaatcacacaaaattccatagcagacagtgttttagcatcagatactaaatatactcgaaacgtttagtaaggaaaaagaaaaaggccttgttatttaccggtctcatgtcactatcagtgtctctcctagactcatgatctgtgtttcttcttgagttatcgcggccatagcgatcatcgtctctttgtcgtttccgatggtagtctgcaaaaacattaaaaacagtgaattgtgctattgtggctgaggattacactattactacgcattatgtcatttgggataaaaatacctcctcttccatggcgattttgtcctccttgaccatagtttccaccaccacgccttccatttccatctgtgattaacatatgcaaaaagcatttaggaatctagtgttttgcaggctctatttacggattctcacataatttgacttgaataagatacttaacactaggaccatatcttgtttcacattttcactatctattcgaaagggaactgggaaaacaataagcagatgctttgcaagataaagagtcttattctgagcactacaattctaagtaaagcaacttaagactcgcattcatggtacttttagttcaccatttgtccacagtatagtgcgaaatcatgaaaccaggaataagatcaagtaaatttggtagaaagttgaaaaaaacatacaattcgttggcgcagcttgaggataagctcccaatgagccagtaccgtaatccacgagctgcctttgtgcttcgagttccttctgaactaatttcccataaccacctctaggtaatcaatgagttaaggaaaaaacacatggattggcgggaaattcataaccgagaaatcaatctttcctaccacaaaacaggtatactaaacaagaacaacagagtgcataactatgcggactaaaaggatatcaggatcgtaatctgtacggtattcatcacgaacctgtatgaaattagaaaaccatgatgaccttttaattgtaaagaaacggtcagggaattacagagaggatgatgcatctgatgaatacctggccaccgcttctaccacggccccattgtcttccttcttggaatccccaatcaaaatccacacgaataggccggtcatcgagaatagtcccacttatatacttgactgcatcttcagtatcctctctagagtagaacctgataaaaacaagacacaaaaccaaaactcagcaaccaccataatgaaacttacatataaaactgttgaagatgaaagcttacaggacgaaacaaaagccacaaggtgttttagtgttcttatccaaacccatgatgatctttttgatttctccagctctagagaaaagctcgtaaagctgttcttcagtagtgtaaaaagacacattgccaatgtaaaccgttgtagatgctcttagcgcttcatcaaactcctcttgtgttcctgaaaatcttctatcacgataagctgatagctttgcttgctcctgacaatcaaaaaccccaaacatgaaatcgtgagaccaaaccctagacaacaacttcaaaaatcaattagaatcgcttcagacccatcagattccagacaacccggatactaaattcactaaaaacattaacgaatctcgattttctatgctagaaaaagcaaaacccagaaatggtttccgataaaaatctaaactttatgtaccttgaacaaagaagccatcgcttcacggtgagaagaagtgaatctgcgatgatgagagaggaggatagcttaaattaggtctatgcggggtgaaagaagaagaagatgagcgagaaatcgagaaggagagacacttacactcgtcttcttcaaaaagggaaccctaatttctaaagcagaagcagaactgatagaagaaggcaaggacactccggcgactctcgagtatccggtttcatggcccaccttacgaaaccttacaaagttacaattaattcacaaatattattgttggtattaatttaatattaaaacaaataaaaaacccaaattttttgcatctaaaatgttcaatcaaataacaattccggtttggtttcggttcaattatttcggtttcgctttatttgtttaaaccataaaaccaatttgtaattcaatttagttaggtctcgacataataatcgaaccctacgaaccaacccaaacccgaccgaaaaccctgatccaaatccaaaaatttcaaatattcaacgggtcctaaacttcaaaacccgaaaaactctaacccaaacccgatctgaacaaatatccaaacatacctcaaatatttgatatattatttatattcatacttaaatacagaaaatatttggatatttggatattttagttattttgtgtattttaggttactttggatatattaaagtaaaactattcgtgttgttttgagagtttttgaaattttcaagtaatttgataaatttacatacaaaattttgatattttaatatttaaataaacctgaactcgaacggtttaaaattttaaaatacccgaacgggtcttaaacttctaaatctgaaatacacaaactcgaaatattcgatccgaatactgaacgccctttagttttaatttggtttaaatgatattccggtttggtttgttgtggttgttggttttaatttcacagttcagcattagcaaaccttaaattttatatttttaaacatcctttatttctaatttctagatttttgcctatgaagatatcttcaaagtaatgttttaagaaaatacctctttaaggacaagaaaatcatataaggaactttgctgaggagacatagaaatagttatttctcgttgttgtaagcggtggtttaggtgactcattttcgaagttaaagctctcgttaaatctgtgttgaagcttcataatctactatggtgttccctccagatcactttttattactccaatactcatttttgagagattcactgaagatactctaacatacatacgtgtatctgtaacgtaacgggattcaaataccattttttctctttttttgtgttatgttgtaggatcaaaaaaattgtgacttttgtgtggattaacatttgacaataacgttagacgtatccattattcatgtgttaaagtaaaatacttattcaataaaagttaatataattctaaatttgttttatttatcgagttaaatgagttaactataacatatattacatatatgaaatcctctacagctgttacacaacaatgttcatcaatatccaatgctgctattcttctgaaatctggacatcaatcgcaaagaatgtgtacaaagatagattttccacaaaatggtctgctgtggtgaattacatatctgattctcagcctgatcgcatccaaagtttcttatccaggtacacattccaagtctctattcattccatttggagggagagaaattctcgtcgtcacggagagaagtcacgttcagcttcaaacctcatccgacagatagacaagactattagaaaccagctatcgacaatcaaaaagaaaggggatcttcgactcgagaaggggctgcaagtatggtttgacatgcgtccatagcatcctctaagaaagaagactctgtttttgctctctcaattctatttactctgtttttgatctagctctatttctcttattatcaaaatatcaaaaaagctgatgtaaaaagtatattttttcttttaaatataatttgacattttattcaaaaaaaaaaaaaaacaatgttcatcaataaagttgattgttgttgatttcttaaaacaggaaatcaacgaaatctcccaaagtaaataaaattgtgtatcaacctgtatgccatgtatctaaataacaaatcaaaatcttttagcaatagattcaaaaaaaaagaaaaaactttttgcaatatgatatgtcatataatgataattaagttgatacaaattggattcttaaaataaactggattcttaagctgctaaccatttattaaaaaaagatattgacacatttacctactcacatattatcaaaccatatatctaaatcacctactacatatttcattcgaaacattgtacataaatatatctctatacaaaatttaaatgacaacattgtcaacatagaagtatagaaccgtggctattagctattcatattgggccgacaaaaaaaaaaaaaaaaggctattcatattggtgggtactaaaataaggcttggaaattcatattaatgtaaaactcatttaatcgttagagagcgtggtagtcatgtagattaatgaaggagcgtgagatcaagcaatcaaattacgcaaagtcacgccgcagtaacgggacgttaaggcaaaaagccgtcacaaaaacattaaaacctctcacattgtctgttttttgggcggcgcttttcagtcaaaccctcgttgaccgtctctttctctttctctaaaccaaaaaccttttcctttataaattaaaccaaaaacaacgtcacttctctatctaaacgagaatatatctcttcttttataagcaatggctccaagacaggcgaacggtagaagcattgccgtgagtgaaggcggcggagggaagacgatgacgatgacgacgatgcggaaggaagtgcactttagaggtgtgaggaagcgtccatggggtagatacgcggcggagatccgtgacccgggaaagaaaacccgggtttggctcgggacattcgacacggcggaggaagctgcaagagcttacgacaccgccgctagagagtttcgtggctccaaagcaaagactaatttccctcttcccggagagtctactacggttaacgacggtggcgagaacgattcttacgtcaaccgtacgacggtgacgacggcgcgtgagatgacgcgtcagagatttccgtttgcatgtcaccgggagcgtaaagtcgtcggtggttatgcttctgctggttttttcttcgatccgtcaagagctgcttcgttaagagcagagctttctcgggtttgtccggttcggtttgatccggttaatatcgagttgagtattggtattcgagaaaccgtaaaagttgaaccgagaagagaactaaacctggatcttaacctagctccaccggtggtggacgtttagatttttttcttcttttcataatttgtattttacattgccggaaaataattaatgttttctttagtagatgagaaaaagaaaaatctcctatgtttttggctaagtaagaggaattttttttcagaaatctcctatggttccctaattacgtggatgtaattaattactaatcaaatatctccttttgatattttttttctacttttgatgttttttcttaaatgtcttaaaatgacatgatggttggttgatgtatcaaataggtagtagatatcactccattaaatggatgtggaatatgaaaccaagaaacatcgaacatttagatggtctgtcaacatcaaacaatttagtataggagagtacccaaaaataaaaataaaaaaatcggatgatcatgacacaaaaaagtagttatcgttttcattagttttctcattatattgaattatggtttcatggtttggtttataaattagacatgtaaaattcttttttcatctatgaattgtgtaggaagaaaattaaattcaaaagtaaaaaaactgtagtgagttatgagtttttttttaaaatgtatttgaaaagtagagtggtagcatcatgagtccaatcttcgagtttcgtgtagatggggatgatggcatgagtgtcaggtgggaggcacgtgtgctttagccgtccataatctgttttgttcctatgctttcaatttttttaaaccacaaacatattttggctagggtggctttcttacgtctaattattatgttttggttttatttttgtcatctaaaattttattaataaaaagatgaaatatatataccgctgataaaaattaaataaagagataaaattatattatatgttagtaataactcttttgagatgtaattaattttgttgaaaaaaaatcataagtactaaaaaggatcgcatctaaacactattgaacaaaagttagagagattttcataaaggttcccctatagaatatctaaatgtcggaaccaccaataaatccgaatagaccaggcaccaaagataagcaaataacaaaccaatatggatgaaaataaaaatccaacacgaccataggactcaaatagaactactaacacacttcaccaacaaaccacagaaagcaagaaacactagaattaagacaaaaactttaaattgactgcagataaatcacgtaagatcaataattcttatatgcagatattagtcgaagtagcgtagccatctataaacttagagctgattagcgttctatctaattatctataaattgtttaattacattagtttttattggaatgagtatattataaaaccaaaaaccatcacagctatcagatttataaccctctaacccgttaattaacaaagcctaaaagtcaatcccatctttatatcagaaactttaatacacatttttattataacaatcaattatataaggaaagatccaaacaaattctatatcatgcattggataagtcgccgaagtgggtgtgggactcaaattaaggtccggtaagcagatatatgtgtggctcctacaattagtcggcagattctgcggagcgttcattctaactattttctcacgcacttcattatcgcgtgtcactcaccgacaaaacatagaccacgtgatctcaccgcctcgcgcttaagttcatacaattttggccattgcctgaaacagcagctccaaccatgtctcaccgcgtgttggtctgctcacgagccttgcgtgcgtcgttgtcttaatgctttgattttagtattttattaagtaactatcaagtcaaggcattaagtcattttcgtaattcactgacggttacaaacttacgacatttaacaacaatcttgagcattcacacttgacctttttttgacacttttcaaccattgacttttcgtagtttcgacaatgcatgcatggacatacaaaagccttgaatgcgaagaaggatcatctgtacttacttttacattcaaacaaaaattaacaaatgatctgatatcgaaccactttttgttttataagaaaatatatttgttttttctctcatagtttttctcctgtcaacaagaccgttcatccttaccaaataatggcagattggtataagatctgtttttttttttttttttttttttttaatcgtgtagttgtgttgataataaacatgaaaagatgatactgtatatttcaatttttaccgattttaggtataatctaggcaggaccggctcaaaaataatttgaaccttgtgcctaattattcaggattttctatttaacttttgaagtggatttttttttcaaacaagagatattcatgagtctatctatattagattattagtaactagattaccaaataaattacagtgtcgttagttgctattggtacaccctttatgttattagtttatttaagtctataatagttccttttgtgttgccgatggaggtgcatgaaactgtttgtgcatcatgtgcattctcctaaatttcccatttgttagagagatttggaaagatacttttagaacactatgagctaaaaataaggagatcacattgttcgtcgagagatgaatcatgaatgttaaagaggacaggttcctaccgccgagtctgttagatttgtgtaggaaatcgtagcacatggtcttgcatgggttatatagcttttgcttaaatctgttgaggatttgatgaagttagaaattatggacaaactataatgagactttaaatcttaacacatggtttaattttagattgaagtactgaactatatggtaacataaacgttaattagggttgtttgaaaagtaaggatatcaaaaacggctttaagatgaggtggatcggaggagaagatcagaacaaaagagaatgaaaggaggtggtgctgaatcctattctaaaaaacaaaagtttggatttgtagcaaagtttgaatacacatgggcctaacaattacgaggcccaaaacaaaaatccacaacaaagagttcgtttcgttgataatttttttgtttattgtcagactctgaaacgtttgagaacgctgaacttgttttctctctttctacaccatgcaaagacagagagcaaatgacactgttacaacatttcgctacaatactcgatcttcgagccgccatggaatctctaacactctcagagtcgtggaatcaaaaacatcggcgtcgtcacctagggttaggagatggaggaagaaggtttcagatgaccggaggagcacaaactcagatctgcttccgatggatctgataaaggagattcttaaacgcttaccggccaaaaccctagcgaggttcctctgcgtatcgaagctctggtcatcaatcatccgcagccgagatctcatgaaactgttcctcaccgagtcttccgctcgaccaggtcgtctctttttcaccttcagacgtaaagatgattgcttcttattctcgtctgaagaatcctctgtagctacttaccttttcacgattcctgcatctggatacacaaacaattgttcctttgttcacggtttgatttgctatggaactactgcttatgcttctcaacttgtggtatacaattccagcaccagaagatccatcacattgcccgaaatcgaagcccggagttttgtcctgaaacacttgttgggctatgatcccattgatggggtttacaaagtcttgtgtatgacagtgccaaggcttgttttacagaagaagaagaagctacggaataacgtcactgatgctggggagcttattttggcaccgatttctttgcctgatccaccatattatgttatctattatgatccgcaaagacagtctacgagaaaagttgtgatacgaggaatcacagagcataactgtaagctgttacgttgcaagaaacgacatccttgtattctatactatgtattttctagtcaggttgagagtcttatgtttatgtaagaccgccacaagctgatgagcttgttgttgacatcttcaatgtcagttagatctctactgaaatgtaacctaacccgtcttttgttgttcccttgttccttgtcttctttgatagtgtgtttatgttaatcataggcgttttatcttatgttgctactctagtttttcattctgaatttgtaatctataacataagctgcttagtggtttacattgagttgcttctgaaacacacgcccgggaaaatcaaaagcgaatctatcttggtatgatatcgtttcagttggatatttatgaatctggcgtgtacaattattattattattattattttttttttttttccttttttgggcgagtacaatttgttaactcgattgtcatttcgatgttttctaatggaaatattttgtggttatggccctctcagatcagtcactctcttagcagaataaacggcatcatatttacttaaatcaaatagtagtcatgctttaattagtttatatattacgaatttcacatattctgtttatctataaatgtttatttgtataatttataaattttaaaagtttctcaatttattattagtatcatttaaacataaatactattgaatttattacaaaattgatgtatccctttgaatacataattgtatatttagtatatgtagttgtatacatggtgtgtcggggtttagtgtattttattaatatgtatattaattatcaaatttgacaaattaataagacaaaaataaattttatcaaaattaaacttatattaaaattcaattaatttaattaacaataccaatatattaaaatctaaactacatcaaaaatatttacacaatctcaatatattagtgaaagagaatctatcgatcagatttaagaaaaaatattgcataccttataattttgttgttcattgtaagatagtagtcaaattataaatcatcatcatgtttctgcaaattaacaagaaaaagaccgtaatccctataaaaaaaattcaatcagaattactcatcttataaatatatagagaggtaaaaaaagcttaacatattactttgcataaaagataaataattagaaagcaaaacatactttaacaaaatcatgtgtgcgtctacattttaatctcccacattacctgcataaatatttaaaaaaacagatgtgagaaaaacatgaaaaaaatagagaaaaacagagagtgtgagaggatacctcgatatattgctttctccatggtctcgtcgatccacaacctcagttttcttcatggtctcgttttcttctgctagaataaaaaagaagcgagagagtaaaagaagataggaactgctgagtaagttcttgaaatgagacgtacaatatttataagatataaatttttaggtttaaaatatgtataaaatattaaatcgtggaagccaagtttaatgattatgataaatcccataattatatgagaatgtttagcaattatcttataagtagttatttaattatgaaaattgttcggaaattttatgttaattcaaaaatgaatatccaactaaatatttgattacctataattatggagaagtgatatattcaaatttaagaaaggaatatacgcattggatattttaaattaatatgattcagttgctgaaaaatgaattcaattaagttaattaacaaaaattaatataaaccaaaaatataattaattttatttttaaatgtttaaacatattttttctattttaattatcaaacataaaaaatagtttagttaaaattatttttccagttatttaaataaatttagaaatatttaacccaatttcgaattcaaacatattaattcgatatttataatgttatatctataaataaagcagatttgattatgaaatgttttaaaaacattgattggattaataatctcttagaatgtaataaatattgttgatatatgagtataattagttttccaattttaaacccacgtaattatgaatagtattgaataagggaatatattaattggaaataaataaaaattctatttccaaaaatcttgctgtagaatttattgaaaaaaaatcaatggttacaattaattcaatcgaatggccaagattataacgtatgacccaataattgtaaacccgagtcataaggatccgcgtgttttttaagtgaaggcgagagatcagacggtcacaaacaattcaatcgaatggccaagagtataacgtaacttaagtgattctcagtaaaaggtaaactttttcatgacattaatattttaaacatatgatttaaaggtaaaaaaaattttaaccgagaatcacttaacgtacgtctcagtagatgatccaaagccagcaattgggttgcagattttgtttctcgaccggttggtcataaacaagctcttctcaatcctcacaagcatgaagatgggttgcagatcttgtttgattcgaaacactatttttttttttttttttggattaactctaattcaaactaaagatgcatatattgtaacaaacttttttttggtcttcttcaacaatgcatggacagaaaataaaaacaatgaattaaaaatttaacaataagctttacaagatttaaaaacaattttaaagcatttcatacttgacttttaactggcacaacccaaagtctcaaattgacttctagtgtcttcaacatgtgtgtgtgtgatccaccgctcagggtagtaaagtctttatgaaacttagcttgcccaccttactttaatgggccgggccttaaccaaaaaggctagtgaaggttacatccagtgacaaacatttttcgtaattaagtcaatatcatacataggtgcattttaggatttaggatgtgaaaatcagaaacgggtaattaaaggcgggcacggcgcgagctccgggaatttgccggcgatgacggtggctcattctcaccggttctcgacggcggtaaaccccattaacattagcttgctttcaaaacaattacttcagcttggaagaacaagtaacaattccggtaccttctcagagatcagtaatcaaaaagaacttctagtgtcttcactcatctcaaagctcgatgattgcatcaatctcaatcaaatcaagcaaattcatggccatgttctccgtaaaggtctcgatcaaagctgttacattctcacgaagctaattcgcacgttaacgaagctcggtgttccaatggatccatacgctcgccgtgtaatcgagcctgttcaattccggaacccgtttctatggaccgcagtgattcgtgggtatgcgatagaaggtaaatttgatgaagctattgctatgtatggatgtatgaggaaagaagagattacgcctgtttctttcactttctctgctcttttgaaagcttgtggaacaatgaaagatttgaatttgggtcgtcagtttcatgcacagacgtttagacttagagggttttgttttgtatacgttgggaatacaatgattgatatgtatgtgaaatgtgaatctattgattgtgcgcgtaaggtgtttgatgaaatgcctgaacgagatgtgatatcgtggactgagcttattgctgcgtatgcgagagttggaaatatggaatgtgcagcggaactgtttgaaagtttgcctacgaaggatatggtggcttggactgctatggttacgggatttgcgcagaatgctaaacctcaggaagctttagagtattttgataggatggagaaatcgggaattcgagctgatgaggttactgtcgccggatatatatcggcttgtgcgcagcttggagcaagtaaatacgctgatcgggctgttcaaattgctcagaaatctgggtattctcctagtgatcacgttgttatcgggtctgctttgatagatatgtactcgaaatgtggaaacgtagaagaggcagttaatgtgtttatgtcgatgaacaacaaaaacgttttcacttatagttcgatgatcctaggtcttgctacgcacgggcgtgctcaagaggctttacatctttttcattacatggtaacacagacagagataaaaccaaatacggttacatttgttggtgcgcttatggcttgcagccactcgggacttgttgaccaaggacgtcaagtatttgattctatgtatcaaacatttggtgttcaaccaacgcgggatcactatacttgtatggtcgatcttcttggccgtacagggcggttacaagaagcccttgagctgattaaaactatgtctgttgagccacacggaggtgtatggggtgcattgctcggtgcctgcaggattcacaacaatccagagatagcagagattgctgcagaacatttgtttgaattggaaccggacattatcggaaactatatattgctctccaatgtctacgcgtcagctggagactggggcggagttttaagagtgcggaaactgattaaagaaaagggtttgaagaagacacccgcggttagttgggttgtagataagaatggtcagatgcataagtttttccctggaaacctgaaccatccaatgtcaaataagattcaagacaagttagaagagcttgtagaaagattaacggtattaggatatcaaccggatttgagctctgtgccatacgacgtgagtgacaatgcgaagaggttgatactgatacagcataccgagaagctagctttagcgttctctttactcactacgaacagagattctacgataacaataatgaagaatttgaggatgtgcctagattgtcacaagtttatgcgtttggcatcagaggtcacagggaaggtaattataatgagggataatatgagattccaccattttaggagtggagattgttcttgtggtgatttttggtgagaatcgaggttgtacacagaccaaatgcaatcttcgaggagacttttcttgtgaatcaagaaaatggctatggagaattgagaaactgggatagttttggtcgaagaattttgaacacatctcgtgaagacttgagagttttaacagaaacgccacggatctgaatcagatcatagctagtgtatttttatgcgacttcgatcttgcttggtcctcatgggcttgggctgtctctataggcccaattatatacgtccttttgtgttagagctaattcgttcttttttgtgttacagctaattcgttcgttttttacgcatagcatatacctaccaaaacgaacgcatgtcttcgctgtagcctgtaattcattttttcactttaacaacttcgaatatgatcaataatacaaacactttcgtgttaatttttttcttcttaaataaacttttctattagtctctttgtattgctatcataagagtataatgtttggtatatattaagactttttggaaatatgatggtccacacaaagaggtatattcgactattcgtagatttgcgagaggatcaaacttttcgtcgtaaaatgtttaccaccgttttatttgtctgaaactgaaaacaacgaacagtgtctatttaattaaccaaaacggcagacacaaatctctgggtggagccgatttctacggaagtcaacaaaacgcaccgtcgctgcagatcactacctcctctttcttccttaacgaaaacgaaaacattgaacagagagcaagaacaaaaaggcacgaaagcaaaagaattctcaaactcctgagaaaaattcgagctccgtgtgattaattaggtaacgtattgctcgatcttcagatgaatttggagttttgctttcttcaagcttattctattttgcgagattttcggagaaatgataaattaattgatgtttttgagtttcttcctgatctcgatgtgttcgaatgtaattagatttgagttgcgatattgagagatctctgttgtttgaattttgaatttggatcttcctgatgtggttttgcttcttcaacgatggggtttatcgttgctttcccaatattttactgagttcttaagcttactcgtaaagtgattatctgctaggtgttcttctgcaattgcttttgattcaatgtcctctttgatgtgaagtaatgcttaatcaattcatattttgcagtttgtgttggtaaacttcaatcagatgagtttgatgatgaaagtttagaagagtgtttttgcttccaaagcaaaataaaaacaaatgaagcgttttgtgtacattaacgatgatgaagcttcaaaagagctttgttgtgataaccgtatatctaacagaaagtatacgttatggaattttcttccgaagaacttgtgggagcaattcaggtaacgatgattcatttcatttagtgttctaatgttcttatatctatgttacgtcttttctgatcaaaatgttctatctttttctttttgtttcagccggtttatgaaccagtactttttgttgattgcttgccttcagctatggtcacttatcacccctgtgaatcctgcaagtacatggggtccgttaatattcatatttgcagtctctgcttccaaagaagcttgggatgattaccacagatatctatcagataagaaagcaaatgagaaagaagtttggatcgtgaaacaggggatcaagaagcatgtatgaatcacttttgcatgattttttcatggcgattgatttttaggtggtgatagtttgtgttaattgtagtagtatgttgcttgtagattcaagcacaggacatacaagttgggaatattgtctggttgcgtgagaatgatgaagttccttgtgatcttgttttgcttggtacctctgatccacaaggtgtttgctatgtagaggtaggtagacttcatgtatatgatttatgttacaatttagtttccaggttggtggtggtagctttacttgagtacttccaaatgtgctaaaagttaactcatacatgcagactgctgctttagatggtgaaactgatctcaaaacaagagtgataccctcagcatgtgtgggaattgatttagaattgttacacaaaatgaaagtaagacttcttgtaaataatcatatcgttcctggctttccatactatttcctcttatcagattttatattaagctgtctatgttttcagggtgtgattgaatgtcctgttccagataaggatattcgaagatttgatgcaaacatgcgcttatttccgccatttattgacaatgatgtctgttctttaaccataaaaaacactcttcttcagtcctgttacttgagaaatacagagtgggcttgtggagtatctgtctatacaggtaaatttaccttataaaatgttttttcttttcttgtggaccatgtgttctgtgttcttattatctctggtcagtcgtacgattgtagttgatcttaataaatgcttcaacaatttttcatactatctataggcaaccaaactaagcttggtatgagtaggggtattgctgagccgaagcttactgctatggatgcaatgattgataaactgactggagcaatattcgttttccaaattgtcgttgttctggtcctcggtatagctggaaatgtttggaaagatacagaagcaaggaaggttagaattcctacctaatcctcatacaatctcatgaccataataaatattttacccttggttttgtatgcttggggcatttctgagctatacgaactctgttgttgtttcagcaatggtatgtgcagtacccagaggaagccccgtggtatgagctgcttgtaatccctttgcggtttgaactcctatgttccatcatgatacccatctccattaaggtagtttaaacttcctttctatactatctggaaattctggtaactctcttactagctctggagtgagacatagaatgcattaaccgacttcttggcatgtgaaagagatattggattgaaaattggggcttaatgatcatcgttaattgaacaacatcgatcttgattcctgaagataacaaaattatgagcaaattagcatgcctgtttctactaagcatctggttgatgtaatgtggcaggtgtctctagatctcgttaagggtctttatgcaaaatttatagaatgggatgtagagatgatagatcaagagactggtacagcatcttatgcagcaaagtaagttcaggacagaggcagactacctcagattcacctgctttgaacacgttagtttcataattttttgttgcattatgtggctttttgtgcatggcagcacagcaataagcgaggaccttgggcaagtagagtacattttgaccgacaaaactggaaccctgacagataacaagatgatatttagaagatgctgtattggaggcatattttatgggaatgagaatggagatgctttaaaaggtttcagacttttttttttgtgtgtattatgtactcagttttatgctttcccaatttgtgtcgatcatcttaatttatacattgtttgaagcatgtgcattagtgactatgcatcaaagaggtattctttcttacttatcttgatttattttttccaatcagatgcacaacttcttaatgccatcaccagtggctctacagatgttatccgatttcttacagtgatggccatctgcaacacagttctacctgtgcagaggtaaatttgaacttcttgaaatcttcacaatatctgtttttggaaaatttaacttctgcatatttattctgtttgtctaggaattttcatttagttatattttttgggtttccatctgacagcaaagctggagatattgtttacaaggcgcaatctcaggatgaggacgctcttgtaatcgctgcttcaaagttgcatatggtctttgtcggcaaaaatgccaatcttctaggtaatagcatctaattttcatttttgctctatatggaatatgtacctaaaaagtagttatcatttgtttttttcttcctctttattaaatgcagaaatcagatttaatggttcagtaattcgctatgaggtactggagattcttgaattcacttcagatcgaaaaagaatgtcagtggtagtgaaagattgtcagaatgggaaaattatacttctgtccaaaggtgcagatgaagcaatccttccctatgcacgtgctggtaagttgatgtatctcttattaatatgagacgagtaagtagtattcaactgaatgtgcttagagctgatggccgttaactctccactaaacttttaggtcaacaaacccgaactattggtgacgccgtagaacactattcccagctggggctccgaacattgtgtttggcttggcgtgaacttgaagagaatgagtatctagagtggtcagtgaagtttaaagaggctagtagtcttctggttgatagggaggtaattgaaacaattctctctttctgttgttcactataagcgattatgaagtatgattagtttgaatctacagcttgactggctaagtcgatgcacttgcttgatgtttttctcatgttacagtggagaattgctgaggtctgtcaaaggttagaacatgatctttatattctaggggtcactgcaatagaagaccgcttgcaggtaaaaatttaaatgtccaggactagtgaggttcacagtgtaatataatgtagcaccgtaataggagaggaatgtcttacatagatttttgccttatttatttaggatggtgtaccagagacgattgagacacttcgaaaagcagggataaacttttggatgctgactggagataagcagaatacagctatacagattgctctttcatgtaattttatctccccaggtaagttgggatcattttctcttctttgttatttgtgttagaaagctttgcctattactacttatcatactttcctaccataatcatgtttatatcagagcctaaaggccaacttctgatgattgatggaaaaactgaagaagatgtttctagaagtttggagagggttttgcttacaatgcggattacagcttcagaacctaaggttcacctcagctaaatttcttgaactgttacatccttggaacaatttcctctcacctgtatcaaagaataattttgtgggtcgtacaggacgtggcatttgttattgatggctgggctctagaaattgctctgaaacaccatcgcaaggattttgttgaattagctatactttctaggacagccatatgttgtcgcgtcacaccttcacaaaaagcccaggtaccccacccaactttaggtgctataagtattcgattttcctagtaccaagtggccttccactgctcatcttattttctgttttggttgaacttttggctcgactttacagttagttgaaatcttaaaatcctgcgattatcgaacccttgcaattggtgacggtgggaatgatgtaagaatgatacagcaagctgatattggggtcggcatcagcggaagagaagggctgcaggcagcaagagctgcagactatagcattggaagtaaggaatatatgtacataatatgtatcttcaagctaataccaaggaaacaatttctgattggttcttgctggactactctttgattgcaggattcaggtttctaaaaagactgattcttgttcatgggaggtattcatataaccggacagcatttttgtcccagtattccttctacaaatcgttgttgatatgcttcatccagattttgtaagtttattatctcagatatgttctcagtagatatcattcaagtcgttcatgaaatactgacaacagaatctatgtagcttctcgtttatttcaggcgtttctggaaccagtcttttcaattcagttagcctgatggcttataacgttttctacaccagtgttcctgttcttgttagtgtaattgataaagatcttagtgaagcatcagtgatgcaacaccctcaaattttgttctactgccaagcgggaaggtatgcttgattaatagtgtctaaatctggtttcactatatctgaagtcaactgttcatacgtttatgcatatttgttaatttcatttttctcacgattcaggcttctgaatccaagcacatttgcgggttggtttggccgatcccttttccacgtgagtactgtcatttcaaatctactcaattgagtacagtttcttcactacttcaaaagtcacaaaaatttactatgcaaactccacacctagttagaatgcttgtagtaacttttttttcttctttcttcctttttgttcatattcccttgtaataaatctgaattctggaatctatttgcaggccattattgtatttgtaataaccatacacgcctatgcttacgagaaaagtgaaatggaggagcttggaatggtagctctgtctggatgtatatggcttcaagcttttgttgtggctcaagaaaccaagtaacagctccttgtccttgtggcgacgctcatttagtctcatacatcgcattcaaatatgcatgttcacgatagaaacactcatgcttagtgcttattctctcttctttattcccttgctgtgtgttacagttcctttacggtgttgcaacacctttccatttggggaaatctagtcggtttctatgcaatcaactttctcttcagcgcaataccgtcatcgggaatgtacaccatcatgttccgcctctgttctcaaccttcttactggataacaatgtttgtgagtataaaaaagtcatctcctatcatctccctatatataagtctccccagaaacaaacaccaattaattgtttctttctcttatgcagctcatagttggagcaggcatgggtcctattttcgcattgaagtacttccgctacacatacagacccagcaaaatcaatatactccagcaagctgaacgaatgggtggtccaatactgacactaggaaacatcgaaacgcaaccaaggaccattgaaaaggacttgtctccaatatccatcactcagcccaagaacagaagcccggtctatgagccattgctatcagattctccaaacgcaacacgacgctcatttggccctggaactccattcgagtttttccaatcacagtcaagattatcatcatcctctggttataccagaaactgcaaagacaactaaaaagctttttaattttttttgtttctttcaaatttttacggttccgtgacgtttgtgacttttctgatctcaatggtaaatgcagtccaagtcgcgggtattaacaagaacttgatttatacagcagccaagaaaacacattgtcttgtctgcaaaaaagatcttattttattaatttattaatctttgcgagggaaaaccaaatggaatacctctgcaacagtatctgaagaaaacaaatgggtactcatggtatatataatatataactcagatgttacaatctcgatctacgtataaatctcttccccggtctccgcctagaccgcccggtttctgatagctttatatcccaatcctcaacattcttcggaatataaacatcaaataagatttggcctagaactccattgggcttaaccgattcattggtttgagtattggacaaacaaatcaaatcttgtttgtgttcatcttgcacatatccgccgtctctgcccacgtagtaacctacggtgctaggtacgaagaaatgatcggttgtgacaagtggagttccgttgaagcttcggttaagaccagaggttgattgccccaagctctgaattggctctgttatctcatcatgacatgttcctttcatagcttctctgtcaagacttctcgtcttctgcgaataaaccgacgctgcttttgacaagaactcagatacagcagctttatagtcgacctggttataacgataatgacctgaaaacattgtgtatgaattaatgttaagatcacaaagaacttattttggagagaaaaacaccactaactgttagtatatactaaccacaatgaggggaatcattccattttacaagttttacatttcctcctagttcttggagacgtgtagcgaaattgtgtatagtttgataaggagcaaggtcatcgttttcagagcatagaatgagataaggtactctcatgatctgcattcaaaaacataaatgaatgcaatgagatacgaaatcaaagtcgagactctttctaccatttcataatatgaaaacaaggctcttactatagtagagtaaagagtctgccagtactcggctcgctgtgattcaaacctgttgagaaaaacataatcgagactcgaagcaataccattcgctgcccatacaaacggtttaggtggactagacattttaagcgtagttggatgaaccgctaatcgagctcccaagtcgctagtgaaatccacaggacatgagtcataaataaaccctgagatgcagtttctaaccaatctacaatcatcctgaacacagagaaatgaaccaaaacccattaacctaagaatcatcaagataaagacaagtctaatcattaacaagaatgaaaacaacaagtgcataccggatttagtcccgtttcgcatgttccttcaagtatctacatatatatacataaagaaggatcttagttacacacttgtggaaagagataacaaaattcagaaaaaatggtgaaaacaaaagcttacttgaagaactttatacatacaagcattaggaccaccagagaaagaagcaaacactaaaggaactggctttgctttgagctcctataagaagaccagaactaacataataagcttatgagatcaattaggtatcaacaaaacaataaagtttcaacctttttaccttgacaagttcagaaacaacattagaagctaaatctgcagctttatctggaagaaacctatatgaatcaaaagagaattcaatttatgaaacagagagattagaaaacagagagatgagagaaggagatgaaaacaaacatgttgagaaattgagaatggcaaacgagagaatcccaaagaagagaagaatagagatcgacatggttctttagattgcgttcttcgctagacatccaagcgaataccacaacgatcgcttcgctttctcctccgttgttgtttttctttcgccagtagtaatttcctccaattccccacatattttctgtgtaaattagggttatttttttgttgtggagaagatgattgaagaaatcttcaatagaggagggttgttgacataataatgaaagggcacaagcttcgagcagagagacgtagaggaagaagatagaacagatcactatcgttcgttatcttttgtcttaattaataattattatatttattaagattttaattaggaaattaaaactacataattgttattaactgctcggcatgaatatttgtgttactatttagagttacatgatgatgtgttcatcgaaaaaccggcttcacgctagtagtcttggccattttcttaaacataatatcatgtccaggatc

SEQ ID NO: 829 - DNA, 60583 bp, Arabidopsis thaliana
acacaatatccaccatcatatagttgtttgtggaagtactgtgataataactctaaataataacacaaaataaattcataactttgaaataattgaatataaattttaaattttcgcaaaataactcataactatgctaaaatattaaattttaacaatgattgtactcaccctcatcgcattatcgattaaactactagagagcaatagaaaaaaaaaaaaaagttattagataatcttatattatattataatgtaaatgtttgaaactaatttttcaataatgctttgacaaagcttttaattaattatttacatttttttattagttcaaaaataaaataaaaagaataactcaattttgctaaccattatattatctatattagtattaatttaactaattttagtatttatttattagtataagaattaactagacaaataaataatttatctgttttatttagatactttataattattctattaacatccgtaactatttgatgatgttttaggttgtgattattttttaggttttaccaaaaatcacaaaaataaaaactaagctagattcagcgttcaacagttacaaatataataattcaacttaatttagctaaaaattactaaaatttagtcagtttcattggttaccatttagactcaatcatacatgggatattgtatctgttaactatacgcggtacaacacaatgtcatttggaacttgatgtcatatactgtctcttcaagaaatttattaaaagcaatgttttttacaagcctatgcatcggcatcatgagttccgtaacattgctatcgtccattatagaaaaaagattaattccccattgaatcgatatgaggaaataaggaattacaaagtttcaacacaacgaattaactcctatctttggtgcttcaaccattcgttgattggcgtcttcagaactctttcagatctttgaaagaagtcaagaaatcttgatgattagttatgtgtcttaccctcttacattatgtcctcatatggcgtaaatgtaataaatttcataacctttttcattcatcttaaccatatgttttaagtaaccagcatcacaactcaataacacaacaatagctagaaatgacatcatcattttctaagcgtaaagatctttcaatatgttctcatcggctgtttgggaacacttattctcaacatttaacttaatgatgtacgagtataaactcaaccctagatggtgtcgattaaatttttattgtaaatatatatatatatatatatatatatatatatatatatatatatatatatatatactttttgcgtaattgtaattaagttgtacatgttttgctcattcaacaaaaacaagtgtgttactcacgttaaaaaacacgttacaagataaagcacttcgtcccaacccctccctcaatttcactataacaaacaccattaaagattttcacggcaaaaatgattgaaccaaattggcgatcgtctatcccctcttcaatatggcctaccaaatttttctcaatctttactcaaaaaaagttcataatgacagtaattaatctcgcgatttttttttttttcataaacaaatctacaataattctagcaataaaaaaacaattacttttaacattggttagaagacaaaacaaaatctctaaattctttttgctttgccataaaaaatagtctactctaatgataagttatgtatttttacaataggtaaataaaacacctacatgatctatcgataaattttattgatggattgccagtttctcatggtaagtctatgattatggttgttgtggataggctgagcaaggcttctcagtttatatttggtctcatccttataatgcgatgacaatagctcatcattatttggataatgtttacaaacttcatggtcgtcccaaatctatagttagtgacggagatatataaggtgtttactagtgagttctggcaagagttttttacactatagagcatgactttgaagatgtcaagtgctacatccacagtgtgatggcctgacggaagtggtcaatagatgcttggaaacttacttgcggtatttgtgcaatactcaactgctttttgtggagtaagtggttggcgttaattgagtattggtacaatacaaattatctcactgccactcacttgacaccttttgaggcggtttatggaaagctccaccagttcatctatcgtatttacaaggggaatccaaagtcgatgtggtagctatatcattgcaagaaagggaaaatatggtgttgttactttgaattcaagctattagctgcatataaagagcatgtgtttagctcatttcatcattatcgcatcatctctaaacttgtgaactctgctataatgatcttccttggatatttggttgggtttctttcatcttgagagctagcttgatgattgaatctgcattttatgaacgttgttttgaacttttgattaatggattatacagatttctcgtgtgttaatttacttgtttgtgttgaattattggattgtggagttttctatattacatggggtttcaaaaaccatgaagctaatggatcggaattgtagagctgaaaaaatccctgaaaattcgacacttcaagaacataagagataaatttttttttttttttttttttttttttttttttttttttttataactctcttcacattgtattattcatctaccgtagtaccgtacgtacgtggtcctcactctcacatctcaaagagtgaacactccaaaagaaaaatcaagaaaaaagatgggaagttaaaggtacatgcatgcaccaaactcttcaacaagaagtaaatggttagagttccatgtaccataatatttaaatccaagcttattagggtccattttatggtgtaattggcccacggtcctttctccaaaaacatatgtaaatacatataatgcatgatggtgaaatatgtctccaaggagacatctaaaggactcatcgacccatcgagatgagaatgggaactaagtattggtgggtcatccggtccacgtgacacctccacaccccgacatactttgcttttgtatatttgctattatgtttatctatttatgtatatacatgcacatgatcacatgtacatatatacacatgtataattgtatatatattatacctaattataccatatctatatgagtaatgtacacctctatctctatgcatgtacagctgtcgttcagataagtatgtctcctaggaaacaagtgctctcggagtggggaaattatattattattatcggactttttaagttctagtgtcataaaaatgaagattttaagattttgtagtaactagtatatgataggaatagcatatttgctccacaatcaaccaacgaaacctaacaataacgttattctccactatatatatactcgactcgagggacataatgttatgttacaattacaatgttaatgtttcacttgcttaatagcacaaatatagagcatatacaattctttgatgtaccgatttaaatctatgtaattaattaagaatcaattttcttatagtaatgattgtggacattaatgaaaagtactgtaggcatataactacatcatcattttctattaaacagaatattttgaagtaaacattacataggaattcgatcacaatgtagtagatattacaagttccaagagatcaatataacaatagaagttatggactctcttatttaacaaaaaatacagtaaaaatatatttttaaagcacgacatagtactacagactcttaattagctctcgtggaaaaaatcgtaaatacttttttaataaacaatgtaccacgacggacctccgccgcggcgccgccgtataattattcccgtcgggaaagatctcaagtagttcacagttgatgtcatactgttcatgtcaaaagatcgttcacccatcctagatcaagatcgccactagaaccgacttcaaagctatttttatccctagcttgggccgccgcagctgcagccaccgagaaatcgcttagccggccaccacgtggtgtgaattcatcgccaaagaagctcgacggtggtggctgaagctggccatggaggtaacttggagttgaagaaggtgaaagagcaaatcgtagaggactactctgttgtaattggagatctctgtctccgacatcaagccacggcggaagacggtggtggtggtggttgctgcttagattcgatgaagcgatcatcgtcgccgtggaaatgggcatggtaacgggagacgatgaagaagctgcaagtgcttccgtgagacttaaggaatctaaagaactaatcagttcgtttagtacggcggtgcgacggcggctcagccgtgaaaatgcatcggctttatcagctggagacaaaggcggagacgatgaaggtgatcgtgataaattcaagagagtactcgtcggagaatgggaacaaaacaagcaacatcgattatttttattgcttaaaaccgatgcaggggatgacgacggtgatccaccgcaaccaccggaaatatgattctccggggacggtggaagaactctcagctgacgtggagaatgagcaaagaaacaaactttcctcttacaatgcttaccgtctttacaagcttccgtacggtaacgactcggatgaagccaacactcgaaaaccccgtgagcgaaaccgcattcatcaccacggctacaatcaccgtgacggctaaactcagggcatacttctccggtgtagtgaaaccggcgagggtcacggcgacgagccttttcaccgggatgagagaaaggacagtcggtccagtcatggctacggctacgcgtgcaccgtcggatcttgaattcgtacatccggaaatggtctccagcgtaaggatcctcagagtcagagtcgtaacaatagtctttctgttctttatagtcgcgaaggggacttgaaactgacgacggagacttggcggaggaaagaagcttcctcggtggaatatccaccgttggtctactgatgtggccggatttgtgatgttcgacgtccatgtctacgtggcgaaagatgagagaaagactttttattatacttttgtgtatttgtttcctatttgggtttgaatgagagagagataggaagagataagtgtgggataaaatgatagatgcctaattgtctctatatatatgcgttagtggatacatccatatacatggtttgagataaaagataataagacgttgacaaaaaaatatcaaggatgttttagaatgctaaaattgcagtgcttctatggtggacgtggttatattcgtttttagatattttgcttaagaacacaacaattgatttaaattatgattaaaaatagtcaaaatatcaacatatgtattgaataacttatttttttgaaatagataaaataaaataaaaaggaaacatattgatattaatttatccacattttttttttgttaaaaggctttaatttatccacattttattaattagttttagttcatgagtatatttttaaacaggaaataaaatctgaaacaattagtacattatattcatttaaatgattcgtatttaaagtatatcttagtgttgatttaaattgacaaaaaagaaaaaggtatacgtattgtaagttatttagtggaaaagaaatgatgatgtgtagagttataagaaggagacaaaagggaagagttcgtggcgaaagaatattaagataggttcatgcaattcagcaggagctggcggtttcttacggatatcgagtcattgtttctgaataattcgatattttttaaggtaggcatatttacatcattacatgcatgtattagcttcatattctcgacctaaaacttaaaagtactaatactataataatggtcatcatgagtcatgactcagtgataactctagagtaaactttgcaacacagaacgcatgtgtgatgctatactaaatatatatagaaatggcattatcttcgaacattgtgattagtcttaacaggtttgaggtgttaaacaagggtggatctctttattggttacgtggctcgcatggaaacgaagatcctttggtttttccttccaatcggttactcttttcttaaggacaattgttttaaacacgcatagttatgaagaaataacgcatatatatgatattttgttttaaaatcgatatgttttatacatttattttatttttgttactgcacattttgcttattttaaaatttattgattagttgtccaatccaaatttttttttatgaataaatcattagctaaaaagtctatttaaaattttaaataacagataagacaacaaaaagaaattgagaagaaatctttcattcaagtcatcaagtgtcccttcagcattgtattaaaagtggaaattatctaaatcaatacttcaaatttgttggaagtatactagtataaagatatactttttttgtaagaaaactgaattcgaaatctaacgaaaatgacacaaatatatgctagattcaacttttaaaatgtggctgccacattctctaaaccaaaatagtcaaaatctggagaaaaaaaagaaccaaactaatataaacaagaccaaaattgaatacccatacacatagaaccatatttcttgaacaccccaaagcaaactggcccacacaacccctcaagactttaaaccctgcataaaaccaaacacatgctacattattaatagttttgaatatacaacacaacaacataactagtttatataaaaaagatcatcttaaatcaaaacccaaaccaatctcgaatctttctccacttaaagtaaaatttaatgtttataaacttacgtggagcaatccatgctagaggagatagggaaactgagatgtgtgttgcaaagaagaggaagctgttggatcttatcagccaacattggaggcgtataacctctcgtcatcatctcaacacaattacacaaaagcctcgggttctcttttttgtgtttcgcaattatgttaagttttacgatatggacacaacattttttaccgggtttgtagtaatatcccgtgagaaagtctagacaataagaaaagtaatcatatgtgtatgcacaaaatggtacgtacgagtgaacctgaatcattagcctagtgtaatcggagatcacgagaagcagtagaagtgaaatcgcgactaatttagtggtgtgtgtatccatttctagacttcgaattaattgatatacacaatgagaccaaccttagactaatttgtacatagtagttcagtattagtgatcatgcttatttcatgagtttttgttgttgttgatggttgtgtcatcgtatacgtaaataccaatgagaacaataatacaaatcgaatgaacctaggtttttattttattttatcaaacaaaactcaggaataaacctaacaggaggataattaatagctactcgcccaagcatttgtggtccagtggtaagagaagatttggggaagggtaaaacttccagacccgagttcgatcctctatggaaacaaaaatcacatttgtttgggaagtttgtcagttgggccttggcccaattagtttacctggtagtcagaaatgcatgcggcctgactactctctggcattagtcggaaagcattccaaactcgggacagacagtgtggtggtccttcgtggagaagtccactctaaagtacttcggtgcgtttctaccgaggctgaccatttctaaagggtagttaatattttcttatactcgtaatatgtacatgtgaattttctttttatttgatctttgtgagaagcaaaaatcgtcctaccattactaaatttacattttattgtcatttaagtgtcagttttatatagaataaagttttatatagaataaagtttgaatctggtttcatttagattgttgtaattgtgagtaaacaaaagattaaaaagtaatacaaaatattttacctctatttgatggctcaccttattatcattattatttagagactgtaaatctagagactgtactatcttgcttgttttgcataactctaaatcaagacaggtgaagccatcaaaaggcaaaagcttgatgatgggaggtaaatccagacaagttagtcaactcaaactgcaatacttgtttcactatctcactgtatgtgttaatccgaccgttgatgtcactagattctgaacctaaaaccaacaactttgcctcacaagaaaaaacaaggacttgttaacacgagcttcaacttctgcccttcagtcactaagcaaacccggacagagaacataaaggtgcattgcgtctgccgatgacactaaaaaggcgaaagaattcagagtttgtgacatctcagagagttcgtcctgtaagacttaacgcacttcagagcttgaggaagagatgttggcaaagatgccttagttaaaagagcgaccttagaataagaaggtactgcgtggctttcccacaacgtctctctcttctgtaacttcagaaacaacagagctgcacagaaatgagaaaactgaaaactaagcatgcgcttcctctctgtttcacaaagattttggcagctccagctatgcccacaccacaaagaagtacaccacatcctccagaatttcaagtcaaccacactgatcagaccacgagattcaaacgctcttatccaaaatattttctgagtgagacgttttaaacgtggctttattcttactgttgcaggagttccatctagaaacgatggcccgggctagccgctagcccgtacggagagagacatcttcagtagtgtcgacggaaatgtctcaggctatagagcttttgtttgtttcctattgtcttcagagcacagccagtgattaaagagtaagtgactgttcatctgctgtttcttcgtcaacatatacagtttcctttacatattcaaagactcaaataatttctgtgaattctcacctgactggctgactcagagatcaaatttctgttctggataaactaaaggcctcttacagaatttttcaagagtttaatctgcatgtggaccatcggcctatcgaaagggcagactttgaccataaagtaagcttatctaactcgatcagcagattaaaagaaaccttttgatttctcaactaacttgttctatcatctttggttccagatcaaagagaaagagatgatgtacaagagacatctcgaagaggcggaagccgcaaaaatggtataatactataaattttctgccaagtatagatgtatctaataaaagagtatgatagtaaatgtattttacctaaaactttgtcaggtagaggaagagagagctctaaaacaactgagaaggacaatcgttcctcaaaccagaccagtgtcaaaccttaacaacccattcttacctcacaagtaagttctgatccaaaccaggagttgatttcttcttttctgttcttgatttttacctacacttgttaaacaaagaaaactccatgtcaattaaacacaggtcgaacaaggagacgacaaaaccaaattcaccaaagcttagagtgattagaagaatcgacaggagaacaatgatgatggtttctcctcacatgaggtagctgttaaaaagtaaaaaagactaagcagcagcagatattgctgttcaagaacgtttgaaccgcaccaaccgctcaacgtctccattataaaatgaggcagtagcataatcttcctgtgttctgagacttgactgatatatatatagtaaaaaaaaggtttccatataaaaacttgctccggaaatactaagcaacgtctacaatgaatacacaaaggaaaaaagtttgtcacaaacaaaaaacttcctaaataaaaaaaccaactgagatatataatctagcaaacggataaacaaaacaagccctgatccatctgtttatatattatacactgtttgcacttccgcagcacgtccattaggctccaagtttcttcactcagtttgcttcttccggtaagctatgatctgaaggcacaaaccaaataaggaaaaagtctcacaaagttgaatcatacttagattagactgtaagatatttagataaaaattattattattgacgctaccaaatgttgttcatggcttgaaatgaaatcgattttgagccttgacaatgtttcattgtcttccaaactcagcatctcatctttagatgctgctgctgaagctggagtcactgcaggaagattctctattgccgcatcttctcctactcttcttcttgttactaacaattcaacctcttcagtcttcaaatgtatctgaagtgcaacgaactgtacaacattgaaagttgacaaatatattagcgtatgtgatactgaaatcatttttgttattgaatcatattgaagtactttcgcatcaatatatataacaaaaaaccactttctactgtgacaagtctgatgataactgtaaagggagagagagtgctcacttcacggagctgttttacaagcaaagtgggtcggcaacagagatatggctgtggtaagtctggtatacattttgtatccagcgagacaagcttgacatgaatatccaactgcaagaaagattaagtttaatcgaaatccaaactaactgcaatcaaaaatacaggtcatcaagaagaagagaatcatcgttttttttctttggtacctcaacactagatccatctacgctgctgcgtagatattcaacaagtttgttcacacgggcattccttacactcttactactacctccagaagtattattcccatgccttgtgttactccttgtcccgcctcttccccaagccagtatctcgggattccacacaagcccgggagatatgcctttggtgtctctatacacttctgtgtcgttatctgcacagttaccattgtttttgtttgcacctgaagaagaagggtgttgtgttgaacgacttgtagaccgttttctacgtttcttctgccggacttctgtaccacgctcatctgaagacgaatctttgtctcttcctctgttgttattatcatcattatcatcatcttcatgagcttctgatgcgttttgttgttccatgtttctgctgttccgtctccttctggagccactagcaatacgcggtgatctcattaagactgctgcctctttaccaagagatcgtcttttcacaagagcctcagattgtcgttgcgatatctgagctatagatgcttgaatctacacaaaagccataagaaggtgattaagtatattttaagcaatagtcaaaaaagtgaataacaacattctccatggtatccgacctgcttattacgagccatttcatcttcgtgaaaagccagttcctgaaccaaaaaaaacaaagcgttttaacagcaacaatctctccaaaacaaacaagcaggaaaaatatgttgatgctttacctcttcctcataactatcaatatttgtaaataaagcagcaataagagcatcaaatttcggatcgtctcttagagaacgccggcttgcacaatgcttcctgcaagcaggacattcgttattcctgcaatagaaacttcagttaatataaactcaaaaaaaagctttagaaaagccaacacttatggctcccaagagaatgatgaaatatttaacttgaaagtggcacagaactgagaagcaagaagaaacgaaaacaacatagataataagagtaagacccaaacaatttgaaaccgtaccccaatctcattgacttatcaatacattcccggcagaacctgtggagacattccatcacagtccttgttttctttataatacctgaaaacaggacaacaagaaactcgtttcagccagatgtagtaatgtagcttaaaaatagagtgtgaaccaaatcatgccgacttatctacaagaatacgatatgaaaagacgcaagaatttcatgccgactgaagaaagtaacggctttcgagctttagcaaaagttctgttcccaacgagaaatattcaggacaaaattgagtacctaggcatattggacactgcacgtctttacggatttcccctagatcaatttccataaacctgcatgaaaaaaatgcagacacaattaaacaagaaagatccatccagcttctttattctacagtaaagaatctatctcaagacaaaaataaagctgacattctaaaggtcaagttaaatagaagatgaatcattcttaggacacaacttccagtaatggccgctattattcaaggtaaagactttacattgtttagccacaagagcgtagaggttttgagcagtaatacgagaggaattacaacatgcaagtgctaagaagatgcatcaacagattactaaatcaagcagagcaattttaacatttaattgactagaacaacagaagtaaagaaatattggagtagagaacccatcacaagctaaacacatctggagaagagaaagacagagaaatgagaaaaatcattactctgattggtctccagatatagaagatggacttctttctttagaatctgaaacagaaacaaagagagagaaccaaatcgatcacatgaacaaacacaaaacactctcacgtttacacgagagtagaagaaacaaaaacacatcctttaccttcttcttcttcttcttcttcctcttcttcttcttcctcttcctctgcttcttcatcttcctctgcttctacttcttcttcctcgtcctcctctgcatcgtcaccatcatcatcttcctcggcgtcgttgggtttcactacttcttggtcttcctccgcttcgtcgtgtttcacttcctcatctccttctttctcttctttcgtctcatccttctcttgtagatcctgtgtagcttcggggttaaatcggtcgcgtggttggtctgccacatcgggaatctcagccgacgagaagctattattcttgacagacattgtagggacacacactaaagatcttctctctaagagaaacccaaaaggctcagcctttgtctctctctctctacgtctctctctattcttcttcttcttcttgttctgcttcgtttgtgtttttggttcggtgccgatatagacgaaataggagaaagaaatcggtcgaagaaaaaagtgagaattttggcctcttttttttttttgccatttttcttcactttaattaatatatcctaattatatttttttcttcttaatatctcctaattctattatttaaaccggattataaaacttaaaaaacataaaatcgaccgcttttataaaattgtattgctgtcgaaaaaaaagaaaaatatttaaatttaaacccacttgctcacttgccaaagccatgattaaattgtaaaattgaatttttgactaaaaataataaaatgactaactataacaaaatcaaagagctacgccgtctgtggggatcgaacccacggccacgtggttaaaagccacgcgctctaccactgagctaagacggctatttgtttatcactttcgttaaactatatttaacaaggtttattgtattaaattagaacaatagactgggccaaaattgagtaaagaatgtttaagcaagaaggcccaacaaaagcaaaggaagaaaaaggaaatttgtaaccaataaaaacagtccgaactggaattgtacttgtgtccaaacagagagtttaaagattttgtcttttttagtcaaacagataaatttagggtttcttctcaatctcttataaatagctcatcttccgccgttctttgtacattcattcgatttcttcttctcgtttctcaatttcgcttcttttgcaatattccgttttacgaattttctttgtttgaaattggtctgaagaatgtgatgaaagttgtcgattatgtgtgatgattctttagattcaattgatcgataaaaacttcaattcgctacgttctttctgattcttcatccctttaaagaaaacagttttcataagttttgtttttagtaatttcagattcagtttttcaagtaatcaaattggtgaaagataacatcttggagaaatatgatgataataatcagtaaatatcttaggacaccttctgacacagtttactgtgtatgagaatgacttgttaatctgattctccatatgtttcttctttcaaatctttatcaaactgttttactatcttcaagagccttttatcagaatctgattgaaagttaggaacttgtaaaaatatgtaatcagaaacagcatactgataataggaatctatgaaacatatatggatatgttatgttatgtacacatctctgtaatatatgaagaagtgtacatacatgtaatatacacaaagaaccaaactctatgatgagtctgtataaatgttatacacatcactctataaccacagagcttagctttttataagccaacaacaatcttttaatctctatatattacaaacaaatttttcaaaatctacgaaccaaataagactcttcttgatacaacaagacttgaatggttctctgtttttgtcctctgataaaagactcccagcaaaatcattcagatacgtgatttagtttctgcagtgttttgctttctgtctggtgaaatcttggagctgccggtcgtgttcttccagcatctgatccacttttcttggctgagccagtaatggaccggacatgtacatcttgttatcccctgaatcatactatatctccaaagagagagagagagataaagacaatgtaactgagaaatgaggaaaaaaatagtctcttgagatgacttacccaagatgggtcatttgggattttggtttgtcttttactattatccatagtgtcagctctgttgaatgttctcaattccttcctttgctgatccatcatttgttgatctgacccaacataaccgcctccttgtcctgctgagttagccctatatgaaggtattctaggggctgcattgtccttcacgtatgttaaccgactaagattccggtttttcatcatcggacctgagtgagagactcttccgcttgttggattgttgcaggtcatgtcctgcatttgtctttgtgaattacccggaacacagcttcttagataaggattctgtattggccaacaagtttttttttaagttaggattctgatggatcagagggaacaccgaaccatagcagatcgagcctttgtgttacctccacagctgttgaaagtgatggattattagcttttaccggcgggatcagttttctttcgtgtgatcgtcttgtctgagagtcttgtctctcatgcttctcctgggtgggtcgttgccttttcgcatcatcgcggattttggcatcaatctctttgctgggaggatattttggtagagaagatggatcacaagcaaacggctctgttctgaaatactgctccaaaacaactgtgtgttactaatcataatgcttgaatgaatcacaatatcaaatataagctaaacctgtacctcactctcaagagctctagctgcagagcctctccgatcgggatctatggagagtaaagcctccaaaagggaaagaacattcgttggcaagtctttaaacatctctgctacacgtcttccatatggaagagcgggtctaaatgcagctgaaggtggtagctttagtttcctccagtaatcttctgtcggtgaaccacatagcttgaagattttatgcagttgctctacctagaaaaaggttaaacttcaagtcagtttttgagattatgggaagctgagttctagatggatttaaaaattggtacctcggttttcccggccaggattggtttcccggaatatagttcacctaagatacagcctgtgctccacaaatcaaccccaacaccataatgacaagctccaagtagaagctctgggggtcgataccaaagagtcacaacacggctagttaatggaacgcagttctgtggatcgaaaaacgttgctaacccaaaatctgcaatcttcaagactccattactatcaatcagtagattagagccctttatatcacgatgcagaacaccacgactgtgacaatgatgaagcccgcttagaagttgttgcatataacatttaacctaagcagcagaagaacaagttgattgatgtctaggcaagttgatatactaagacatagtgtacgtaaagcataagtaaagggataacctgaggctctgaaaacttgataccaggtatggaagcaagtccgacgagatcatgatccatatactcaaaaaccaagtacagagaagatgaaacagaggcagtgatcaacccttctaacttaagtacattaggatgatcaagccttctcattacaataatctctctcgccataaacttaacactctctaaatcgctaagatcaaaccggactcttttgagtgcaacaatcttgttattagtaagatcacgagccttgtatacactgctatatgtaccttggccaatctgtatccacacaagaagcaaacatttgtcaaaaggagttcatcattgaatcaagtcagatcaaaaaggcgataaacacaacagcatacttactttctccaatttctcaaaggtactagcacgtcgtggagtccaattcacaagtgcctcaccagccactgagactagccaagcaggccatccagcagccaattcagcctcctttgaaacggtttcaggacttggaggaatcacaacactaggctctctcttcaactcctcaggtggatgatgatcatcatcttcatcttcatcagtatcaccaatctcagcaatctcctgatgtttctcagaaaacctacttgaactaaacttttcagattcaatcaacctaactttattcgacctatcttgttcctctttagtttggctagaatcatcaatcctcgacgaattgatccttgaagaacgcttctctaatgtttctttccatggtggattcctctttggagacttcttcttagagattatgcaacccataacaacttcttttcgatagagaagaatcaacaacaacaacagctcaaaatcctaatccctaattcatccataacaaagacaacaactttaatggctcagcgagacccaacaccatccctgaatacacacaaagcaaaaaacaaaactttgatgtcaaattcaaactcaatcaagaaagaaaactgaacccatcaacaacaacagctgaagaatccaattcatacactgtagaaccctaatacctccatagcaaaaaggcaacaactttcagagaaaacaacgatcttgatgaagaatttgaatctgatgatcaaatataaagtctttaaacacaattcaaacgcaaacccatgaaaggggaagtggaatcaagtggggaatttgaccttttttgggagagaaaatttcaagagcaagtgatgaagaaagggtaagactttaatggaagatggagagagatgtacgcaaaaataaaagtagattggattattattttctttgtttcagattggtatcatttgaccgaagaaacactgcattgacacagagaaagagatgtgtatgtaaacaatctatacatacatatatttatgcaaacagctaataacttagccgccaacgtcaacggagagagagattgagatttttctccatcacttattttctttggctaaaattactaaattcaaatctactcctttggaaaatgaatattttatattataatatgatattattgtagatgaccatatttggaaaatgaataaaatgtttaattgatttcagtattttatatagattataatattgtagatgaccatattttgttgtgcattatatgtagatgaccatatatggagaaatgttttaagtagataataataaaacaaaaaaaacaaatttagtaaatggaaataaaacaaaatgaacatttcatagttctaattttatcatttattaaacttttataggaatagtataattttatatttatttaagttttagtagaataatgaaaaaatttcataacatgttattttttttgagaaattcctcaacctactatactttcaagctttagtttttattcagaatttatattcttaattttgcccgttcaggtaactattttagatttacgatagagttattataggagataggatttgaggtttgagatttatggtttagttttgaaagttgaaagtttagttttagtcttgttgtatttttgaaaaaccaaaacttaaatgatatttttggaaaacgaaaacctaagtgtgatagttttgagaattgtcctaatttttttctggagatttaattgatcatatagtgttctatcaaaaattaatcatgtattcaaaattttacacacctataaattttgattcctacataaaagtaacatgttacaagaaaattatcctcctgtaacaacttaatgagaggtaacattatatccgattgcatttaaaaattagacaagcaatcattttttctttctatttgctactcttaatttcttgtgagtttattgtcatccaacctaactacacttatagacataaattgattgtgtctaggaattaagaaatgtcaacggacaactaggactgaaagacggtggtcgaacatgaattgttttgaatgagtaaaaattataacttttagatgtcaaaagagaaacgggtattgggatagtccactgcgtacaacggtatcagtgaaaacataatgtttaaatattgcaacactacattcagtgttagaatcgtatttgaaccacaaaaggtatccacgagaccacgagctaagtttgattgatattacgaaaaatgttaaggtagagtcgttgttatacgaaaggttagttattacatcactaaggtttacgaagagaagaattaattgagttttcggtgggcagcaacgaataaacctttgaacgctacatgcaaaagttagaaacttctttttggactataaagattgttataaagattgtttgaaatcaataaagatgatcgttcgtctttcaaatttatttaaaacattaattatacggcatacgcaattgattattattaaccttaaccatcttgaaaatcgaaattgacgacttaattttatgaactcttgatttattaatttgacggtgcgttgataaatggtaagcttcaacggtgcttgctcctggtctcgttgctatacatcctgtcatgcagcaacaacaacaacaaccaaaactacactttttgtaatcaataaaaaaactaatcgcaatttaattacaagttttgtaacccttaatacccattgttagattcatataaaaaatgtatacctataaggttaaattggatcttaaaatctatgagatgcaactataaaattgataatataaatcatttaccagtcataaaccgtaggagaattaggatgagagggtttgtcaaagacattagcaccaatctcccttgtggtcacattacttgccggatgaaatacactcctccacacatccactttccgaccagatcctggtgtcaccggagtagccggactcgctggaagagataccgatccggccactgacattccttctaaacccccacatatgtaacactccgattagaggaatgtatatatttaaatgatatgacaattagaacaatatgatatgatttaattattgactgtttcaaaatttcaccatggtaacccattcttttgggtaaatttctaattgttaaaaaagttaaaagaaataaatatcatcaactatattcaagaagaattagtggaacaaaattattcctttattcatttttccgctaatgcttactattgcttaatattttggttcacctgtggtattgttcaagctagttaagctggtggagattcgtcggagatggccacggccaccggcttcgggtcgaggaccagccacaacgtcgtcccaaaggttttcaagtacacccatttttttcttttgcttagaaagatcttcgtttcatgtctctcctataaatacctgacatgatcggtttagtttgatttgagttgttccggtttaggagattgtggagctggtctcttgcaacaatttgtccgtgtccttaggagataaatttgaagttttcaagactttcaaaatacagacatatttgttttttgggttttcttgtgtcttaatcacaatatcatgtcgtatgttcctcttttcactcgactttttagctctcaagcttcttaaaccagataaaacagaggaaacagagttttacagaagcgatagcacttgaaggctctttacttgggtatgaagaaaacagtttttaactgtcaaatattctttctgttttgttttcttcaatcatggttcttaaaatacgaatcaagcttcagactttgacaatcacatggttttctctttaaagatctatttcaaatctagaagagatgtagcaaggacataaaaagaaggcagaatggaaatttgtattacaggattgacgtatttggttctttgtttttaatccgtaattgaaagtttaattaagacatgtgaaaaaacattaatgttagtgttacacttcgagaagttgagaaagaacttgagttgatgcggcacaatctattgttcaagggtttatgagtgaagagaaaactcatggcctaacgttcgtagtgtggctataacgcagtggagcatcgtcgtggaagagataaccatcaacacattggtcactttagtacggttaggcgcgatgcaactcctagacagaaggtaggtcttattgctgctaggagtactggtcgtctcaaaggtcaagatgttgcgcttcagccgcaaaggccgactagagttaaacataaaactttaatggataagtttatactattatgcatgaaaataaatggtttgagttcataaccgtaccttattcctggttctgggaattattaagaaaaccggaataaaccgggacattccctaggtcagagacctttaagtattaaatgaagtgagaacaggtcaccaattctcgacaagatcaagtggtttgactcagcatgattaagagtctcaccatggttcgagtaattggtgtaccgtcttgacggagatgaaaacttatttggcttctcttcctcccaataagagtatctcatgggagctgaatgaacagcggataagtttcctctcccagatttggatttctataagatactaatctggacgtggctcttccctgatcttgagagttgacccacggtcgaaacaggatttggtctaaatgtctatcccagagatcatgcatttgggttagagaattgaggtaatattaattactttcttttcggttttatatatgataattgataagagtcataggctataacgatttcgaacccgacgccttctcatagggttagggttctgcctcgtgaaaagatgccacaaggcaaagttgaagagacaattggcgaagaaaggattagtgagttgtctcaaggtttgcttgtactaatattagttgcccaaatccagtaaacttgtatttaggaacataaactcatgatggaacgatgaagcgccatctttactttgaagatatctttctgatcttagcttatttttacacatcaacctcaaagccaaaggaatgtttgataaaacctttaataccctactataaaagtttctcaaacagagcttttaaaacatagaaagatgaaacaccacctatagtaaaataacaacaaaagagaaaaggtaacaagatgatcagtaaatttagaacctcttgaaatcatcatccttatttcgattttccttcgcctttttcgacaaatcttccaagcccttatcaacatcatccctagccttatccgcctcctcaccggacccaaccacagcctcagtcaccttctgagccgtgctcttcgccgtctcccacacatctttcacagtatccatagtcttctccccaatatcttgagccttttccttaaacccatgagccatgtcctctgctttctcctttgagtcctctgcatagtcctttgctttatcttttgtctcttcagctttatccgcagctctactcgctccttcattcactttatcttttgtttgttccgcataattctttgtcttctccttcacatcataagctttatctgctgctctactcgctccttcattcactttctccttagtttcttccgcaaaatcttttgtcttctctttcacatcataggctttgtctttagccttctcttttgtctcgtaagctttatcagcagctctactagctccttcattcaccttatccttggcctcttctgcgtaatctttcgtcttctctttcacatcataggctttgtccttggccttctctttcgtctcataggctttatcagctgctctgcttgctccttcattcactttattcttagtttgttcagcataatctttcgttctctctttcatatcgtaagctttgtccttagcttcctcttttgtcttgtgggctttccctttacctgcttctgcgtattctcctgattcttctctccattttttcgaatcatatgccaagtcggccctcgagtctctcgctttctctactggatcatatcttccctgaaaatcaacaaccattgatatctcttcacacatattgacctaataccagcttattgaattaacaagtgtcacaaaccgttaaagagtcttgtaaaaatcttatatcaaaaacaaatatcatactcattgatcatttttcaaagttcagattccacttgatttcttgtcaaacacgttagcttaataccatattgctaaattcaccatccaaattatcacacggaaaaaaactccacatattataaatagatacaaactttttatttttaaaaataaagatcccacttcacatatacacaaaacaatttccttctttttttatataattaaataaaatagttttgaatatcaagatcatttgtgaatcaactagttaatttacacacaagcataaaaaccggttatgcatcaatctgtattgatgaccatatattaattaccttagaatggttaaccgacgatgcaaaaaagacacgagagcttttccgaccaatcgctaccgcaagagttctaggagcttggcttttagggaaagccttcgagatcccgaagaaaaccgttctcgttaactgcatagccgccatattaatcaatcacaaaaacaatttcttcttcttcttcttcttctgcttaatttagctttacaaaatctagttttctgaagttttggatccgtaatctctcggcttgcattatctatgttgcgaacttatagaagccatttgggacagctggcagtacgaattcgacacgtgttgatgttgtaacacgtgttaaccaagtgataactaaactactatggtgtgttatcgaacaaatctggtgtcttatgtcgagtagggaccgtgggattagatggacgattctcaagatcgacggctgtaggcaacaaatgggagaatgcgaaattccctcatggtcaggattttttagaaatatatacattaacgttttaaaactttgataaagagacacgataatggataaaagtagcatagggggattctacacataaacttgcatgttctaaacagagaaaaaaaacaacattcgaagttatccttctatgatagaagttctatcatcaaaaatttatgaattaaatgacatttttctagtgttggttcaagtatctcgctctggttgcgcttcccaattgtacacatgaaaaagtgttatgattacgatgttattatatgattacgatgttattattctgcatttgtttcccataggaaataacccgactctagagtataaacgctaaagtactaaaccgaacccaacccaaagttttaaaatattcgaatggggtttagaaaactagagtccaacacaaacacaaaccgaatatttgatctctcatgcttaattttgattgcaggatatatatatgtaggttactttggttactaggaaaagaaaaaaaaaagtcattgtacgtgagccaaaatgaaatttccataagggtaatttgcaggccacaccctttgaccatgttttattttcaaggattggcaaagtgaaaggtggttttcacgttttgtcttttcagctgaaatttgaccattttgcccttactgctgcagtagagaaactgttgaatgtacggtttatttagtcaggtttagttaggtacactattccggtttagttataatattataaaattattgataataattggtgagttaaagatgaacccaggaacaaacattaattgcgaacaaacattgatgctcaagaagtgttgatcttttttatttacgaagtttggagtcaagataagcattatcgtgtaagtaatgaagttttaaagaatttttttgttataacatactatgatcttcattgtgttcaaaatcaactttgttttttatagaaaaacccagaaatattttattttcaattttgttggttgaaaatgataaatgtgtaaatacttatgtttataagtgtgtatatcgaaattctatttgtttttgtagatataatcatgttttcagttgcatttactcggtttctcatgaatttatgatgttgttgggtaatggatattcccgtatttattatggtcggtgaggggagatgcaaagaagaagaatagaaatttaaactaaagaaagacatgtttggtcgctgtgtacgtgttacggaaaacatgacgtacacggaatttgtacgtacactaagcgaggctttcagtttgaagtccacagagatcaatcccataattagttactggatgcccagagagatgttagtgatgatagatactaaacgccctcctgtctacattgacagtcaagtggagttgaatacgttctttatgattcgtggtaggtatccttctctcaacttgtttgtctctttcattacaaccgtcaagacactcaggaataatgtctctagggctcatgatgatgatgctgaaagtgaccgtgtttcaaatgttgatgaaaataatgaggccgtagatgagcaagacgacgttgaagacgataaaacagatgaggatgaagaggagggggacaacgaagatggtgatgggtatgatgattatcagggtgacgatggatctatggggggaagtaccctcgatcctactaatgatggtagtgaaagttgtggcgaagattatgattacgacaagtggaacgatgtaattgtagaagaatatggaatagggaatgttgaggagaacgtcattctcacaccaggggaattcagtcgtctgttggcagagtgtacgtacacaagtcagcgtgtacctggcggagataacatttctcactcgggtgaccgtacaccagatgtgactccaagaagtatgtgtcaacatcgtttgtaccaatgtacgtacactatagattgagaagtgtttttaagaacagaaaatcatacaacaaacaatgtcttatctcagtcactgccaatattggtttaatattgtatcaataaatttttcttagtaaatttaattcacaaacaaagatgtacgtatattattacacatgtacatacattaatttaccaacaaaaatgtacgtacattatttcaccatctatttttatttaattattatgtatatattgagattattgagatataagaatacgtaataaaatagtttgagttattagaaatcgtcccatatacgttccaataaataatttcgtgtacgtacactgtaaattgaatatacgtacacagaaaaaattcgatgaagggtataattgtaattttccagtcatcttcaacctgtgtatccttttctacaaacctaattttgcggccgtctttatcagttttctcaaaatctcatttttgtttacgttttgattactatttataaataaatcttgtaaacctaaagtgtttgaatctatgagctatctttagtttaaaaagctaaagtgtttgaatctatgagcttttttttttgcattttgttcatctctgaaaacaagaaatttgttcctcaattttggagttcaatggagagatgtcaaaatatgaaggagtgaataatgaattttgaacttctttctacttctctctcgaatttctccgtctctttctctttttcttcttcttcgatttctttgtttcagtttttttttttttttttttcaaaactgaaccacaaaatctaaaccgaaatcaagtgctgtgtggtttgcttgctcccataaagggtattttgatctgaaaacaactgaaaagacaaacgatgaaaaccatatctcattttgacaaaccatgagagcaattcttttttcatccacttatgtgaaaatttctttttccataaagccactaaggaaatggcaaatttacttcgtctttttttttttggtgtgtataactcttttttattcagtagttcccttatataattgagtaaaagttaaaatccaagtaaaaagatcccttacttggtagacacgcgactatcattttttccacacgtaaaaggaaaaacatattcaatgtttttacttgataagaaaaagaaagaaaaaaacttcttctacttcgccttggaagcacaacaatggcgtctcttttcgcaatcggtttctccaaattttctccacaacccacttccgattattccaaattactaaaagtgtttcatccaaaaccctattccttgaaatttctatttctcaaaaccctaaatcctactaggtttttcaaagtcagagccaatgatggaaccgaaccatctgataaacttcaacagtatttccagaatcaagattacgataagaaatacggattccttgaaaacatcgattccttcacaatccctaaaggtttatctgaagaaacgattcgcttgatatcgaagttgaaaaaggaaccagcttggattcttgagtataggctcaaagcttatgctaagtttctaaaattagaagaacctaaatggtcagataataggtaccctttgcttgatctccaagatatgtgtttttactctgctcctaaaaagaaaccaactttgaatagttcagatatagctgatgaagctgatgatcctaagcttcttgaggaatttgatagattagatgttcctttaacaaagaagaagaaatgttcacctaaagttgcggttgatgcggtttataatagtgaatcgatagctattactaataaggagcctctagagaagtcaggtgtgatcttctgttcgatatccgaagctataaggaagtatccggatttgatcaagaagtatttaggaagagttgtgcctagtgatgataactactacgcggctttgaataccgcggttttcagcgatggatcgttctgttatataccgaaaaacactagatgtccgatgcctctttcgagttattttcggatgaattctattgaaaacactggtcagtttgaaagaactttgattgttgctgaggaaggtagttttgttgagtattcagaaggatgcactgctatttctcatgacaagaatcagcttcacgctgctgttgttgagctctattgcgctgaaggagcggagattaagtactcgacggtgcagaattgatatgcaggggatgaacaaggtaaaggtgggatttacaatttcgtcacaaagcgtggtctctgcgctggtgatcgttccaagatctcatggactcaagttgagaaagggttcgcgataacttggaagtatccaagcgtggttttagaaggagatgattccgttggagagttttaatccgtatcattgactaataactaccagcaagctgatacatggaccaatccagagctgagaacgctagaaatacttcgacttgtgactcgatgcttattggtgacaatgcagccgctaatacatatccttacatacaggtactttgtatatgatcatctaaccttttattataaggttatgataaaagcacctctaatgaagatcttataacaggtaaagaatccatcggcgagaatagagcatgaagcaagtacttcaaagattggagaagatcagattttctattttcaacagagaggtatcgatcatgagagagcattagcggcaatgatctctggattttgcagagatgttttcaacaagttgcctaatgaatttggagccgaagttaaccagcttttgagcattaagcttgaaggatcagtgggttaaacaaatctcacaattacttaacattaaagaaagctttacttgtgcccaacaaactgctaacaattttaggctttcaataattaattttggcttgagaaaactgatatataaacacttgagaaaaagcatattctcgatcagaaaagagtctcacgaataatcaaagatgctactgttctctaatgccggaatatcaatgaccaagcacctaccacagtgatgaccttttaagttcaaagagttaattcaaaaacaaccaagaaagcatgaaccaacattttggaacataaatagtctatgaaaaagtgaacaagctttcgaacattttttaaaagtaactcaaaacaacacgacttgaaatatacccatatcatcaaaatcaggcttcaacttcggatttcttatcctctacagctacattagtagaggaaaccccattagtctctgctcctgcatcagtgttctcctcaggtggctgaacctgttcatcttcagggagtggctcctccacataatcattgtcaaatgcatcagccggaacttcgtaaatcctaacttgaggcttcgatggatccttcactagaacatactttccttcacttaacttcatacacagatcaacaatcgacttcacaattccccacatattgttagtgttcagattgatctgcccagcgaaatctttcggcttataccccaaaaccgataatataacatggttaaaatgatcacgaggatgaaccctcgaaacaaacccaatcttcatcatatccgcattagccaagagagcctgcgcagtccatttagctaacttattaccattgttcttcaactcattagctaaaaccgcacctctctgagtctcaagcttctgtctccaatcaacaccagagtacttaggatcaaactcgttaagagcattcaaagttaaaaacgatctctggttattcaaatcaacagtgctctgtaactcacacctagcaactagatacatactatcatcaagcttccatctcctatacctataagcaatagaagcattctcttcaccttcattaacattaggaattggctcatcaaaagtttcccttttcccattcttaaccaaaacctgctgagcaaaattctgattaatataagcagcctccagacctagagaatgagcagagttaatatcatctttaccctcaggcaaaggctcttgagaagtctcatgaacagataacaaatcaagcggtgacccatctctcttatcaaagaaaagcttattcccaacacgttgaatcacaagatcccatgaataaaccgatctaggagcacacataagagcagctagaatagcatcagtagcaaaaacagtagctttatcttctttagcaagacgtctgatcacaagatcatcacttgtagtaaccttaaagcttctgttcttgaaacgctcaagtctacgatcagctttaggagtaatacgatcaaaactccgatcataagactcaagtccaccacaaagaagaagatcttcaggttcagaaactgtaaacgaaagcttagagaaagtcgaaaacggaatctgctcaagcatattccattccggttgaatatcaactgatgatttaaacgcggcggcttcacggcgttgctgatgaatattgttacgattgttattgtagagacgatcacgacgagctcgatctttctcagcttcacgtttcttagcttcaacttcttcatcacgacgttgaggaagctgatttcggttatggtattgattgaatctccatttaggtccgaatttaggacgcggcggtggttttccgtcgactaatcggaaagcggcgtcttcgtcggcgtttccacctgagtttgttagaccaaatccttcatctactgcaaaagctgagaaatcgaagatcgctgatggatctgatttggatccggtgtgaggacgagctgatggatttgagagagctcgagtccaatcagcaacgcgtccgagtttttcggatcgtgagaaggaagcgaaggggacgtttgggaggagattcgccgccgcgacgctggtggaggaagtgtcggaagcatctggtggtccccaaccatcggaattgaatgggactgtgccgacttcgaatgcttcaaacaccattgttgagatttgcgaagaagatgtgcgcaagtgaaaaatttgtattttattttgtcaacaatgaaaaccctagcccttaatgggcctcaatgggcttttctcttgtcataagaaactctagcccttttaagcccattattatctcactcagtcaaaaggacgtcggtttaagctaaccaatgcttttggtttgggctatattctctcaatcgaaattttgggttatattcaaccgtacatttattaaggaattaagaaaccggcttagaaccggttcatgatctgttaaccaataactgaacgttgcacttcaattcaaaagtttacgaatttgtactcgtcgcaaaacttattttatttagatccttgtttttatatccatgtctcacttctttcccctaagtttttcattggttacttaaggtccaactatataaagacttttttactctcttctcttcttcagagaaaattcaaaaagaatctccaattttctcgggaaaatttctccattagtctcttctcttttccggcttggaatcgctttgcttcttaatctttaacaaacacgttccatagaaccccaaaaatttgatcatcggaaacattttctcggggaagtaaagaagattttcccgagaaaagaagattctcactatgcggcgtcgtgagagccgtggtgctaagggaggaggtttcttgactccaccaccgtcatggcacacgacgagaagagtttacattgcgatgccgatttcggagaggaaaagatcacctttgatcgagaatcaagaatcgtttagggttcgtactggtgattctccttacgtcagagccaaacatgctcaggtaatatcaatatagggtttttagtgaattgtattggtttatgtgtatgaacgtttgttcttgacatggaattgttttcaataacagttggtttctaaagacccgaatcgagctatctcgttgttttgggcggcgattaatgctggagatagagttgatagtgcattgaaggacatggtagttgttttaaaacagttgaaccgattcgatgaaggaatcgaagctatcaagtcttttcgatatctctgcccttttgaatctcaagattctattgataacttgttacttgaactctacatggtaaaactttctcagtatgactaattgtgaagctatttctatgctcagtatgtgattttgatggattttggttttgcagaagtctgggaggattacagaggtcgctgagctgcttgaacacaaactgagaacacttgaacaagacaaacattatggtggcaggatcaaaatagcgaaaagaagccatgaggagcagaataacaagacaatcgagcaagagaaagcacggcaagacaatctcccatctccgctttatacctgaaagagtagtttctctgactttcttggtgtttggatatgtaggattctagggaacttagcttgggttcacttacagcttcataactatggaattgcagagcagtattacaggtttgtgaaacaccatcaatcccattaagaatgttagttttatcattgccttaacaagtgaaatgggttttactgtgataggaatgctttgtctttggaacctgacaataacaagttgtgcaatcttgcaatctgtttgatacgtatggaaagaacccatgaagctaaatctctgcttgaggatgtaaaacagtctctagggaatcaatggaagaatgaaccgttttgcaagtcttttgaacgggctactgagatgttagcagaaagagaacaagcaacagtagcggataaaccagaagatttgctgacaagtagcttttcagataacttctcttcgagatgttcaggtgggatgaaaggaaagaaggctctagctggaactagcactgaactgggtaatattcacaagacaaactcgcatgcttcctctgaatcggttgaacaaaactcaccaggtctgactacacaaccccgggaatgtaaatgggtagatgaggaagtagatcagagtaaatgggatgcgacaattggtgcttctcgaaagctcaggttctggacagttggtcctgttcgtagtctaagattcggtaatgattatcagaagaacttgaagagtgtaggaacagcagcctcgactactaatgacgaactgcatcaattcatcagtagtgatgcagattgcatgacaagcaaagcaaggaagctgtgtccagaattgatcaaagataaggaagataacgaaaaagaaagtgaaagaattgcttcagaatcttcttcagcttacgctaagatcacagacattggtcaaagaaaggttcttcacattgatcaaagaaaggttcgtcacattggtcaaagaagtgtttaggctagacattgctacactaattgatgtatagattgaacaaatgcagaaatgaatttttggaccagtgttatagagttgcttgaaactgaaatttatttttcgtgtatggctttatctcctgaaatgaaagctccgagcgaaatgcaacacaaaacttaagagaacaaaagcaatatttttttcaccgacaaaaacaataagcaatacacgcaaaagtttaacaaatccagaaccgatatagggtttcaataacaaaaacgaacacacatgaacgaaacaataaaagagatattacgaagaaaaaaattcaggataaggggaaagaagaaagtgaatgctgcttgcttacacagcttacgaatccgagggagccattgacaacatcttaagtctcgtactcctcttcttcctcctcgtactcttcctctccggctgtagcatcttggtactgctggtactctgcgacaagatcattcatgttactctctgcttcagtgaactccatctcgtccatgccttctcctgtgtaccaatgaaggaaagcctttctcctgaacatagctgtgaactgttcgctcacacgcctaaacatctcctggattgaggttgagttaccaatgaaagtagacgccattttcaaaccctttggtgcaatatcacagacactggacttgacgttgtttgggatccattccacaaagtaggatgagttcttgttctgaatgttcatcatctgctcgtcaacctctttggtgctcagctttccacggaacacagcggatgcagtcaagtaacgtccatgacgagggtcagcagcacacatcatgttctttgcatcccacatctgctgggtcagttcaggaacactcaaggcactgtattgctgtgatcctctcgatgtcaatggtgcgaaaccaaccatgaagaagtgaagccttgggaatgggataaggttcacagcgagtttcctaaggtcagagttaagctggccagggaaacgaagacagcaagtgacaccactcattgtagcagagatgagatggttaagatcaccaactaatgaaaacacaaaatacacaaaaacaagtcaggactcaatcacactacatgaatacacaagctgcaaatggagaaatgtactcacaggtaggattagcgagcttgagggtacggaaacagatatcgtagagagcctcattgtccaaaaccatacactcgtcagcgttttcgacaagctgatgcacagagagagttgcattgtatggctcaacaacagtgtcagagaccttaggagaaggaaacactgagaaagtcatcatcatacgatctggatactcttctcttatcttagaaatcaatagagttcccattccagatccagttcctcctcccaatgaatgacacacttggaaacctaaatccaaacaacaaaaaccatacacatcacaaaatgtacataatcaacaaagacctaaatcgattgtaatcattctcgttccacgattcaaaaactcagatccagattcaaaaaaattgttcctaaccttgaagacaatcgctgttctcagcttccttcctcacaacatcgagaacagaatcaatcaactcagcaccttcggtgtaatgacctttcgcccagttatttccggcaccagattgaccaaagacgaagttatcaggacggaaaatctgaccgaacggaccagatctgagagaatccatggtaccaggctccagatccataagaacagcgcgaggaacgtactttccaccgctagcttcgttgaaatagacatcgatacgttcaagctgtaacggagaatcgccgacgtattgaccggtgtgatcaatgccgtgttcgtcgcagatcacttcccagaactttgctccgatctggtttccacattgaccgccttggatatgaaggatctctctcattttttttttttttggtttcttcgtcaagagcaaaaaaaaaatgagaagaaaatgggcgactcttttttttttttcttgtccttggctttgaataggtttaaaaagagggatttgttgaataggtaataatcagctatatatagtttacgtcttcttcaataagttttctaaaatagttattttcaaattggtccttatagtttgttttatcttgtacattgtaacatgatagttttagataatttgtttttgtactctgcgctgtatgacagcggaggatttcaaaatatatctgtactgtcccacttgtcttgaagatatttttactatttaagtttatttttaataacaagaatagaataatcatattcggtaatagtacaaagaaaattagttttttttgccgtttatagaaattataacataatgacaaattacattatttttgaaaattgaaaatttattgaagggagagattcattctagttaatttgaatagtattcgactcaggatctgctaaaccggttttggatacaacgattatgcataattaaacaagttttgactacagagatcatatagttgggccctctcgatagttgaaaaaggcccattacttttagtatagcaaaacaaatattatgaagcgtctctaaatgatctaatacacacattaaaattttcaaaatgttttatcacactctccttcactgatttgttctcaggggcggtccctactaaggccggaacaaacataagttgggacctctcaataatttaaaaaggcccatcattttcagcaagaatgatctaaattaattaagagttaagacctacatcttcctcttccgcctccaactttttagtgttcttttttcttctgaagccctagtttctctagttttactctacaacgaacgagtctctagggtttaaacttttagtgtatccactatggaaattcactgcaaaaaaacgtctttgagaatcatctaaccgttaccttacgcgacacgcgaccaaagagcttagagaataaaaaagaaaactcattacatattccaattgatctcattatcgagatattctcgaagttgccatttaagtctatagctacatgtcgatgtgtatcgaagcattgggcatccatacttcgtcctccagatttggctcgcccgcagctattgtttgcctacgtaaaagacaagaagttgctctttttctcgtcacctcaacctcagaatccgaatgagaagttgcctcctcttgtcgccagttatcatatgagttttcgtcctcttgatatgtataactataaaatttgtaatcatgtcaatagtttgatccttctaaagaatagaaggaaggaaaagaaggaagtggtgcaggtgatatgtaaccctagcacaggacattcgtaagcttacccaaagtggaaacgagtagtgattggatgataagctatttagggtatgatcctgttgagaaacaatacaaggtattgacatggtttgatggttttgaagagtatcaagttctcacattaggaattggagaaccgtcatggagaaacatcaaatgctgcagaccccatttacattatcctttgtataaagggatatgcattaacggtgttttgtattacgtaggtacagtcactgggttgttaaaggatttcatggtcgtttgctttgatgttaagtatgagaacttcagattcgttgaagaaggtttggaaaccttcattagaaaggttatggaaccctaataaactacaatggtaaattagctacagttatgtccaatacgtcgtctatatttatttatagatcaagtgagagtattgaattttgggttctagaagatgtcgataagcaagaatggtcaaagcatatacatgtgtattgccagctttggggcataatgtgataggggatgcttacttacgccttgttggagtgactcagagaaatgaaattgtgttggcgacgtgctatgctgtgcctttctacctcttctactacaatatggagagaaagacaatcataagacttcaaatccaaggaatggaagtttttccttaaaaaatagttaatatctttctaaaccatatagaggacgtgaagctttggtaagtgatgtaattaggacttgagatttttgtaataaaactagtttggctctaggttggatcatatttaattatttctaatgatttcttaagctcttattaatgatgtgcgcttgagactttttctttacactatataagagtgatacaagaattcaatcagcgaaggaggtgaaacaatagacttgaatatttgatacaatgattgagtatggtgaagatcatactatatataaagatcccaacatggagtgatcactggtgatgtacctcatgcatgtgttatatataactgtcattaattaattgatagaggtaaatttttctgcatctctttttgttttgttttctatttataataaggaaattggaaccactactagttcctacaagcatggaagcaaagtgcattacatggagttaagggaaataaacgtgaatgactctttgttccaattggttctcggtgatttgcagaagcaaaataagaaataataattggttaattctatttcttatatattagtacagtttggtcgttggtttagcacttgaccaattgttgactcatcattaatcttgttggataattgtttcacctaatttactcttttactgtgagcaatggttgttctaataagttaagatttgagataccacacacatagaacctctttagaactagccatattaattgctggtatgagaggtggatatgttgatgatgatgcgtgctgttagatgccgaatccaaaaaaaatatagtaaataattgcagtttgtaactaattattaaacaaaattgacaattgtttaaacgtgataaatccaatgcttggttttaaaacattttggtgctggaaaattgtgtttaagaaaaacttatcctacttacaatttgcaaattataactagctagttttgatatcgacctttatcgaataatctaaactttgtaaaataaatggcttacaggttcatgccaacccataaaaattgcttataatagattccatttaaatgagatcaaagtcactaatttagatttctatatactcttaatattctaaattaaatcatttaaaaataaattaatagatctttaacgtactcctttaaacttctaaaagatttttccaaaattttcaaacatataaagtaacaaaaaagctaaatttccttttataatcaaatttttaatcggttttaactttaaaactttaaaataattaatttatatttctctctttccgttttctcgacaattactcatcatttagctcgtgttttaaaaaacaacactaaacaaaaacaaagtgatctctcaccttcactttctgcgctccttcttcttcactcctatatatttaaaatgcttcgacctttgtcactcagaaacttcatcaatctctcttccaacaaaaaccctaaccctaattctctcaagacaactcaaaggtctctccttttttaggtttattatcacttccgtataatcgccatgtcttctctaccatggaaaaaaccaaaatcgagtcgaatcttaagattcatttctgagtttcaacaatcaccgttcgttgaaactggctttccaacttctctgatcgatctcttcttcaagaatcgcgatcgtctaaaaaaatctccatctaaacgcttccaacgaatcgaacgccagattcgaaccgctccaaacgcttcttcgttgagtaatcaagatacgatttttgaaaagccctcgaggattaaaaccgttcgaagtaaggtcgagaaagttaattgcgttaaaggtaaatcagcggcgttgaagaagaacgcgattaaaaatagcgttttcggcggtagcggtgaggtcgttttgatggcgtttaaggttttgatagtagcgttgctcgccttgagcacgaagaagaagctcactttaggaatcactctctctgccttcgctcttctcttaacagagctcgtggcggcgcgtgttttcacgcgctctaataacaccgacaaagacaaaaacgcgattgcccgcgagaaaatcgaaacttttgatgaaactcgagttcccaaagcgattccatgtcctgaggaaacagagcatgtagtatctgaaacagaggtttcgaagttgaaaggtttaacgatacgtgatctgttgtcaaaggacgagaaatcaacaagtaaaagttggagactaaaatcgaagattgtgaagaagttgaggagttacaataagaaggataagaagacgatgaagatcaaagaagagtctttgattgaagtctcgagtttggttttagaagataaaccaaagaaaattgagtctgagagagacgaagaagaaacgttgaatcctccagtggttggatcaaacctgaatgggattgttctgatcgtgattgtgctaaccggtttgttatgtgggaaggtcttagctattgttctgacactatcatgtttggttcttagattaggagcagtcaaaaaagttaatctttgcatataattttttttgtattttttaacatgcttgcatgtgaaactgtaaatttttctcattcatatgaaggagattggattgaatgttgaatactttcccaaattattcacaatcttaagttttaacgaaatgaaataaagaatattagtaataatttaaacacaaaccgaaatatatttttgcttttggcgttttcatttatacttttacaaaagtattatcttttgaacaactaaaactattttatgtttataaagtatgatttacttttcttaaaaagtgtttttcttttttcatataagagcagaaattgctattgaaacaaatcaaagtttgtaatgaatgatctagaggttagtgctagtttcgatggatttgagctagatgtttctaatctaatgtttaggaatcttttccacttgttttgtatataactctctttttggtgattaattaagttaacatttcatttttgaaaaaagtttggtgaaagtgttgttttggaatatatattaacaccaaaagaaattgttaggtaacgtattagtattatttcagaagtgcttgtagtaggtaagtgaaagacgattaggtttcactcagctaaatagcagtggaatgtgaaaatagtgatggtaggttttgtagcaatattaattaaaagacatggcaattattaacgaacaaaaagtaaccaattaggttcctgtcagccaattagccaataaaacggttaagttaagcctagttaacttgtgttaaaaagtttggagatctcactttgattggagatcaagaccaaattgttagtgttgtgctaattgtaaagttgtaatgattatgtcaaatgtgatttggtaagagatgggtttgctagttgtgataaaatacataatttgggaaatagcaaattaaccaatcaaaatctgagtactacacttgaaatggtttttctttttttaattattatacttttgaaggtttaattttttttttttgttttgttatgtatctatacttttaatcgcgattcgtgaaattctaaaagaatagtataactaagaaagtgtaatctattcaaaataatttttaatttctaacgcttacaaataaaatatagtagattgttgaatcatctttataagaaacatgaaaacataagatgattgttgtgaataataatagacaaagaaatcaaatcaagcttttggaaaaggtgaatatatatttactgtaaagcttgattaataaaacaatgaaatacgactaagaaaggtgtcggacaaagagagtgtctttggtttttgattcgatagatcttttacctaattcaaaattaacttagtggcaaagcctccattgttgggtttttcttattttattgttacatacttttgttttcttttttgggagaattactgtaatagagtataaattaggtgttattatcagacagaacttttttttaatcctgttatattttcgtccttttcttattacccatcgtgctcttactaaacgttaccggaaaaaatgtaattacaaggaatgtcactgctacgtcagaaattgctgacgtggattaaatgaactcagccgtaacgcgatatagcggcagtcacggctgagttacggtatgttgcggctgacttacgacaaaaatatatgagtcataccaaaacgacgaagtatgagtataactcagccagacgttacggctgatatataaaatgttgtctgagttatacgataactcagacaacggtatgactgagttaaggaatgttgtccgagttataacaaacttatagcataacccagacaatgttatggctgagttatgagaaaacggctgacttatttcctcgacacggctgagttatatttttggacggcttagttataggatgatgtgacggctgagttatgatcgagtgttataaatcagccgtaaagagcatgattactaaataactcagccttgtgacgactgacttatgtgcaaaagattaattactataatagcatgcagttacggctgagtttttaaacgttacggctgagttagttgagttatgacataacacggctgacttaactttgtttttttcctgtttttaattactgtaatagtattcatgttgcgactgacttatagatttgtttgatggctgagttatcaaatgttcgtttggtggcttagttgtcaccccatcaattcaaaacgacatcggctgtaatattccatgtcatcattccatgtcagcatcatcaaagggcaaaaaaataaaaccaaattttttcaactcgtcttcttcacctgagtttttcacatcactggaacttctaattcctcatcgttttcctcatttttcttcaatttcttacatccttctcccgatatagttgatccggttccggtaattgttgtttttaggaattgggtataaaaacacaaatatatatttaacaccgatgaaagagggtgtagacttgtgcagatagatgcggaaacaacacacgacaaacttgtgaagttggtgctcgatgaaaaagttagatgaaatgctgcatctcttattgtttcgcgacaaatttacatgtcacggctgagttatatgcttaagggaagacgaaaggttcagtcaatttacatgtcacgactgagttatatgttccagaaaagacgaaagattcgataaaattacattacaacagagttatatgcttaagggagaacgaaagattcagtcaatttacatgtcacggctgaattatatgttccagggaagacgaaaagttcggtaaaattacattacgggtgagttatatgttcaagggcaaacgaaagatgagtgtatattatatgttacggctcagttatatgcttcagggaagacgaaatgtttgataaattacatgtcatggctgagttatcattcagggaagacgaaaggttgtgtaaattatgttacggctgagttacatcaaattatggttcagttacattacgttacggctgagttacatcactttacggctgatttataatatagattggaaaacaacatttttctggggaagacaatataaaatttattggccaaataacaacaatcaaattaagaaacgtaagaatatgtttgagggatacataggaggaagacgaaaccgtatgaatcaaaacgttgatagaagtagaaatatctctaaatagatcgattgagagaaaaattaaacgagagacatataaaatcaaagtaaaagagtagctattcttgattcaacttaaacctgcaacgaatcatacaaaattccatacatctctttgatttgggttttgatttttgatgacttgaaattcgacaccaccgaaggagtttcggccggaagaaacgagataagtagagaacggcgacgaaattaggttccgtcgactgaacaagagaagagagtgacgtttttttttttttttttttttttgcgcggatgaacagtgaaatatgctgaaaaaatgagaaatcgaaagttttaagggaatttttggtttcggatgacgtggattaggttaaatgacatggattggtgacatggataatcattgttttttatttattttttagttaaaaacaaatttaataataatatttaattaaaactaataaaggatgttaactgtaattacacaagtatcgaaaacatgtgagtaataaaaaaaagatatgttttattttaagaataaacatacaattgtgttctatcttaggaattagttcttcttttttttggctatcactaagttttagtcatgtcaaaattgtttagatcttgttttttattttttttaaacaatcatagatctttctatcaaatttatataaatatctttcaaacatatgtatttactttgaaccaacactacagtaaataacgtaacaaactaatatttgtgcttacatgtgtgcatgtaatatgatggtgataaatgatactaaactctttttcacgtggtcacgttttgaaaaggtgatttcgccatttcatcaaatttttacgtttctgaaaaatggttcagctatatgctataaatatgttaaaaatataactcaaaaaacgcctattaatataatactagctgtttagtattttcgtgattatttctcataaaacttattgagttatatatgtttatttcgtttatctaaaattcgacaattttgttactatactattcagctgatattgtaaagggattcgtgacattcgtgtccttctctgcgtatggcaatatcagggtcttgtaaagatatttaagtggtacatttgcataagatattttctattgtttgggcctgatgagcataataactgtaacaatagaaaatatagattcttcttcttaattatatccaatggttaacgatataattaagatctaaatgtcattttttttttgttaaaggctttagatctaaatgtctttacctacttgtaacttttgtctcttagttttgaattgctaattaatatgctttcgattgatatagttttgagttaaattgattaacaatattcatgaggtcgtttattgttgtgattgtaaatttcttgtcaagagtgtatttgttgaaacattgattatggacaacaaaatcacttgctccaaaaagtaaaacgtgataatcgagttatactagttagcgttaggattaatgagaagaacaaagtcaaaagatagataagctaaaccaataatagctcatgcgtgaatatgaaatctgtcggacgtgtttataggagattaaatataatgatcaacgaatgtctaataaagtagccacgcataattggttcttttactatatacatctttcttccacaaaagcgacaacgatgctaaattaagcatttacttgtgccaagattcgtatttatatagtttaacaatgatgataaagatgggtttaaatgggacagtaataacccaaatgacattagtgcaataagaaacgaagcaaaaaggtcgtctaactaaatatggttggtttttcactcaaatatgttcgggctaagtaaaatatgaaataaaatatgtttagtgtaataacctctagaaattaatactctacaaattaatagttcgataaattaatattttcggtcctaaattagatttttggctcaattttttttatcaataaattcagggacggatctatgtacaggaaaggtagggaacgtgccccagacaaatttattaatttgataaaataccgatatcaaataaaatgtttctaatagttagttgaaggtgccccatgctaatattcagtcccacagctcgattgcctcatagtggctctttttggataatttttaaaataattttattatgatttatattttgtaccccatgtagaaatatgttctggaaccgctactagataaattaataacgtcaaattaataaaatgttacagtcccgacgttattaatttatagaagttttcttgtaatttcttgatatgtaaaagcatacaagagtgtatacttagtttgtaatgtttttggacgccataaaatcttaacattgttaagatttgagaacccttgttaaaaaaaaactacaacttgtataaaatggcgaatgatttgttatttgtactaatatctgaaagataaatgagaaatggaaagatagtattttattgctttcaatttaggttttcgattacaatcgcaatgctcatatatagagctacaatatttaacctagagtatctttaacttgttgagctgtcttttaactctcacgtgacgtcgacacaagattcaagagcctcaaaacgatttttcatgtttacctccctacgtcatgacgataaggaatgcgcttccaatcctctgtttttgtcttgacttgcaggtgaccatttgcattgggctcagctcagctgccaattgctttggtttgagctttattgtctaagagcccatttgcattttgatgtcgttttgagctgtagagttgactatatcgacattgtattactattcaggtttaaactttaaactcgtaacggtagaatgtatatcattaaaaaaattcaaaaaaagatacatcaatgatcatgaaattagaacattattaatataaatgaaaacgatgtttagcttggagggctaaaaatcatgatttgagtttgtaaatttgtatgttccaacttccacgttatcggtttcattcagaagtcagaagtttgaaatcgttaattgatcgttgtgtaggttacaaagaaggagaaaaatcaaaacgatatttataatgagaattatgagataacaccacacaacacggtcactttcacactgacgttacatgaggacaacacaatatctatagagccataaaagtccaagaacataagcacacaaacattggttttgtctaagaatcaaatcttagttttctcttagacaatcaaaggaggaacactttgttcattcctgaagaaattggttggatcaatcttccctttaacaatagccaatctcttgaaattacttccaaaatacctaaacccccataatttcgcatcttcaaagctcgtattaactcctctgttcatacctaaatcaagatctcggtaattcaaataagctcctcttggcgatgcagagacataaactctcatatacctataaagcaatctcatccatgtcacatgtttctccatcactccaatgtccttcaatctccatttaaccatatactggatattatatagattccctcttctatgtgggaatggagtctctgtttcaccaatctcatacattttaccacctaatggctccattatcattatcggagattcgacctcgtgaaacctcgtccatataccttctagaccgatttcaggaatagggttcttgacaaaatcagatttggctttgaaatacagatcattgtatctttgtcctcgatccagaagagtctctagtggttgtcctttcttccagttgaagtacattattgaatcgatccaggtcatttccgaacagtcttgaaacgttaaccctaattccggaaacttctgattcatcagaggaattagtttatcgattcctccaagataatttgcttggaatgtagtttgaactgatcctccggaaatggaaacgatgactcggatgaagagattatcgtcaagctctgctgcaatttgctgccatctatgaacaattttcgtcatgttctgtgtcaacggtaggttccttctgaagcacgtaaccttttctggaaccctaactagcttcactttccatgaaagtacaacaccaaagctagctgctccacctcctctaatggcccagaacaaatcttctcccatttctctcctactgttgtagatcctcccatttgcgtctacaaaacgcgcgtccacaacgttatctgcagctaaaccatgtttcctcatcattgcaccaaaccctcctccgctaaaatgacctccaactccaacactagggcatgttcctgcagggaagccatggatcttacttgatttggcaattttatagtaaagctcaccgatagtggcaccggctccaacccaagctgtttcatctgccaggttgatctcgatcgatcgaacattaacgagatcgagtatgatgaaaggcgagtgtaatgagagataagaaaggccttcatagtcatgaccaccgcttttggttcttactttcaccccaagtttcctgctacagagtaatgatctctggatttcagtatcagttcttggtgtaacgatcagaatcggcttctggcttgtgaaattcaaggtcagaaatctgtagttttgtgatattaaagactgcgagaaatcggtgtagactcttgaatctggtttgtggatgaagcttttagggtttatgaagctggaatcagaatgtgtcgacatgcaactcagaaattgatctttactaggagaagaactagagtcagaattgacccattttactaagaagacaagaaacagggacagagcaaaagcttcaagtgttctcatctttagtgttttgcttttcttgtgtttaaagttacagagatatagcatttgttcttgttctggtgatgattgatgagagagtatcagagattttgataagaactgatgatgttgcagaaagagtaaactaggttccacctaacaccgacgtagaaattattaaaaataaaaataaatttcagtgaaaattttgtttttggaattttgtgttgcaaagaaacaaaagaacattaaatcataggcttcgtttttatttttcgagtagtaatgtattccaacaatggaaataacgagttgtaataatatgcattatcatcttaatcacttatcagtcttggaagattttacttatagacatagaagaagaaaaatattcacaattttgtgctaatatgtagtaatagttttttccacctaattgtgttaatatggcaaatacctacctacttacatttataatttgtagacttgtagtgttcaaaaacgtttcaaaaaaaaaagcattaacgtaaatcaaaataaaactttgatatatcgattttcaatttagttttcaccctcacataatcacatataacaaattttgattatgatcaaaagaaaaaatcaaataaagtatcattgatatgaaattataagcatcactgatcacacaatcatataatcaaaatttgtatacgtgatagtaattacattatcattttccattacttctatatttgtactacatttttttttggtaaacaaattactaataattaaaacattaaatgaataaattaatgaagcaatcgtcatgtataatttactgcaatacaacggcatgaaagcaacgtgtcgacgttttttagtcgctagttgtcttccactgatcgctcttgcccactgcatgagttcttacttttgttactgtgaagatacacgtagattaaactatttgagaaagttttaagaaattacgatctttgtaatcgaactgaaccacaagaaaaaatggaataaaaatgaaactgaagacaatatgaattttaacaatggcctcgttaaaatactcattttataatgaactcaaaacttttacaatatccaattacaaaacccctcgcttattcttcattcgatctaacaaaatcgaaactgataaaacaaaaaaaaatggggctactagtactaagattacaattttcaattctttattcatagtatatattgaaagatcaaccaataatactctttggtgtgatcaagtttattcaccaaaaaaagaataccaatgagcctgaagacaatatttcaaaaccatcactcaaaagatctttactacacacacaaaaacgacatttcccacaaaattccgcaattaccgaatcaatcgatcttcgattcaggcttttactaactaatcttgataagggtttctctaaaagttttgatctttttttctttcctcaatcaaagatcctttctccagtagaaaacagcagaaacacaacagagctaaagatacagagcaaacccgggatgaagaacacaactctccagctctctggatgtgacaaatctgagtaaaccaatttagaagcttcaagaagctttccagtcaaatcaacaccaatgattccagctaatgtcccagcagtatttgaaactcccatcactattcctgcatatcttggagcaatatccatatggttcaccgcaaaaccggctcttcctaatgccaaaaacccaagagccactgaggaacataagatcacaccattttctgttctaaacatgggtaagaccatcaatgccgctgaagcaattaggaacccaactgtgttcaagaacttgcgggttctggttaccgagagtattctcttggtgatcaaatagtctgcgatgaacccaccaacaatggagaatacaaacatgttgaggtatggcaccatctttgatgaatccatcccctgaagactgatctggagtccaagctcgaaatacgttggaagccagttcatcaacacatataaagcgtaatggaatgtgaaattgttaaccacaatcgcccaaacgggtaaactgagcatgattttcttccacgggatatgagtaactttatggtggtttacattagtcggtaacagagcacctccgaatccagcagcagcagcttttggatgctcagatcgaggtgggtcagtagcgtacctaatccaaagcaatgaccatataacacctgctaatgcctctgctaagaaaactgattccggacctctaagctcaactaaagcagggagaagccacattcctaaagctgcacctaaatacattcctgatgtcgttatcgaaaccaatctagacctttcatgaggaggaacccactgagccaaaactgtgtggatagagggaaagatgaaaccttgagcaacaccaacaagtaaacgggcaacaaccaaaagcccgactctgtttggatcaagtggaaccaagaaacacgtcgatgaccataaaacaaacgacagaagaagaactttccttcccccaattttctgagctgcccaacctccagggacttgagaacatgcatagccaacaaagaatgtagaaagtatggttcctttactcgattgattgatcccagcagcatcagcagcaacggtatatgcaatagagaagccaacacgctctatgtaacacacacatgtgctgaggaaagttaagaagactattacatagcgttgcggaatatttgataacttcatgttagaccttttctctgatctagagcatttatatcatacaaaaaccctctcaagcaccaccacataagaaaaaagagaccaggaggaaaaataagcttcaagactccccaattccaccgttaaaatctgcaatgacatattcaaagcagtttaatttgcttattgtgatacatgttaacacaaaacttgcagggacgattctatatgactgatgaattctcctctgatcattaacaaaatagactcaaacccaatacgttcctctgttgagatatatatgagagaggtataagtaacacaactttatccattttcaattaggcatcctaaaaatacacaatcttacgcttctccaatcatacaagaaggcatctagaaagtaaaattaagtcaaatccttcaacacagaagataagaacatatcctaaatatgacatcaaaagataaagataaacagatcttaaaaaataagaataaatctgaagtaaaagttcgtatcaagcaaatgaatttgtcccaaaagccataacgtaatcatattggttctaaattgaaggatcaacaatcctaattcctaatgaattacgattccaatgttatcacagagactcaatttcgttttacagacgcaaaaaatccaagctttctttcaattaaacttaagtaccaaagaaacgagaacccaagaagaaatcttaaaattaagcatcaagcagccgaattacacagtggaatgtgttgcctatatctcttcttcagtcttcacaatgtaaatcgaaaaccgaagtcaaaatcacaaagctttaccttagttgttccgaaattcttcagctttttctcgaaatctacctcaaattgaagttgaactcgagtttcgaactgcaaaatcggatgcgtaacaatgcgaatggttttacaggcaaagtaaatccaaattagatttaagaaatcggagagatttgggggaaatgacaaatgggtattgaagtttaacggtggagagagcgagagagagagtagtgtgaaacgcagtggtcgtcgacagtgacggaggagaattttagggtttgtgaaagaatttagaagaaacaaaagaagatgatggagatcgctttttagggtcaacgacgacgatgctgatatttttatgtccgtgagataaatcacgtaacggccatttcttattttattaattaacgggtgaaaaaaagaggggaataggtataaaaaaatatggtgctgcccaggatcgaactggagaccttttgcgtgtaaggcaaacgtgataaccactacaccacagcaccttgatgttgagattataatgttatcttttctaatcacttacttaatcataattttgatctaattagcttaattttttttgatttgtgggtaattcttttatttttagactagtgtaaggcacataaattgagtcaaatttatagattacgtactaaacataaattgaattaaattcatagataaaacagctaaattttttttttactacttataacttatattcataagatcaaacaaccatttgataactcatagatcaaacatttaaaaagcaaaccttaaaccctaaatactaaatacaaaacggaaaaatatagagctaaaaacgaaacataagaaattgcagggagtggtttttagaatttccatctttgcagccaaacacacacaattaggcttcaagaatctttgattatgaaaagactatgacaaaacaagatccattaattatacaagttgatgagagtaggaatggaactaaaatgcgtagagatggtgtgattatgacaagattggtagtgtttacttgaattacgacttttttttggtctcataatgtgtatacatgaatattgattaatacttatgtgacagccacttttcacgtgtctaggaatcgttgactttgttttagcttgtgtgatcggaaaactagaaaattagacatgcaattaatttgaaagaattgtatggttcaattgtttcaaattgaacacatccaaaaagaagtatttacttgtgattttgttatgaaatagttttaaggcaatataaattgacaattatggcctctatatgatgttgtcaagagttctgaattgcattcggatgcatctcttcaacatccaagacgcaagatttactaaatttaggtaaattgtttgaattctattcaacgactagatagaaaacaagaacgattagggttgttttagaaaaactggatttaaaattaattggtgacgtatataagaagcaataattcgaactgtaaggtaaatgacattttatttagagtagtgtccacattgtctgaaataaagaaagacgaatcatgttgtatacaattatcatttattcttatttttgataatgttattggtttcatgaacctagcttctagtagggcataggtgggatactctgctcgtgcctgaagaagttctctggatcaaccttggttttaatcttcaccaatctgtcaaaattgcctttgaagtacttaggtccccagattttagcttcaatgaagttaacctttgcgttgttcttgttctgtccgaagtctagatctctgtagttcacatatgcttgtcttggattgcttgagacataaggcgccatgtaattgtatatctctttgatccagttgatttttctactcgatgtcttgtcattctctagccagttcgcgtaatagagaatcttgaagagggttccgtttctatgcggaaatgggatcgcagattcagggattttcgacatcataccaccgtaaggagtccagttcagaaatgttgtgtttccttcaatcaatcttttgaatattcctttgagccctatcacaggaataggttctttaacgaaatccgacgttgctttgaagtaatcttttcctagaggcgacttgagctgaagcaaaatttcaataggagaacctgttggaaatccaccatggaaaagggcggcttcaatccagctcatttcagtacaatccttttgagttaaccctagttctggaaaagccttctccataaccttcagcaaggtgcctttctcgccaagaaactgacctaggtaggtcattgtcacagtcttgtttccatcatttccagctgctctgagtaccactcggatgtgtatctcttcaataatcttggatgaaatttgttgccacttagaaatagtcttcaatcttgcgtcttgttctaacgttttggtgacagtgaagacggtaacagtcttaggaacaggaacaagcttgatcttccatgctagaactatcccgaaactcgctccaccgcctcctctaatcgcccaaaataggtcctcacccatcgcggctctgtcgagtaatttaccatttgcatcaaccatctttacgtctagaacattatctcccgcaagaccatacttcctcatcaaggtaccgtatccaccgcctgtcatatacccacctatgcctacacttgtgcacaaacccgcgggaaatccatggatcttgctcttctctgcaattctgcagttaaaaggtaaaaacgttaacagaattatcaagaagatgcggtgttacccaaaaaaaaaaaaaaaagccaaaagatttaacagtgggatacttccttcaccatttcttttgtcaaaaaaatgacccgcaagttggcctgtcaatttagtattgtcatgttgtcgctcttgttacatatatagattatatttgcgtatgtttatataggagatatgtatgtttttaaaaaataacccgcaactataagcatgtcaatttaattagtcttttttttttggtaggctgtcaatttaattagtcttgtgataatgtccaacgtccaagcaatttgtaaatgaattaaaaaatttacaatccttaaaagacatatcagaaaaaaaatcctaaactatataatgcaaaactataggagaagaaaaaagaaaaaactcatattaataaaatattaaaaataattttgaatctatgacggtctacaaattttgggtcctaactaagcgttggttaccgatttaccctgcttaaatcatgggccggtcttgcatgctagactcttaagtctaaaccattgaggactcatggacgtgtataagtttcggcttaactcatttcttatttgatataaataaattagtaattaagtacctatatatagataactagaaatttatgtttgataaatagttttagttagttattaagtatatacagtatgtatattaatatgatatttttgttaatatctagaaataaataattttatatatatatgatggcctagaaagtattaaatatatcacaaatatgattgtttatataaatttttcatacaaatataaagaacggatatattaaccaatgttacctgtagtaaagctcaccaagcgtagcaccaggttgaacccaagcactattggattcaatatcaacattgatttgtttcaattttgacaggtcgagtaatataaacggtttttcaatccgtgaaacataagacaaggcctcgaaatcgtgaccgccacttctaacacgaaaatgaattccgagtttctttgaacaaatgatggaagcttggacttgagactggtgaatcggtctgaatatgaatcccggtttaggcatggattttgccaagaactggagattttgagccgtcgattcaaggacttggttgaacaaagagacgtttttcgcaggggtgaataacgttttctcgagtggaaaagaaacatgtgtgtttcttttgacacagtttatgaattgatcttggatggaggctgatgaagaagttggtgttatgcaatagaatgaaaaatacaagactgaaactataatacaagaaattgtagggagtggttttgaatttcccatccttgcagcgaatatgcaagagagaagccaaatggatgagttttgtgttttttttctttttagcgtcaatgaagaaaatgtgtttatatacttataaaggattgtcaaaacaagattcatttgattagtcgatgacaatataatatggaagtaacgtgcttagacactagtatgaattttataagataagataaggtggttgagtttacaactaattacaattattttttcacatgatggaattgaatagttgttttggttcaatgaagaaatgtctttatatgaagataaaatattgtgatcaaaggagactccttaaattagtcaagtctaattagaaatttggttgcgttaataatactccctctgtttctatataaatgtagtttaagggtttttattttttttcaatttaaatgttgtttttaaatttctatgcaaataataaatgtatttaatattttttaaccaattatatttaattatctatttttttattagttgaattgattataataaacgatgtttttattaaatgagatttttatgttttcttaatttgtgtgtaaaaaccttaaatacaactaatatgaaacagaggtagtactaattacgattattttgtttctccataatatgaccgtcgttgcttaatgacgattcgacgactatgcctacattaatttacatgttggcatgttgcgtagtcaaacgaatcggcggataatgacagttaggcaatttttgtcatgtcttgaaaatgttgactttgttttagcttgttttgtggattaccgtccattaagttgacaaaaaaatgcaattacgttaaaagatttcatacggattcatatttttttgacatgtaattaaatttgcaaaacacggttcaatcggataacaacacctagttggttactcaaatcatatggttgtgtgtggttgtcatgagcttagcttcatacgggcagagttgggatactctgctcgtgtctgaagaagttatctggatcaacctttgatttaatcctcaccaatctgttgaaattgtctttgaaataattagctccccatattttagcttctatgaagttagactttgagttgtccttgttctgtcccaggtctagatctctgtagttcacatatgcttgtcttggattgcttgagacgtaaggcgtcatgtatccgtacaactctctgatccatttggtgcgtctgtttggtcttttctcactatctgaccagctcctgtaatattgaatcatgaagttggttccgtttctatgcggaaatgggatctcagattcagggattttatccatctttccaccgtaaggagtccaaattactaacgctgcgtcttcttcaagcaacttcttgaacatcccttcgagccctaaaacaggaataggttttttagcgaaatccgatttccctttgaagtaaacttttccgattggagactttgcttgaagcagaatctcaataggaggaggagggtttgttgggaatccagagttgtaaataatggaatcgatccaactcatttctatacaatccttctgagttagcccaagttctggaaaatccttcttcattacctccatcaaggtgcctttctcgccaagaaactgacctatgtaggccatcgtcactgtcttgtttgctttgtttccagatacagtgaagaacactcgtaagaagagctcatcaacaagattgtccgcaatttcttgccactttgaaagaatcttgaaacttctatcttgctcgaatgttttggtgaccgtgaagacggttagggtttcaggaacaggaacaagcttgattttccatgacaaaattatcccaaaactccctccactgcctcctctaattgcccaaaacagatcctcgcccatcgaggctctatcgagtaatttaccgttagcatcaacgatctttgcgtctagaacattatctgcagcaagaccatacttcctcatcaaggaaccgtatgcaccgcctgttatatgcccaccgatgcctaagctcgggtaaacacctgcagggaatccatgaaacttgctcttctctgcaattctgaagtcaacaaaccaaatattcaatactgaaacatagttcacttttgttgttattgttttgttgcatttagtataaatgttttcaaatgatccacaacccttaacgttttaaacaaagcaaatattcgtttggcgtttgtggaaaactgaaaagcttatagattgtgttacgatttgtgtagtccaagtgattaagaaatttacacaagaccggtccaatataattgaaaaccttagtacgaacaaacttttttggactttttaatgtgcgaaatatataaagtttgaacggttggacctatttttagaattttaaaagtagttacctaaaaatacgtatctgaaaaatgaaaatattgaaacttttcgccacaaactcttttgtaagagttttatttctttttaaattgccataggctagagaccactgaactcttgctctactagtttcagttgggcttgaatctttgttaaattcattgactttgaaacatgtggatctaattcatgcggaccacaaagtttgctctacatgtggatctaatttaattagtctctagataacttttcaaaataatatagttcacccttaaatgtaaggttttgtataatttaactcaatttttttcttctaaatgtgttaaaattcaaatctgaacacaacatttataaaaatttgagaaaaaaataaactaaatgtttatctaaattttcaatgtgaaatgaaatattgaagtaacaaaaaaatttaaatagtatttaagaatcattaaacttgtagcacaatattttagtaataaaccagtaatctaatcacaagattttggttagatttccaaatcaattaaaatacgcaaaaacggataaacctcactccataatttggaaagttgatacttgtatagaaaaaagtatcatatataacaatcaaacgacttatatattacctgtagtaaagctcaccaacggtagcaccagcttcaacccaagcactggtgtccttaatatcaacattgatctgtctcaatttcgacaaatcgatcaatacaaaaggtttttcgatctgtgaaacataagacacgccctcgtaatcatgaccgccgcttctgacacgaaaatgtatctcaagtttcttggaacagatgacggaagcttggacgtgagattcgtgaaccggtttaaatatgaaacccggtttaggcattgtcttggtcaagtatctttgattctgagccgtcgattcaagaacttctgtgaagatggaagcgtttctttcaggagtgaagaacgttttgtcgagtgtaaaacggacatttgtgtttcggtaaagacatttgatgaaatcatcttgtagggaggttgaagaagttagtgttattgtgtagaatgaaaaatatagagcaaaaactgaaatacaagaaattgtagggagtggttttgaatttcccatcctagcagcgaatattatatgcaagagagaagctaaacacacaataaggcttcaagatggaaatgttgtatattgttctttcttgtaaaagaagaaatgagtttccattttttttaataaatatatagcgattctgataaaataaggtccattgaatttttctctaaattcaaagatggtttgatttgtcaaacgaaacgattaggtgaaatgatagcaacgtgaccaacattttccacgggtttgtaaagcgacaaaataatgcacattcagttgtccaaaattaagttaaaaagagtcatatgaattcaaagttacttctctaaaacttaattggggtattaatcagtatgttatggttattgtttgattaatctaagtttatgtactcaattgatatatgaagtaaatgacatgagacataaatataatgaaaagtaaatatctggatatacttaataacttctaatttgattaagggccaaattaagaattaatctctatataaataacactatggttctcaaaacaacactatctaaaatccataaaattatatgcattacatcactagaaaacttaaactattcatggtttgctttggaagacttaataccacatttaggccatataagctatgtttctatcaagtacactttcgtttttgttagttttaacttttaaatataactagattttaacacgcggtataccgcggggacaatttattttttaaagttactacatataaaagtttatatataaaagttttttaaagttacaattgatgattataatcgaattgttatagtcatgtagaaaaacaatatcaaaaatgataattttgtagtaattaaatgatattaaatattttggaagctttatttaagtaactaatcgtgtagttaatatggagagattttgggaagattgttaaatatttaattcaaagattttctttctaattatcaaaaacaattattaaatgccaatggtagctccaggatttatttcagaaaattgctgcaaaattgtatatgtagattggtgcatgcaaactctatttctactaaatccaatatatctaattattttagatgcaacaaagatcacatccaaaaatatccaattatatcgttagttttgattaaatattcaaggtttcatcacaaccttgtgatcattaattaagagttaggtaccgtataacgatcttaatttaccaagaactatcgattttaagtttttaacgacttgattccattaagaacaagaacaagaacaaaactttaaataggattctcgagttgattgaagaattaggtactaagaagcaacatatcgaattttaggtgaaacatagtactactacaagcatagctagaataacatttttccgaaatacagaagaaccattatctgattttcttctaatttattcttatttgattgacctcgttacatcataggtggaatgctctgctcgtgtctaaagaagttctctggatcaacctttgctttaatcatcatcaatctgttgaaattgtttttgaagtagttagctccccagacttgagcttgtttgatgcatgttttcacgtctttcgtgttccttcccaggtctaaatcacggtagttcacgtaagctt

SEQ ID NO: 830 - DNA, 61290 bp, Arabidopsis thaliana
ctcgtgggttacttgagacataaggcgtcatgtaactatagagatctctgatccagttgatgtgtctgctcggtctcttgtcactgtctagccaacttgttacgtactgaaccttgaagaggactccttttcgatgcggaaaagggatttgggattcggggattttcgccatcattcctccgtaaggattccatatcatcaatggaatatcttctttaagtagcttcttgaagatcccttgaagcccggattcgggaatcggggttttcacgaaatccgatttggctttgaagctgacctttgggaacggagacttcccttgaagcaaaacattagtaggcgtgtgggtcgggaatccagaaatgtaagcaatggattcaagccagctcatttcgatacaatctttaaatgttagccctagctcggggaaactcttcttcataacgttcatcagcgttcctttcccgccaagaaacagagcattgtacgacgtcgtcacagtcttgttcccaccggttccagctacgttgaagagcactctgatgaatagctcttcaacaagcttgtccgcaactctttgccactttgagataatcttgttacccacgtcttgttgtaacgttttggtgacggtaaagacggtcacggtcttaggaacaggaacaagcttgatcttccatgctagaattatcccaaaactccctccagcgcctcctctaatagcccaaaatgtatcctcacccatcgcggctctatcgagtaatttaccgttggcatcaacaatctttgcgtctagaacattgtctgcacctagaccatatttccgcatcatggaaccgtacgcaccgcctgttatgtgtcctcctatgcctaagctcgagcacaaacccgccgggaacccatggactttgctcttctccgcaatcctacaagtaacaaacattttgatcaaatatacaaattttgataagaatactttttgttttgttttgtttggtcattgttgcttttatttatacctgtaataaagttcaccaacagtggcaccagattgaacccaagcactgttgtcttgaatattaatgttgacctgtctcatctttgacagatccatcaatataaacggtttatcgatctgagagacataagacaagccttcgtagtcgtgaccgccgcttctgacacggagatgcattcggagtttcttggaacaaatgatggaagcttgtacgtgagactcgtgaatagggctgaatatgaatcccggtttaggcatggattttttcaagaaccggagattttgagccgtcgattcaagaacttggctgaacatagagacattttttgtaggagcaaagaacgttttctcaagtgggaagtaaacatgtgtgtttctttggacacagttgatgaattgatcttggagggaggctaatgaagaagttggtgtaatggtgtagagtgaaaaatagaggactaaaatcgaaaatagagggagtggttttgaaattcccatttttttctataagtaagttcttctgctctcgtattgtttgctactctttgatcccaacagcatctgcaaaattcagtgtattaataaggaaaaaatctaaaccttctcctctatcttaaagtttccacaaatgtccaactttattttcttctctttgaaaatcattgctcaaaggcctaaactcttttacataaagtagtcattgattataataaatattgaaccaagtcaagtttttcatcatgaatcgtttgattttagtgataccacaaaaactcagtgccatttaaagtttaaacaaaagaaagtcatttttaagagacttaccaacttgactgcaagggttgtggagatgagattaaggcgtcaaaggcggaagaacatttaagtgtgtgactagtgtggtgttagggtaatgaagactatgagaaatatatagtaatagagaagaaagaaaaagagaaatacaaaactttatttagagtcgttccaatatatttttacctttaatcttctccattctcatttgtcaaatttactatttgttctttacctaactaaaatttgcttatttgtaactaattcactattatattcaagtgtttttggagtcaaattttatttgacataggtgtgaatgtatatgaaatagactattgatatctttccaggtcaacgaccacgggtaagatggccaaaattttctatggcgtgaatgtgacgacagccattgtctcaagtgacgcaacgtgacggacatttttttcttctcgtagcctcaaaaacgttgcagtttgtgtttgtagaaaactggaagtatacgttaagtagaggtagcaaaatattcgtgttatatatatccgtaattttaagctgtttttattttaaatttaaatttagatttagatgcaatttgctaattcccgacaacgtaattgtcatcttcaaaaacaacatttgttcgaaaaacgcagtaaaatattaaaaagtcaaaatttaaaatgaggatatatatatatatatatgtattttatatatagattcatatattgtgtaacttaaattgtgtaatattgtttaaaaattttgaaagttaagaaagaaatttagttgattttaaatgaatatttaaaattttatgttttggcagcaatgcatcaaacgtggatccgaggttgttcatcaatttgttttcaacgatactacagaaaatatttctggtacgaatcttcttcaccatatcaagtattgggcttgaaaattttcaaatattcactttatccatgcattaagatagaatgtaatatactagctcataatctagaaatgtatggtgtaatacttatgagtttcactttgattctgtaaaccgtggatgaacgaccaaatgtatgtactcttttaataaataaaaaaatcttattttgacgaaaatgtatggattgacactggatatctagttaaatttagaacatatattagtaagaaaacacttctagagtaaaaacaaatcacaaatatcacaaaaattcaacatattcatttcgtgcctgtccttgtgaatttaactattgttttcatctttttttcatataccgacactatcttgttctattatgtcgacttttcgggttaggtcgactttttggaatgagatgtagaaaaaattcatcagatatacctttgcccaaacccaccaaatccgtcaatttgtttttgtttggtggataaataacaaactcgttcacaggtgactaactattacgatcagtccattgcaaacgttttcaactaatttggtcttaattagacatgtcaattatttgaagaattactttgaaaattcaggtgggtcattttactttttgtcgtcagcatatatattgatgggactgtcaaatgtgtgtctgtgtgggacatgtcaattatttccattgatgttactttatgtcttttttcataagctgaaataatatttagtgttgttcagattattagtgagaaggcagcttacattgagataacggctcggattagagaagagaagaatcaaaccacagctgtgatcggacatgaagaagaggaagctgtatagacaagcttaccaaacgacatcctcaagaaggtttagcgattgggccaaattgagaatccaacacagatcaagcccaacaagcagaagatccaagcgcagacccaaaacagttcacagttccaacgatcatctccacctacaaaagaagacaaaaccaaaagtaaatcaggattggatcaagtgaccaaaaccacgagctgtgctggcaaagatggagtggttttacaaaaccgttttgactgtttagaatcaataaagacctgacatgtgtcagaataaaccctagtgtcactgacaatgtaactcctgtaaaaggaaaacatgatgtaacctcaaaccttaaggaaaacaaataagagaaatgaaacttatcttcttcatatatagcctctgagcatctttactttcacagattattaggtgataatcggatgtttggatcacctagtgtcgccgtttagattgtttagcactaaaaacatttccgataatgcttcaaagtttgctctaaactctatatttgatataaaaccatttactatggtgttttatattttgcttcaaaaaatagagaaataaatagtattgttgctccaattttttttatttctaaagtattcctttaattgtaatatattattatgttcctaaatgaaattatataatttaattatagacttatataaatttattttaaaaatcatagttactagacatgtccaaacaagaattgacatctaagcccttaaaacagatgagctacaagatcaggcatatagcaaattaatcatctcaacaatcgtgttgtgtgacattctagtgggagtatgggacatgctaattatttccaattatttcactttataaccgttataatattggaccagatttagactagacatgtgtccaaacaagaattgtcatatctaatttgaatattcagaacaaaccggtgtacaaaacattccggtttgcttttggttcggttagttttattcgactctaaatttaccaacccaaggaaaaattcaaagagatgaaggcccgttacatgtgcaagggaaacaaatttgactatttcaaatatcattaacatatttcataattggtatactttgttcatcacagaagaaatccattggatcaacatttgttttaactctcaccaatctatcgaaattgttcttgaaatacttcactccccaaacctttgcttcctcgtactttgtcttcatattcaacccaagatacattcccaaatcaatgtctctaaaattaacataagctcttcgtggagattttgaaacataaggagtcataaattcgtatacactctcgacccatctcaaatacttttcagtattagtcttgttcttatcttcttcttcactccaataagctaaatattgaatctcataaagattaccttctctatgtgggaatggtatttcgttatccgcaatttcactcattttgccaccaaatggagtgagtatgatctttgcaagccgagcctcgggcgcctcgaatcgtctccaaagatactgaatcgcggttttaggtatcggttcttcgatgaaatcatcttttcccttgaaagatcttgacgttcgtttccgtttcgcaagaatttccattgattctccttttataaaccagagaacagactcaatccaactcatttctctacaatttccaatctcaagacctaattccggaaacttatctttcatcaatgctaatagatcgcttaccggaccgagataaagtcccgggaacgaagcataaacctcggtttccttctgtagcatagctctgatgaaaagatcattaggaaccttatccgcaatatactgccacttgttgatgatcgagacagcctctttttccgatgttttcacgactttaaagaccgttactaccgacggaacatcaagcaatctaatcttccatgacaggacaacagagaagcttgatcctccgcctccacggatagcccaaaagaaatcttcacccatgccttgtcggtcaagaaagcttccattcgcgtcaacaatatgtgcatcaattacattgtccgccgataaaccgtattttctcatcaacgtaccgtacccaccacctccgaattgccctccgatgccaacggttggataaagaccggccggaaaggccaaagatttgcttaattttccaatctcatagtacaattccccaattgtagctccggattgaacccaaccggtccggttatcaacatctaatgtaatagaccggagatttctcaaatcaatgacaacgaacggtctgcttttagccatgtaagataaaccttcgtagtcatgaccaccactcctagtcctgatgtgtataccgtgaagccgtgcgcatttaatcgtagattgaacatcggtggcttgaaccggagtgatgattgaaaccggtttaggtgtttcgagaacaaagaatcttggattttgtatggaagaattcaagattgagaaatacgaaggatcttttgatgtgtgtatgattcttgagtcgtcctcgttgattcggtgagagagacacttgaggaagttttcatggttagtcctttgagctgaaatcgaaggaaaatgtgaaagagaaagattcaacaaaagaaaatatataaagagagaaagcaaaaatctcaaaatctccattttcttaatgcagagacggtgagaagacaataaagcatgggtctatagaacttttattttatttttgtttatatcaagtgggtatgtgttagatactttttatgttgtgtctgtttcttatgttgtgttgtgtctgtttcttatgttttgatgtatgatcgatcctatctgattcagttatgtggctcatattcagctgaaatgttatcataaggttacgtcactttatatgattacatgttttataatatgagtatatgattagtagcctatagttttgttcttaaaaagagagttattggtagattgattctaaagattataaaaatcttagactccactcttatcgtttaatggatatgattatagtatattttagtagtaaatgtctgtgtcatttgatgattttataatttcattcaaaaagcttatatgaaaatctgtagtgcttttttattttattttggaccaaaatctgtagtgctattaggatatatatatacgattgaaaatatgtttttagtaaagtggcaaagtaaaattagtttcgtcttacgccttaataattcatcttgaaagaaaatagtaatgcatattcacaacactacataatcaaccataaatctattcatgacaacatctttggtagtgttgacttggttatgggcgttatggttatgggccgatcttgactggaagctcacctcttatgccactattggagaataaataatcactcgtgccattcttatgtttggaatattattattgatttttatttaaatcgaaaaatgaggaaaggacgaaaaacccttgcgaaaccacaaaaactacaagaaaacttaatttgttgggctcgggcccaaaaaaaaatgtaaatactcggctcagttgtattatttacagaaaaaacctaagtaaaaacctaagttcccccttttcacttctcgacttcttcctcttctctccgtcgtcgtcttctttcgtctccgacgataccactttcaccggaaaaatcaatctcttctattcttctttcttctccgttttcgttcgtctttgtctctttcatatccgcaaatttattttccaatggctagagtaaaagactcatctggagaatatgaatcaactagggttgaatcgaccggcgaaattcctccatcagtcgacgagaccgccgccgagattccccaaagagatgaagaaggcgcagagcttcttacaacagaagaggaagccggagaaatccagcctacaaccggcgattgtgacgccgccgatttgggtaattcaaacgccgtcgcatgggaatcaattgacgatctttcaaacccaaatgccgattcttgtgcagaagaagaagaggcaacgaatgcagttgttcaacatgatgatggagcaaataaggtatgatagaagaccgttatttttttgattaggctcgttttaggatattatgcatgcattggtaaatgattggatttgtgaatggtgcttcagataaaacaagtagtacaactaggtcgtaaatttgtgaatggtcattcaggaacaagtagtacaactaggtagttaatgtgaaattgaaagtattttgaattgaatatgcaggatgatggtgatgatgataacctgccgcagaatatgcaggatggtgatgatgatcttcagccgcagaatatgcaggatgatgatgatgatgatgatgataatcaaccattgccgccagaagttatgtactttgatccaactacctacacgaaggtgtgtaagataggaacgaggtgtcagttggtacaaacagtggaatttatagagactttggatgcagaactgaagtggtttaggaatcatgaccaatttaagcacatattccacatgcctaaggagcccaatcacatgattcaaggcatgtggatgcttatggttcgcacggctaagacagaattggcgagagagtgttggtttgttgtcaatggagtacctataaggtactcaattagagagcatgcattgttgaccggtttgaactgccgtgagtacccaaaaaactataagactttaggcagtttgaagtttgtggagaagttgtttaagaggactgaggacatcaagattaaagacgtggaagagaagctggaagagtttaagagtgagaagtctactgctaggttgaagttggcaattctgttattcttagctaaggttatgaaagctgattctaaaggggattcgaagatagaggagtttttgcttaggattgtggataatgtcagagcttgtgagacattcccgtggggacgtttttcctttgagcagtgtatggaaggggtgcagagagtaatgaagaacatgaaaggtgtggtgaaacaaaaggcacagactgctttttatggatttattactccacttgaggtaagtagtcgagtaaattatatgagtggctagattttgttattgtgaactttcatttacttttatgtttttgtgtctagattctggcatttgagtgcattccgcagcttgggaagagatttagagaagttgtacgtgcagacaaggaatgtccaagaatgtgcaagcacaagttcagtgaaagttgcatgaagggatttactttggaagaaataaatgaagcacttggagatataacggttagctttgttctcttgaaatctatgtttataatctttgtggtgtttgaaatatatgtttacttgacatgatatttcaagcatcttggaacctgatatggatgagagaaaaatgttgtcacgcgttgtagagaagcatgttgatgatggtattggatatatcgatccaattgttgatagttggagagagaggcttatcgtagagaaaaagaagattttctggcgtagtctctaccaagcagacattgatggtagacgtattgaaactgttgatgatgttccagctgtacctgaacctgaaatccctgggacatcgattctctcgttcaaggaagctatggagagaggatttgacaagctcacggacaagcttgctgtgatggatagcgaaatcaagcgaatttgtttgagagtacaaggaatagaggaatatgtggcagatcagcttgagaaagaggcagaaaaagacaaatatgaagatatgtgtcctggttcagctgctgattttgtgccaccgtcttatcagccaatggatactcagagcaaggccttggttattcacagtggaatccgtgacccagcacctccaactattgagtctctaagtgagtttttgttgaacttttgtgtagtgatgctttcacaatagttcttacatgtttggttacatatttttgtaggtgatggcagcgatgagtccgatgaagaggataagaagaagaagaagaagaggcagatatcgaagaagaagagaaagcatgttggtcctactctggaatctgggaaaaaacgtggaaggaaaccttccaagtataagggggaagagtttacagctgaggggaagcaaacgaggaagagactttgacttttctttcttgcttatgtgtgtgtgtggactcttaggtgtttggagaaatatgactttctttttgtgtatttgagaatgttatgcgtagtttatgtgtagaggacaaacttattttctgtaatggtttatgtgttttttgattttattaaaatcaaaacgtttggctaagttgtcccggttggccggtcaataatacaagagttgctaagttgtcccagttggccggacaatacacataacttaaaatacaagagttgctaagttgtcccagttggccggtcaatacatataacttgaaatacaagagttgctaagttgtccctgttggccggtcaatacacataacttaaaataggtaaataactaagttgtcccagttggccggtcaatacacataacttaaactacaagaatagctaagttgtccttgttggccggtcaatacacataacttaaaataggtaaatacatgtttaattaggttcaaatattacataaaatccagaaacataacataattaggttcaaatgccatacaccatcctcaataacataaaacacatcataatcaccatgtagaaagtaatgccctaagcctatcaatcttgacttctttggcgagtaacctttctttaagggtttcaatttcgctttgcatgagttgaatagtttcccggatggactccaaagcatgattgcatgctagttgtccatgtcttagtgcggaatcaagtttgtgatttaccttctcaagctcctcagttaccgcctgatcccaccactgaataaggtggtttcgggactcgtactcttcatcctgcgaaagagagaagacttcataaatataattcacttgtactttgttgttccaatgaaatgaaaacacaataacttactttaagcattgggcatttgtagactctgtcgccttgcctgtaaccagttttgcacacttcaagttttacaggcttaccacaaaaacatttttctggaaccccccaatttgcatcggcattcgcctctccactattccaactagtttcggacgtggatggttgagagtaactatagggcatctacaaaacagagaaacccgtaagaaaccctagatctactaattacggcggctaaaaacccgtaagaaaccctagatctactaattacggcggctaaaaacccgtaagaaaccctatatcataccttggttgttgttgttgtcgtcggcggtggcagataatgggaaccctaatttcagttgtcgtcgccgatgttgggaaggaagaagagagaagaacgagagagaggaagaagagagaagaacgagagaagtgaaatagaagagagagggagaaagagagattgaaggagaataaataggtagaaactttgtagtgtgaacgcaataatcgtagtgtgaacgcaagtcgtggggtctattttttaaaaaaattgtatttattagaatattcagaatacacatagttgtatgtatatgtacagttggctggaatcacaaacagttgaacttttctaaattttgtgtttttgaagttgaatctgaaaaaccaactcatttttttagttggtcccataagttttaacatattaatggattttaataagttttgatagaatcatatttagtaaataactgttttcatacataatgtatgtacattggacaatcatgaactatatgttccttgttatacataggtgatttattaggaaaccagtttatgatcaagtttagtaataacaatgttgtaatatcatattttggatttattcaatgtttagatgttgataatagctgaaaatattgagaattattttatcattttgttaatccaaaaatacagatacatatatcagttgtctcagttgaacttaaaaaaatacattaaacttgcaaataattcaataaacttgcaaataattcaatacaaatacgaaaacataaaacatagtacatcacacttacaaataatataatacaaatacaaatgaacttagttgtattggttgaaccctttctcctgttggccaggttcttccggttgaaccctttctgcatcagacttaatcttcctcaggctgcagccaagcctccaagtttattccaggttgcgattttctcctctttcgtgcttcaccagctgatggaaaccgcttctcttgatttcgtcctggtacttttggtgtgtattccggcggaaaggcaactaactctttaatatgggcaggaagaacccaaaccgactcatgtgggactacatacaacgtccggtaataggccaatgaccaactatctatcaagtaatacataaagcagagtccgtagatggttgtattcgcatttctccctttcttgagggcgaggtgccttgctgcggccatagcatggacacacgggatcttgtctatatcaaaacatttgcatgaacaacttttcattttcaaatccaccagaaaacttaccgagttgagatcaatcacgttgtattcttggttgtaactgttaagctcaaacacagttaatttggctgcaactggacatctaatgtgcaatatgttctccacagtaggcacaacttgtactgtgattggacaagaacctgaatcttgcctatgctcgttgaaccattcagaaaacttagaaatcatcacatcaatcattggtaacaagtgatattttctcgcttttttaaacacaccattaatggactccgcagaattactagtgtcaatgttatacttgtctcctttaaaatggcacctcgaccatttctcaaaccctactttcataagaaagtcagcaggtttaggccataaacttgtaaaatgaccaaactctttctcgaactcactctcagtatatgcatgagcacaatccctgaacttgacagcagctccatccttgtcaattttcacacgatctctcatgttttgacacaaatgccatatacaagctgcatgaagcgcattcgggtacaccgtcttgacagccttctttatgctttgatgcctatcactaataaagaccaatccgggaacatccgaatatacagttttcagcttttctaagaaccaaatccaacttacatccttctcgctatcaatgattccaaacgcaagtggataatgatgatgattaggatcttgtgctgttgcaataaccaacatcccaccatacacagttttaagatgagttgcatccacaactatcactttccgcattgccctaaaaccttcaatgcaagcgcctaatgcaatgaagaggtacttgaactttttctctccttccaactccacataagttactgtccctggatttaccttctctaacatgtaaagataagaaaataacatcgtgtagcttctttccggagtccctcgcacatcactaacatgtagcattttgcctcttaaggcagtggagtatgaacaatgcaccccaagtcttcctcttacaatcgacataatgttttttggagttggggtctctaaatttccgggatagtcacaatgcaaaaccgatgctattaatcttggtgtgcctcgctgtatactgttgcttgtagtctcaacactccgagagcatgtatgcatctttctatgcactctaacactccaaaaatgagatttcttagttctcgcaactcttagataccaagtacaccctttagaagcttggcggcatcgtagcataagtctcaacgggtctcacttaatagtatagactccaaaaacttctttctttgcagctctgttaaccaattcccacacagcctcccttgaacaaaattcttgaccaatttcaatacccgtaccatcatcccattctataacctgcggagtaacttctacacttcgtggaatatcgtgaatatcatcataatcaatcctatcatcctcatcttcttcctcaacagaattcaccggcctttccatcggcctttcgacagccacgatctccgtacctactacattctcacaatcattcacatcattatcatatccatcatgcaccatctcacatacttcatttaaaacatttacaccaactgaacttcgacgctccggtatagaaatttcctctctcctctcaactcctataccatttaattcctccacatgcaaaacaggaatccgactctcttcatcagattctgttaaaaatatgaagacatcctcatcatctacaatatatgtctctctcctaactttaaacagattgtaactcagtttcaacttgacagaagcttcatcaatcgcaaccttcttcatgatcttgtcaactaacatcgaatagctaatcttctccaaactactcgtcttaaacgatatagcatatagtgaatttttaccaatccagccattcacttcagaatagtatcctccaaagtcaaaatgtaccttagtgtggatcttcttcttcatcgctcctgaaaatataaccagttcaactccaatcaaacattttaatagttataccacatgtactcttatcatacgttgaaatcaatctctcgtcgcactcgattctactgaacctaattcgttacctttcaattgatttccaatgttaatacatacctattcgttaaactaattggttaatctaaactttgcaaacacaaaccccccaaatctttaatatgaaatctcggaattcaaattcaactcacattcaacctacattcctttgctcatcacctcaaataacgtttcggcaacctctaatcgattactctttactttgcaaaccaatcatcaaactatcaaattgaatctgggaattatatagaattcaaaatcccaatctaaaatcacaatgcaccaatgtcaaaggaaatatgagaagaaactgacctaattcgttggcttttacgccggatttcaagtcggcggcggccggaatcgatggtggccgacgaagaagatgaacgtcgaccaaagaagaagaacacgacgacgaagaggagagagaacggaggatctcgattctttatttagcttttgaatttctttttcatttttttaatcaactcattaagggtacaactggtatatcacattttcggtggcattcagattaactgatggcagtccagatcagtttttttaaaaaagtggcataagtgataaaagttcatcttgacttgggttatggtttcgagattgatttcttgacctaactcaacttgcttgttcttgaagaaactgcttttagtttctttctttttttaaactgcttttagttaaacataaaaaccatgaaatctttattcaacgtacgcaaatatgtcacaacaacagaaaaaagttacacagttgaagcataactattcaaacaaaaacagatgatttcacagtgaaaaggactcgtacatgaaacttcaaaggatattcttagatgtcgtcaacggatttcagtagcggaatgctctgttcatcacagaagaaatctgttggatcaacgcttgttttcactctcaccaatctctcgaaattgttcttgaaatacttcactccccaactcttcccttcctcgtactttgtctcttcctttccaagatacattcccaaatcaagatccatgaagttgacataagctcttcttggagatttcgaaacataaggagtcataagattgtaaacgctctcaacccatttcagatacttctctgtttccatcttgttcttgtcttcctcttctctccaaaaagccagatactgaatctcatagagattcccttttcgatgtgggaatgacgtttcgtgctctgcgatttcactcatttttccaccatatggagttaatataacctttgcaagccgagcctcaggcgcctctaatcgcctccatagcgcttgaattgcagcctcgggtatcggttcttggacaaagtcgtctttacccttgaaagacagagatgtacgcttccgattcgcgagaacaccaagagactctcctttagagaaatcagcaaaccagagtgcagattcaacccaactcatctctgtgcagtcttggatatcaagacctaattctggaaacttttcttccatcaaggccaagagattattcaccggaccaagatagagtccagtaaacaaagcctgcacagagttttcgtttgatctctccaacgttgcgctgatgaaaagatcttcagggaccttatccgcaacatactgccacttgttgatgatcctaacggcctctttctccgatgtttctggactttaaacacggtgaccgtggacggaacatcgactaacttaatcttccatgatagtacaacaccaaagctcgatccaccgcctccacgaatcgcccaaaagtaatcctcacccattgcttgtcggtcaagaatcctcccacgtgcgtcaaccacaagtgcatcgattatgttatccgctgctaaaccgtattttctaagcaacgtgccgtaacctccgccgctaaactggcctccgacgccaacggttgggtggatactggctgggaaagcaagagaccgaacccaaccagtccggttttcgacgtctaatgatatagaccgaagattcctcagatcgatgacgacgtatggtttgttgtacgcaatgtaagattgaccttcccagccgtgaccggcgctgcgagtccttacgtggattccgtgaagcagtgcgcatctgatcacggtttgaacgtcactggctctaaccggagtgacgattgagaccggtttaggtgtttcgggaaccgagaatcttgggttttgtatggaagaatccaagatggaaaaaagggatgagtctttggaagtgtgtatgattttggatacgatggtgttgtcgttaatccggtgagaaagacacttaagaaagtcttcgtggttattggtatgagctaaaacaagagtagagagaggagaaacatacagtagaaagagtaagagagagagcaaagagtttgagaactctatttttgtaaagattggtgatggtagagagtgtgtgaagattgactgaatttatagaaaaaagaagtagggagaagccctaactttttggaccctaaagaggtttgacgtcaaagaaaatcccaaatataaaaattgataaatcgtcattcaatcacaaaatgagtagattgaactatatatttttttttcatttctaaaaacgaatatttcaaattaaaagaaaggtatataaaatgtagtcaggtccagaaacgttggtttaaagtatacatatcactatttagtactactatgatgagtcatatgattatttttttgatgaagaagtactcctatatgatgagtcataactcataagataagaacatgataaggaatagaaaagatgcaaaaaaaaaatataaagaatataagttgggtatggtagcccatatatctttcaagcgcaattttattattagcactcatcgatcgtattatgtcatttcacaaaattatggttttgacacatttcacattaagtttttacaaaaaccatctagttatttttggaatttgaatgttcaaaacaaaaaatacagaaataatatattctttagcttcaaaatatatgatgttgtttttgtatatagattaaaaataatttattttgttcatttaaaactaaactatcatttattatctacctaagtatgattcaaccaataatataaatgatctactattgtttaaagataatggagtagctatgacgatcatctattaatagcgagagtgttacgattgcatagttaagaactcgcatgtggcttaatcttttgggtggtaacaaaatcttgcagacctttttggttttgcgtgcggatatgtataggatttttttgcaatcgtaaagatcaaccaaattaataagagtaataacacatgatgctatgagtcttctacgcatgtcttgtcttctgcatgtgcggattcttgcatctaacgaaaccctaaacacagtcacggaaacacacgaaatttattaatcatggactatagtggcgtttgtttaccaatatatctttagtgatcccggtatcttggtcctcgggttttgatccttagttatgacaagataatgctatctctaaacaaatgacgtttcttcttacataacaatttattttctaggatgtttatatatttttatttattaatgtttatagtttttcgatacaaaaaatactctctcttctcctaaatgattaattttctagaaaaaaatacattttgtaaaagattgattttttaagtcttccatgcaatatttattggttagtattggtgaattgtaattttcaagaaaaatagttaattatcattgatttagaattatagaaaactataaaacacaaaaaaataatacatttataatcaatatttaatatattttcttattatgtgtgttttttctaaaaagtaaatctttaaggaacataggaagtattagtattataaatatttgaatttatgtactactagctcatatctcatagttaaaaattaatttttggttagagaaaatattacatttataagtaaatattactatattttaatttgtgtaaatatttttaaaagttgatctttatttgtcctcttaaaggatatattgaccggttaatcttgggtctggaagactaaagcttatgcttgacttttttaatacctttagtccatcaaaaataaaaataacaactgaaccaacctttctctatttttattttcatactctatttttgcttctatttcactccaactcatctctattttcatttttaaaataaagattactatttttttcttctattttttcttctaacaaatagagatctctatttttattctaatagttcctaaaaaatagagatctttattttttctttatatttagaaaaaaatagaaataaccattgcaaataatgtgagaaaggagaaaaagtaaaaatatttgaagatgacaacccctaaagaaagttatttgacgaatgacgaagaaagtaaaatttgtaccaaaccaaaaaagcaacatcgtttattaccaattcttatccccttgacaatttaatattgctaacgtctagaaatatttgattatgtatttaaaatgattctccttgtttaggtagtatcaagtaggtaacaagtatgtatatctcttatattttttcattaaatggaacacctaatcagttgttgtcatgataaccatctctatgataccaaatcacgtgatgcaagatactatcaactttgagataaatatgctattctataaatatgttagctcgccatagtcaatccaaacaggggcggacttgtaaaacttttcaatgggtggaaaatgttactaagaagatttgaacctattacctcatacatttaaatggtttattactaaacaatctgccactgtgcttaatctgttttggtatcaaaacgttaactacttatatattactggggcaagtgcccccacaattcatcatgtgggtccgccatgaatccaaaacagattccgggacaacgccttctacctgatccaaatgggtgtacatgtagccttgtcctttaaactccacaagcaaatctaaatgcctctctggcctaaattcttttgcatctgctcccaaaattgtcgtgtctcttagattgcccaagcattagttatcagtcatcacctgaattcccacgtaggttctttaaaatttcactaaatatgtaattatttaaaaaaaaacaaatcaaggtagatatgattttaccaatgttcctgcagcaatatcatatcctttaaattttatatcttaatatagtcctcagagaattattggaaatggaggatgcaaacgtaccacttcgttttttaataactaagaggttctaaacctatgtggggactagagcattttacttgcttcttctactttatcatccatcccgcatgcctctattcatgccaaaccaggaatgtattcaccaagcgggaaatatcctgagagctccaaagtctttctgattatctccttaacattgttatattagatcatgttaagtttataggcttctaattcaaatctaattagtaatgagttgattggcatatgattcttatatagtaatcaagttctttcctatctttgttgatttaggatctttcccttttggacctaaattcacaaaatctgattatccagatccatatccaattttgacagatccatgatttcattaccctgatgcggatccaaccacctgaattaatatcacccctgctttcatgagtgtatataaacaacggggttggaaatgaaatggtgagttattattttccttgtcaacgtgaacatacaataacacagttaaacccacaaaataaacacatttccctcttctactagacaatattaacttgcaagtaggtaataatagtagataagatgcaccgtcgatggctggtttttcaaccacatatcgggctgcctctctatcaaatgtaacataagcaaccggttaatttgacttggtcaagactctcaatataattaaatagttcaatgtttagaatcagagtttgaaagaaacatgtgggacatgaacaaagaagaagaagaataaagattcagtggtcctgttgtagacaaaatatggaagtagtcttacgtcgtacataaattatttttatattattgtaacaacaacgggaaaataaacattaaaacagaaatatgcatgtcataaagttactcatagagtgacagagacttattttatgtaaaatacacacgatttagcaccaaagattattggtagatttaacatgggacgtaacagatacacttgtgtgctgggaagacatagttgcatgatccatgtttggctccttcaaggttaatgcactgattcttgcatgcattactgtttccgcaaacccctgaccatgtcccacttggcttctcgcacaacttctgtgcttccaccattgccggtgcgtctgcatatatatgcatacatcagtcaagaataattatcaaataaactaaaattacatttaaacacatttccaataagaacattattactcaccgaaagcagcaaagagaacaagagcagcgaagataagggtgatgatggaagcaaacttagccatgatgattattactattttgttttcaatgtatagatgtatgtgttgtgtgaagaaataagccaaagatcaacgtctatttataatgaaatggtagtgggttaatcttctacttgtgcatcgtacaataacgtggtaaccccacacattaaacagacatcatcttcccgtagccaatatcaaaagataagatcttgctttttgtttgttgatggctggtttctccaccacatatatttctctgtcgatatctaaagtaacctaagcggctgcttcggcttttagctaatgctacatcgttcacatgggcggctggttaatctgaatggattaagactcaagaaaataatatcttaaccaagccatagttacacaagtatattgatgtcagagattctcgcggttaggacaagtgcagactgtgcagttcatagtctgaccttcgtcatcgtcgaacaaatacaacatttttcgattagaggatcacccctagacatatagatcgttgtggactaaacatatggtttggttgatctcaagagcagcattgttccgccaagtttgcagaacaaggaaccgttctcgcgtagtttcgccatttatatatccctgggacacacctattactgaaaattggatgattcatcaatattttgctctcaccgtcggtaggttttcaaactatcgaagggacaaagaaacgattggtaccggaggaacggagagggcaggaacctaaaagttagcttagttggctattgataaacaaactatagttgattgtggccttaaacgtaatggactatcgacatgcatggtctgaccgcaagtgagaggctcagggtaatttaaaaaaaaacattaacggtgttgtcagtcatcaaaattttgtagattagctataaaggtattattcgtaaattcgtaaacaacgacattcaacaaaataactgcaaattttaactaacttaataaataaaaaaggaaaaaccgaacattataagagatcagaatttaaatttgtaaaagtatagattaattctttttaaacttgggaaatacatatttttgtagggcttagaacttttgctttggaatgaggattaaaatttgggtttagatttatgattataaatttacataggcaacatgatatatattgtgagttaaccccaaatttggacatgaaagtagaaacgatgcacctcgggatatcgatgcggcgatgcatgctgcatataaagcttgtcccaatgtccataaaattctcgacacgcccgttttacatttataaatccctatctttatcattttgatttaatatttttttaatatgttcaagattttcaccccaatcatgtatttttatgggatatgatgaaacagtccaacgtcgtacataattttttagtattattataacaaggagaaaccaaacataaaaacataaacatatatgcatgtcataaagtcactcatagagtgacaccgacttatttaaagtaaaatacacacacgatcaagcaccaaagatttttggtagattaacatgggacgtaacagatacatttgtgagctgggaagacatagttgcaagatccatgttttgctccctcaaggttaatgcactgattcttgcatgcattactgtttccgcaaacgcctgaccatgtcccacttggcttctcgcacaacttctgtgcttccaccattgttggtgcttctgcatatatatacaccccttgttaattatcaatcaatctaaaagagaaagaaaaatcaaagttttttttccatgcatatatatgacaattatataagatctttactcaccaaaagcagcaaagagaacaagagcagcgaaaaggaaggtgatgatggtagcagacttagccatgactattatacttttgctttgcaatgtatgtcttttgtatgtttgaatgtgggatgtgaagaaataagcataagatcaacctctatttatagtgaactgatgaagaagagttagtcttttacatgtcatcatgtcaaccccacgtagtaaacacagactgtaatctatagtagatattaaatcgtaaatagctaataatagaagatatcatgatgttgactaatcaatacttgatggctggtttctccaccacttatctttacatatgaaaggctgcctgatctatcatctatctaatgtaacttaagcgggaggctgcgttggctttgaggtaatgcttcatcgttcgattgttcacatgggctgctggttaatttgacttgttcaagactcaatatattctattttcgatgaaaaaaatataattaagaaggttatctctgattttttttttttttttttgcaagtgagcccaagtcttattaacataagttgtagtgattggcagagattttccgacgttcgttgaatgagagattataaaggtagaagaggaaactagaactttaaggataccagccccgcctaaagaaagacaaattggcctttgggttaaaagacaattgggctttctatcatcaaaatgtttttcttagaactatttttaataatgtttttgattttttattataaaaaaataatttcaaaattatcactagacacacaaaaataaaaataagagatggtgaattacagtgttccgagtacattatgtcgacctacttaagataatgaatgatttagattaaaattaaaattaaatcgattaagattattaccatagatagatctaagaccaaatagaggaagaagattcatacaggtcaaaacatctaatctctgtttttgttcaactatcaaattccgttaatgttccattagggttcgagattcgttgcttgacctaattccagcataaatgtttcttgaagaaacagtggttttaacgaggagaggattaattacacacctaatctttgtttctgtgatgtctttttatttagtttcacttgcttgcgcttgaagaaacttgtttttagttacacacttcaaacatgaaaagtttattcaacacacatatcacaattcacaatcacacacataagttacacacttgacgcataatattcaacacgcacagatgatttcacagagaaaagggactaataaaaaacttcaaatgatatcttcaggtaactttgttcaccagaggaatgctctgttcatcgcagaagaaatctgttggatcaaccctagtcttcactctcaccaatctctcgaaattgttcttgaaatacttcactccccaactctttccttcctcgtactttgtcttcttctttccaagatacatacccaaatccatatccttgaaattgacataagctcctcttggagatttcgaaacatatggagtcataaattcgtaaacgctatcgacccatttcagatatttatctgtctccgtcttgttcttgtcttcctcttctctccagtaagccacatactgaatctcatagagattccctcctcgatgtgggaatggtgtttcgtactctgccatttcactcattttcccaccaaatggagttaatatgatctttccaagccgagcctcgggggcttctaatcgcctccatatctcttgaattgcagcctcgggtatcggttcttggacaaaatcatctttgcctttgaaagatagagatgtacgctcacgattcgtgagaacaccaagagattctcctttagggaaatcagcaaaccagagtacagactcaatccaactcatctcttcacaaccttctttctcaagacctagttccggaaacttttcttccatcaacgccaatagattgttcaccggaccaatatatagtccagtgaacaaagcgtgtactgcgttcttgtttgatctctccaatgttgtcctaatgaaaagatcatcaggaaccttatctgcagcatattgccatttcttgatgatcctaacggcctctttcttcgatgttttctggactttaaacacggtaattgtggatggaacatcgactaatttaaccttccacgatagtataacaccgaagcttgatccgccccctccacgaatagcccaaaagtaatcctcgcccattgcttgtcggtcaagaatcctcccactcgcgtcaaccacaagtgcatcgattatgttatccgcagctaaaccgtatttccttagcaatgtgccataaccaccaccgctaaattgtccgcctacaccaacggttgggtgaataccggccgggaaagcaagagatttggtggttttcccaatctcataatacaattccccagccgttgctccggtttggacccaacctgtccggttatcaacgtctaatgatatagaccgaagattccttaaatcgatgacagcgaatggtttgttgtacgcaatgtaagagagaccttcgtagcagtgaccggcgctccgagtccttacatgaattccatgcagctgtgcgcatctgatcacagtttgaacgtcactggctttaacgggagtgatgattgagaccggtttaggtgtttcggaaaccgagaatcttggattttgtatcgaagaatccaatatggaaaaaaaggaagagtctttggaagtgtgtatgactttgggttcgacggtgttgtcgttcattcggtaagaaagacacttaagaaagtcttcatggttggagccatgagctgaaacaagaggagaaatattcagtgaaaagagtaaaatagtaaacaaaaagcttgagaactccatttctaagataggtggatagtattgagaatgtaaagattgagtgattttatagggaaaaagtttttcgaccctacagagttttgacgtcgagaaagaaaaccctaaaattttaaaaattaagaaaactttcaagttttgacaagagttttcacaaagtttgttttctttttttttgcccaatacgaaatttcgtaagaaaaagtttcccataaatctactatttatttgtaaaatttgcaaaacaatttatactttttggataaaatgttgaattatttgtaaaaatcctccgcaagaaactgtctttcttaaatacgattttgctacttatcttttttgaaccaaaattgggctatctatctaattaacccaattgtaatcgtgccaataaaggagtacttataaaagggcacgggaactagcatatataccaacattagtttcaatgttggttaatactatacatgaatgacgtaagaatgaattatcagtttcaatgtggccaatgcatgtctttaattactttcaacgcaatattattattttggctcaacttactttgcattaaccagatcaacatcacaagttctatctcaacatcggatttaaccccactttaggatcataattcaaaaagaaagagactctttcgctattaattatgtcagcattccatttccatgtcttgctcataattcttttttttttaatttgaatttaaatgctaaattagattcaaagaaaaataaacgtttttacaatttgtgcatcggttatttgaagaaaagtatagcctaaagctttataggaacataaaacagagactttatactctcaattgaagccattgtaagttcttcatctcctcaaagtaatgtgacaagttctatatattttacagtagtggctaagattgggccatatacttcatatcctccttggtgattaactcgacaatcagattcaaaaatcacccttatgtacccaaacctggaaacaaacaagactgcccataccaaagcttcaagttatgtctcaatcattgtccttgccctcgggattgctctcgctcccatccttatctgccttcatgattccatattatcaagcccatacctctcaatgccccatcgacattacacttgaatcaccctggaggaggatgtttccagttggcattagagttatctttaggagatgaatttctctttttctgtagttggtcccttctctctgggccttgtgatttcttcgtccattatattcccctgcatccttcctacgtttccatgggatgagttatgggatgcatttatggcgagagttaccatgccttctagatttttagattaaattgtcatatagtaatagaccagtccttgtcttctgcgcgggaacaaaatattgcagacattttttgtttcgagataaaataagttgtgggataagacttttttatttttgttttgggataaaatgagttatgggacaacaaaatattgcagatatttttttgtttagggataacttgtttttttttccgcaatctataaagaaactaaattaagtacttctagttgtagatgatgcgatgagttttctacatgtataggctccgagtgaatgcgtggaatgatggaaaataatattaggttgcataatgcaatgaattatgtaaattctttggataaatgtgtgcctaaataatagaaaacttatttggattaacttgtagaacatcgaaatatagtacaattaaatattttaaacaaaaatggtataggaatatgtggctacagtaaaaggatcacaattctaatttcttcaagtccggacaaattatcagataaaaaacagaatggagcagaaacaggtttagtcatgagtacacgagagtttatgacttggtaaggtgatggaggagaggagaatcgagcatgcacaaaaccaaaccatgtgacaatgaagcagccaagccttgatccagatcttacaacacctttggtagcttctctctttacaccaaacgattaagactccgtagtaaaccaatcggaagctttgtcatttgataatctgcggtctgttgcttcgagtttttgacctggttcggtggattttgggtggtgtgtcaaccgttaacgcatacatttttacagcaaataactcttgtggaagacctttctgatcctggaaattatggttttggagaaaagactgtaaatttctgaaccaacagttcttaattctatgaaatcaagattataaacacacaaaagaagtcaacctttgttctatagagatgtaacccacattggcgaaagagctgtttgaagtatggatccgatctggtgatgctatgatcctctttatccaaaacaaatcctgcagaaaaaaaacaaacatatatagcagtttagtatcagatcataagaataccaaagtgagaatccaaaagagagagagagagagagagcgaaaaggaaccatttttagcgagattctctttcacgacgaaaaacccaccaggtttaaggtatccctgagatcaaccaagaacatcacatgaagattaagcagcaaaaacatggactaactgaacatggtgcaatgaagaaagtctttacctttgcgcggttaaagaaagaaacaaagtcattgtccgtgagatgcccaatgcaccattgaacccatattacatcatacctcccagcagctggagtaaactcctatgattatataacaaacacaacgcaaatgtgaagaaattgaacacaatgataaagataaagaaagcaaagagagatcattcaagaacattacctgaagaggtacacagaaaaagttagtagctttgtgcgtttcagagcctgcagatgccaaattttcacgagctgcatccaaaaattgtgctacaggctcaagaagatcaacctaagataaaaaagaatacaaaactggttatcaaaaacagagaagaacagaaactaaaacatgtaaatttcatcgaaatatacacttcacctcgttaaagtatcgaatcagaagatttttagtgattcttccaataccagatccacaatctacaaataattagagtgatttgtaagaacacacatatggcaaaaaaccaatgaacaccaatgagagaagagacttaccaagagctactaaatgctgattagctccaacattgttaactaatctttcttgcaaaagagtcttaagaaaaacctcacttcctataatatcagcatcattcacatgcccatatcctcctaatactccatcaacagaagcttcaacaccctttataacaacacaaacacacacaaattcaaaactaaggaactttaaagagaactaaaacatagaaaaggtaaaagtttttaagatcagatgattcaaatacttacttcccaataagaaacaccatctctataccattgggtttttttagtttcgtctccttctccaatttcttctctccacatctcttgtacgctattaaactctttcccttcggaatcaacgccacaaatatccatggaattagaagaaagagttaacacgcttcttatctctttcctctgttgatagcgatacggtggtgaagcaagtgtcgtcgtcgtcgacggcggcggcgagatatggttttggttgttgtggtggcaatggaagtgaccaatggaaacgaatgggctgtgaagagaagacgacatttgttgttattgggcttttcgggtttagtggctttgttattattggtctcggactatccaaattgtataggttttgtttgagtatactttttcaatttctaactacactgatttaaatttataaattttactttcatatacatgtttttaaatgttcagatgttgtctaaattttgtttatgatttgatatttttatttttctaaatcatgtatttgtataatttgtatatgtaataactaataactaataacatatttacaatgttttatgcatgttgtaaacattttaatcgctcaaaatttaaaatcgtctaattttcaattagatgttttaagtgatagacattggatcacagcccaataagtatctagagcattttttgaacactggcttataaagttattgattttcgatatgttaactaattcgaaataactagttccagccaaaaaaagttactggtttatggaaagggacattttaaaaattttgtgctcatagtaaaaaaatattatgtgcttctgttatatagttatgcgtaggtgcaaggcatatacttgctatttttcaggtatttataactcgtcttgacccgaacaagtaattgaaattgaagtttgatatttgacttgtttgagtaagtacttgctataacaaatacctgtccaaaattttgttacttgcaagtaacttaacctagcttgttatttggaagataacaaaactcggcttgttacttgcaaagtaccttagtagaaacaaatcaacaatctcatttatattacaaaacattcatagatattattttggatcaaaatctatacattatcaaatcaaaattcaaaagagaaataagtaagcattaagtaacattgtaacaacaaatcacaaatacaaataacgaataacgggacaaatatcaaaacgaagcaagtaacttggcaaatatcaacaaatattgtaatacttgatacttgacttgggcttagaaataataaaattaaccgacttgttatccgctttatctctagagggtacttaaattttcgagacagatacgagtctagtaacgagtaattgccgaacaatgcgtacttgtgcccataccttattttagtcatattgtatattatctatttagtctccgcctcgttattccaagtctttgattatataataatagagtaaagtctctgcctcgtgattctcaagtctccgactatatcaaacagagccaccaagaacaaactaagaagaagagtaacaatggagatcaataacgagaagaagaaactctcaagacaatcttcttccttcagactacgaagtccaagtctaaacgctcttcgtctccaccgagtctttgacctattcgacaaaaataacgatggattcataaccgtcgaagaactaagtcaagcactctcaagactcggtctcgacgctgatttctccgatctcaagtcaacagttgattctttcatcaaaccggacaaaaccggactccggttcgatgactttgctgcactccacaaaaccttagacgaatctttctttggaggagaaggaagttgctgtgatgggtctccggaatcagatcttgaagaagcttttaatgtgttcgatgaagacggagatggttttatctccgctgtggaattgcaaaaggttttgaagaagcttggattacctgaagcaggagagattgaacaagtggagaagatgattgtctctgttgatagtaatcatgatggtcgcgttgactttttcgaattcaagaacatgatgcaaactgttgttgttccttcttgaatctttggataaataatttgtcgtttgattctctcttttaaattgttcagaacaacttcttcttaaatgcaaaacagttacagatagatatcttgtgtaatgtttgattgcatggtcaacaattcaacattaaactgtgttttggtctgattggaactttttttttttttggagtttaaaaaagtggtttgaacgagcagaagagcccaccaatgtggattctaagttcacagatacaatggatgttttgttctatatatatggttaaacacacctatatattatatacatgcatagttgcgaggatattcttcgcaccaaaggacctacttttggtatcgcttgggttgcaaatgtttatgcgaatcagatgcttgaaatgatgaataacctagtcccagtggatatctgcagacgaaaaacatttcatcgcaaatggagacagtgaaaaaggttatgtaatctatatgcttttcctgcatgtacatcaaaccggaatttgacttggtgctatattgctcccgtctccgagttcttttggatattttgtcgaactatctatttttgcactatgttacgttattagacttgttgtatcaagccttaatttggcaaaacccttcagctttgtaatgttttatccgtttgaatgaatgaacacaaggtattttgccccccaaagaaaaaatacattaaaattagggaattaagtcttatcttatgtgctaaagtacatcaaaaacacaagcattctaatcgacttctttttattgatgtagtatagttgttatatagttgaagagataagtaaataggtgatgttattgtcaaatttcaaagtctactcccattttggttattatggcgaatcttgaaatgcagaaatgatctagtatttaatcgcaaaatgatcgaagtaacggaagctgtagaacaagccgttattgacacaagagaatggattgaaaacattgctacttcggaacaaggtcataacgacattcaccatcaccgatctcctagagtgaaatgaaaaacaccacaaagaggctgggtaaaatgtaactatgattcatctcaccataaaggaaccagtgggtctggattagggtggataatccgcaactcacatgggactttcatggaatgcggtatgagtaaattccaaggtagggcaccggttgaagaatcggaatgtacggctctgatatgggcactccaatcatcatggaacctaggttacataaagatcgagtttgatggggacaacctctctatcatccggctaatcaacggcaaagctgtaaatcctcgacttcgacattacctttgatgaaatcagtcattggcattgcatgttcacggaggtgaagttcactttccatcatagagagcagaacaaatgtgcggatatactagcaagacaagctctcactggtccaattcactacacataatagttgttgattcttctaattcgaatacatttttatccaaacaaaattattaatcggaaaactaatcttcttctttttcgttttaataactttagatttatattgtaaatacactagtgtcgcactttaagtgttcactaagatgaacaaacgattacatatataactaaactccaactttgtagttgtatatattttttgtatatatgttaaagtgtcaaacgaaaaaaactccaacttagtagttgcgtatatatgtgaaaattgataaaataattgcatgcaaaatgtaggatcaaataatttgatttgactacgatggccaaacacgttagatagttgggcagtcgctacaactaagcagccacacttattttacttccatttatcatcaataatttgtattatagttatttttgtttaatatccaagagagattcataactctttgtttgactttgattaaactatagggtagttagccactccacattggcttctaaactatatttgtcagcctttaaaattaggttaggtggccaaacgaaaactttttaattatttttcttttattgtgagacatactaagttagaagaagaaaaaaatcagttacttttcaaaaaggtaaatattggcttaaaaagccaaactatctacgtttatattttttactcaggatttgattgtatgttgataaatattttttttctttttctttgttaaacaatttcttgttggtacatttaatattttccaaaattattacgtctacgaagaaacctttttttttttgtaaaataaatctatacgtacggaagctttagaacgctagtatatatactttatagtaacgtaaataatttgttcaagtgagatatatttttacaccaaacaaccactatatttacaaaacattatattatctttcttttattgcttgttaccttttataattatttttagttcaaaataagtagattcataaattatttgcacatttataaaattaaatcctaatagtgtccatttttagagtcattttaactatttccaaatttatggatatgttctatatagtctccattgtataagccataatgaaggttcttaaaatttatgcatatataaggagataaatataacaaccttataaaaaggagattcttaataagagataaatactaaaaattatttccatgatctaaaaaaataactatattctgaataccaaaaatatattaaagaagaaaaaaaaaacgcttatagagagaaagagagtgcgcgaccaggtcgtagtcgtgctctcgttttgcaattcacgtttcctctctgagtttcttcgtcttcttcctctcgtctctctttctctgattctctcgtacgttattcctcttcacgagtttctctcatacttcgttattaacatcgcccgttttataccccaaaccttcttttaacgccttcctctgtttctctcgtcttctcacaattctcaggtgcacaaatctctctctctctctttctccatgtgttgtttctaatctgatcatgatcatcatattcatattcatcatcatcatcaccaatcttctacataggtttttaactctgtttttactgattaggaccattttgtgatttttcctatttttataaaattgaatcgaaatcggaatcggaatttggatcaaaatgttttcttgaaactgatcggcgttttagtcaattttgatgactattgttacattttcaagactctttctgccactttttgttttactctgttctgttctttttcctaatgcaactttttttgactaaagtattttgttataatcttttcattatttttatataatatatttataatttatcagttgaatgtaaaagtaactccctatattctcacttttacataaatggtttcataaaattcaactttttctaactgattaaggtcccacttgcaacatatattattatctctctgttttctccatgcatataaaaatgtatgcagaatttggtagctttgaccttttatatttctgttagcaataattttatttttttggtaaattcttcctttgttttgcagcaatctccagcaacatgatcttcattgttgctagatactgatttttttttgtgggattttctatgttgctttggtctcaagtctatgtttcaattctaagaccagaacaaatttgaggtttttttcaatgctaaattcgtctggagtaagaactcaacgaagaagcccaagacctttgtctctaggaggtagaaagattattactccaacaaaatttgcttatgatcatcataatcctgataaagttttggattttgtagaaatggattgcttagaacccaaaacaaagaacaatctcactggaaagcttctcttagtagcttcactcttaattttagccattattgtgatcagtcaatcttcaagtttcacatctccaagcgcggtacctccttagtcacatactctaaaaaccttcgaaacttttacattttcataatgttttttttttggcggttttgttgcgtttgcttttagttttctcaaagagaggaaggagtgactcatgtgttagtcactggtggtgctggttatatcgggtcacatgcggctttaagacttcttagagattcataccgcgtaaccattgtggtaacttagactactttcaaaattttcaataactatttgatgaaatttgaatacattaattaacttttgtatcgcaacaggacaatctttcgcgtggaaatcttggtgcggttaagactttacagcaattattcccgcagacaggaagacttcagttcatttatgctgacttaggagatcccttagcggtatctttttataaccttttgatattttttatcctttgaaggttaaaagttttggtttctgtttttttacttatccgttgaatatattttcaggtcgagaaaatcttctcggagaatgcttttgacgctgtaatgcattttgctgcggtagcttatgtcggagaaagcactctttatcctctaaagtagagttcttatatattcgtgctatatatctaaacatagctgcaagagtttagttttttgggtctcattgtttacatatttgtttattgcagatattaccataacattacatcaaacacgttaggagttcttgaagctatggctagacataaagtaaagaaactgatatattctagcacttgtgctacatatggagagcctgaaaaaatgccgattactgaagacactccacaggtaaataaccttagaatttgcgagtgatgaaacccctttctccgtgtctttttaatggaaaataatgtatctaggtaccgattaatccatacggaaaagctaaaaagatggcagaggatatgatcttggatttctcaaagaactctgacatggcggttatgatcttaaggtttggtttggttctgttcattgagtactttttgttcttactctatgatcaatgaaacaattatgcaaatattgctgatgaaccttataaacttttgtagatacttcaatgtgattggttcagatccaggaggtagattaggagaagcgccaagacccgaacttcgtgagcaaggaaggatttctggtgcttgtttcgatgcagctcgtggtttcattcccggactacaagtaaaaaccattattaaaaaaaaactataacctataatcatatattgcaacatcctttatatgatatggtttgtgtaggtgaaaggaacggattacaaaacatcggacggtacttgcattagagactatatagatgttactgacctcgtggatgctcacgtgaaggctctcgagaaagctcagcctcgaaaagtcggtatctacaatgttggaaccggaaaaggtcttgacttttaacattttcactacacaataactctgttttacttcttcttataaccgaaagattcttaagtccaaactaatctccaaaacatccagcttccatgtagtcatcaagaagctgatttgtctacttccataatttgaattcattgcacaagatttgagttacaatctgacattaaccgttttgtggtttggttaaacagggagatcggttaaagaattcgttgaggcatgtaagaaggcgacaggagttgagatcaaagtagatttcttgcctcgacgaccgggagattacgcagaggtttacagtgatccaacaaagattttgaaagatttgaattggactgctcgattcactaatcttcaagatagtcttcaagttgcttggagatggcaaaaaattcatcctcatggatataattcttattaaactaaaaaacagagcaaaacacatcaccttaaagagcttttattgttttcaatttcgttttataaattggcataatgttttgtgggctatatataaagagtatattttaccaaacgattaaacgcagcgttccaaactcttatgaagttattgggcccttcggcccaaataaacagaaattaagactactttgagaatcacaaagcttgaggagggagataaccaattggccacatgaacctaaaacactctttctttgcttcttctctgccgtctcatcttctaacacacaataccctttacgtgatttcactcgagagctactaatttaaggttctttgataatctgtttcttaaatttcttgtgagattttcggttccattttgcgtgatggaggaatccgtgaaacggtgtagaggtttctcagatgcgagagaagatttgatgagtaaattaactgacgctttgatatctcaggtactcttttatcttccgacaaaggaagctgttagtactagtgttttgtccagtaggtggaaaagtgtctggcttttgattcctgacttggatttgaactctagtgcattcccaagtaacaatgcatttgtgggttttatagataagtttatagatttctctaagatagagaattcatgtttgcacaagcttaagctaagtattcggaaggagcatgagaatgataacaagtcttgtgtcacgcgatggattggttttgtggctacccataaacttaagcatcttgatgttgagtgtcttctttggaagaaaaagtgtttggaagtgatgccattaaccctctatattactcagacgcttttttacttaagactccatcgggtattgttgggtaatgttgagtctatttcattaccttgtctcaagactatgcatttagaacaaaatgtttatgccaatgagacgtgtctagagttctttatctcatcttgccctgttcttgaagatctgagtattgttagaaaggtagatgataatgtaaaggttttacgagtgctttcccaaacactaaccagtctttttgtagcttttgattatggtgagcaccgtagaggctttcatgggtattatagcttagactttggagttttgattgatgcacctagactaaaatatttgaagatcggagatgatatatcgcggagtaaaatcgtaagcaatatggattccttagccaagattgaaattgttggcctcttttatattgaacgtgcttttcataacaaggtggcccgtaactttttcatcggtatctccagagttagagatatgatcatctctgaccgtgctatgtgggtatgtcaatgataatcatatatatacatgtgatcactaaattttacttacccatattcttatctttttttttttaatgtaagcagttcatgtctttctacttcttgagagaagaatcaacaccccagttttgcaacctgtccagtttggaagtaaaaatctcatggtcccgagggataaacctgtcgatgtttcttgataactctccgaatctaaaatccatggtcttggtgatttattgcaaaaacctagaggttaaacttaattaatcttcgtttaaaatgtttttgttatataataaatctacatatattttcattaatcttatgtattttgcagaagtcagtaagtttctcgtccgtgcctcagtgtttgttatcatccctggagtttgtagagataaaaatcagcagattcggcataatctctcttggaattggaatagcaaggttctttgtagagaactcagtagttctcaagaaacttgttgtgcattcgagccgtcccatgcgtaagaaaagtttggttgccttcgagaatctccttgcattaccgaggcgatctagcatgtgtcaaatcatatctgttgttgacggttataaagacttttaggcagctctttgataagaccaaaactagcatttttagatatttggacttggattttgatttttgttggaactacattttgatgttatgagtgaaatttttatttaaagtaaaaggtgactaataatttggaagattcaaagattgtgattctgcctcaagtggtttggttctccagccgggtcttgcggtggggaaaatgagaggtgtagtttggcagcggatgacgcctatctgttagaaccatctgggaggtaatctatgagtagggctgtcatttggtcatgaccatgtccatatggccgtccgagcggacactctctttctgttggctttgatgttgctattgcagccatctaggtgtaacaagccaatgcattcttttgtgagcgcattggccgattagattagcatcgatcaacataggttttttcataatatttagtattgaattttttatatgagaggtcactggttagtgcatagctccttcgtaaatcatttataggaatcaaaaacaaccaagatatgagatgtgaaaaacatactaatccaaatgtgcaatttagttaaaaatgttatagacaactgttaagtaaaaatgaggaaaaagtgaccagttattaatgatgttattatatcgttgaaaaattttgatacaaatcggaaacctaatcgtattttccaacttaaacaaagtaaaagaaaaaaaaaagaaaaaaaagaaagcaaaggttaacattattggtttctaagttctaatttttagtaggaggctccgccaacagtttttgaacattgttcctttagcataggaggaaaaaacggattgaacggaagttgcggaatacaattggtttcggcttccaaaattgctttgcaacaagctgaacctatcttgccgaacttttctaagagtatggattgcgaaaactctacgatgcaccctggaatatttatcacagatgataaacattttgttatatcaggtaatcctggtacaccgggactcggtagaaatggaaatggaaaaggaaaaagtgccggaaattgtggtaattgggcatttacagacaatgcaatgcataaaaccgctagaaataagatcacgttttttatagccataataaaaaaaaaaaatgtttgaaatattccaatatataattctttctcgtgtttgttgttgagtgataaacaatactaagatcaaatttatttataggggaagaaatgaactatggtggtactaattgaatttgtctttatgaaacgtttttcaaatctttattaggtaatttaataacaggcagtttcttattttgattgagtgagcagtttctaaaattaaaagatagtccacagccacacacctctatgagaaatatttattactttactatcgatgagaggagatgatatatgtataaccgaaataattcagagtttaatccaataaatccagttaatattaatccttcggtgttggtagatcttttgttcgtttctccctttttttttattctacagcaaaaatggtctcttgaatctaaagacaatactctatgtacaatatctcggagattcaacgatttaataaaagtttaaagagaataataataattttttcgctcttagacaaaaagaaatcattaaagttttttcaatgaataataataaatttacaaaactatactatataaattaatttgacaaatggtgaaaaaaaaaaaaaggcaatacacctatgttatgtatagcctaacccattctaactaggcccaaattgaaacaaagcccaacaagaaggaaagtgtcattcattctttctcgaataaaaccgtagaaattccccctcttccccaattccactgccaaaactcttcgcttaattctccggcgtatacaagtcgccggcaaaaatgtcgatgtcgaagagctccaagatgcttcagttcataaactacaggatgcgagtaacaatccaagacggaagacagctaatcggaaaattcatggcgttcgatcgccacatgaatcttgttcttggcgactgcgaagagtttcgaaaacttcctccggcgaaaggtaataagaagacgaacgaagaaagagaagagcgtcgtacgcttggtttggttttacttagaggagaagaagtgatttcgatgactgtcgaaggtccaccgccacctgaagaatctcgcgccaaatctggatctgtaaccgctgtggctggtcccggaatcggtcgtgctgctggacgtggagtacctactggtccattggttcaagctcagcctggtttatctggtcctgttcgtggaattggtggacctgctcctggaatgatgcagcctcagatctctagaccaccacagattattcgtcctccgggacaaatgccaccacagcctccttttgctggtcaaggaggtcctcctccaccttatggtatgagaccaccgtatcctggtccaccaccgcctcagtatggtggacagcaaaggccaatgatgattcctccacctggtggtatgatgagaggacctcctccacctcatggtatgcaaggaccgcctccttctcgccctggaatgcctccccccggtggtgctccgatgtttgctccgcctcatcctggcatgccacctgctccgccaaatcaccataatcagcaacattgattaggtagctgtttatcaagttttggaacactacttgattatcctttattatctgctgatggttgcttgtaagtgtagcttggctatgatgtgagatttggttgaaattgaacttattttgatttagcttggacttgtgtagtgactgaagtttataaatcataagttagctgcagtctctactagtctgctgatagtttatttgtgaaacctttaacttacacaaaaactttcttgtaacttgaactgataacttacacagaaattctacttaattagcctttataatttatcagcaatttctagtctgcttggccatgtgtgatttgtgtggaattgaacttgtcttgattagcttgggcatgtgttgtgagtagtagtctgctcatgactgtcttagcttgcacagtttctaggttgttgatgagtgctttgttgtcagttgcttttcttcttatgtttccttaagagtatgatcactttaaaaggtttgttactataaagcattctagaatcatcacattgtgaatcctgtaacttacactcagaaactctcttgcctgttgttctaatgagtttgaaaaacccttattacacttttagaagcatgaataactcatgatgaacttctcagttcacttttaaacgtgtttaatatcttcccaactagtagaacctttatgatccttgtttaaggtttgttcgtgaattttgttttggaaagctgtagatgttgtagggttcattagctatattggaagaacttgtggatacatctttttgcccttgctctctgttggcatatgatattggatgattttttttttttaatatctctgttagaaagatctgctaagtacaattttctcgatctggattgtaggagtcacttcatctacaacgaaagcaacatccacatgattgagttacccctcggctagtcgtagcgtttttctccgtgaagctcagagaattgatgagttcatattggtgatttctcgtggaaaaagcaactgattttagaaatagtgaacttgtaggagttacaaccttgctccatgaacttgaatgtattacttgtaaaagaggctctcaatggttttgactggcaattcggttctcaacatatattaggctatgttgctggttatgtacgtaacaaatatcttacggtagtcttacactggatcagacacccaccctcctaaacatgcaactaaacatgcaaatcccgatcgcttgatctaaaacttccgtagaagctaaccgtttttttttaataatgagtccttgttcaacaaccccaccgatcgtatccaggcctttgaccacattatctacgtaattttaaataatcaaacatcgagcgatgtgcgagtttactatgctgaagggaaaagcttttactgattgatgcttggcattggagttttgagtatagcatcaagaatgttctgaccattgctaatgactataggaaaatccctccaaaagggcttgcaactcctacaaacgaaacgagtcttcacacaatcaatagaaccaaaaccccgataaataatttgtgaaagaaccagtttctcttccctgcattgcttgagtacaaatcatctgtcttcccagtcacgataaactaaataagagtgcaagtgaaaatgaagaagtcacttacggggattttgactcgtactggtcctgcaatttagatttacaagatcctttatttcgatatggttctgcagacaatatcattgttaatagaggtttaattgtaagatatgctaatagagagaccaaggattaaagaagataaagaagaccagaggttggcaacaagatcaaaatgcactcgaggaatgaagtaatatgcgtatacaaacatatacaaatacttttcatacaatgttagcttcgctgtaatatctacatataaacacatagatgtatactgtgacttaattgataaattatacatattaccaacatcacatatatagtaatgataatcatactaagtgacaccacacaacatgcacaccaaacttgtcaaatcgacccaactttaaaagaaaatgtttcatcatatagcattaatgtatttcagctcttgtcatgccctaacttcagtctagtgtttgtctcaaatctcaaagactgcaaaataacagcctccactgacctctgaagctcatggacataaagggatttaaaagagttggattaggccgcattcgcttaccgcacacttgtaacgatcagctctgaactccaaaacgaactcactggaagtcaccactagttcaaattcgaatgtatacagattctccattaaaagtggaccttgaagatggctgcttggtgtgtacagaacaatgtgtccatctggttctcgagaagttactagattcatcccccaatttggccatttgttttgaccctcaactagcaaaaggcaagctttaaatctcaaagattgaagaagatacttctggttcaacttcactgttaaagaatcaccagtagcgcggtacgtgaagtatgcaggcactttttcacctggtaatatcgcatttctacaagccgatgtctggatgatgagatctcttgcttcttgattcagtttgaagcagttagcgaagttgagaacaatctttggattttgaaagaagcaatctagtctctgcaccagagactcacaatctcctgcatctaggattagggaatctggaaccacggggtgcgagacaagattgagctctagcaaactagagcagttactgacatctaagtatgagagattactgattctccagatggaggaagggagctctaccaaacttgaacatttcataagagacaaactttgaagattaatggcattctcaaccaaggaagggagctcctttagacttgagcatccgtttagatacaatgattggagattagtgatattccaaatagatgagggaagctccagtagattcgagcatccatcaagatacaatgtatcgagattagtggcattctcaatagtgaaggggagttccattagacttgagcaatcactgagatacaatgattggagattaataacattcccaatagaggggagcttcaccagacttaagcatccactgagattcaaatcttcgagacgagttaaatttaacatagaagaagggcattccatcaaactcgagcaattcagtagatgcaattccttgagattagtgttatttccaatagaggaagggagttgcaccagacttgaacatccatcagcatatactttcttgaggttaacaatattcccgatggaagaggggatctccagaagacttgaacaaccactgagatttaactccttgagactagtgacattcccaaaagaggaagggagtttcaccaaactcgaacatctattgagaaacaacttttttagatttgtgagattcccaatagaggaggggagtttcaccagacttgagcaatcaataagatccaattccagtaaattagtggcattcccaatggaagagggaagctccaccaagcttaaacaatttatgagtctcaattcttggagattagtggcagtagagaaatcaggaagctccttcaggtttacacaaaaactcaaatccatccatttgaggtttctaatgggctgtccagaaaaataaaggcagcatgaatatattgtgaacatagagtaaagatcatatggcttcaaacacacacatatacacttttaaacaattggataataatagcaatgacttacttcatttccgtcccacagcttctcgagcatgctgtctcgcatgtttattttgacaaggaactccggattaaacttgggaggcaaacatgtcagtggataacgttcccaatgaagtagtctaagttttcgagatatatggctcaaaccttgcggtaagtacaatatgtcgtgacaacgatcaccatatggatggtggaatcttaagaactggagattgcacattctttcaaaggctctttcactaatatttattacgccctcgattacaccagataactcaagatctatgcctataagagttctggtaccctgaaatggatcaaaagaaataagtatactatttgtacaggccaaagacaatgaaggacaaatattaaaacttaccgtatcatcagtgagtacttcacaaatatcttcagtatcaaccaagaactgacgtttcccaggcttatgaatagattgcttacgaacaatgtctaggcctagttgtactagcaaattatgcatctctatatttcccaagttcaaagataagagagatttatctgccaagatttggagcccttgcctcatatctacagacttctttgcaagaaatacttccaatgtctcaatcctttcccttctgaaaaaacaggttatgtgaagaaataaatctttctcttgttcagctaaggagttgtaactgaacttcaaaacgctctcaatatcatcgtcaaggctggtccttagccttggtattgatttcgcccactcctgcttcgacattcgccgtaaatatgatcccataacccttagtcctaacgggagtttaccagcaagtgttgtaaccgtccgagcaatctgctcaaaaccaactttaggggacttctcaccaaaagcatacatgcagaagatttcaagagcctcatcagaagttggaaaatcaactttgtaaatatacttgatcccatgagcttttaaaagttttagatcttgagttacgacaataatgcgacttccaaggccaaaccattgtacatctttcgccatggcatcaagttgtactaacccatcgacgtcatcaagaactagaagaactttcttgtccttcaacctctcttgggcaacacctaaatgaggaaccaccatatctttctggttaatcatctgagacaacaattctttctgtaactgcagctttgcactgtactcatcgtgacaaggtcttggataacgtactttgatgttgtcaatgattgcgcccagttggaactgatgaaagagtttgttatatagaactctggagatggtcgtcttgccaataccagcaggaccccaaatccctatcattctcacttcttccagatcaagttgtaacaacgaagttatctccgtcgtatgagcttcaatgccaacaaactcatcaaaatcctttgatggcgtaaaactcaacacatcggagacatcttttgagattttaatgatcatatccgcttcgttttccctgaaagtaacaatatatatcatatttggagttcatataatcatacatatatacaagaaaagtatgacacaaattatgcattagagaggaaaaactaccagttgcgagaatcctccccgagtatatttgcagcgctggtcaaagcttgcttccatctctgtaccatctcctctggtcttccaacacaagtttttttaaaaaccttcccaaaatctcccttctgcttcctcacatcagatggatccacatcataaaaaacggtcatcactgtttgacccaactcttctctgcatttcataatctccaccaattcatcaagacaccacttcgaagaaccatagttcctcgaaagcaagatgatcgcgatcttagatcctctaatagcctgtaagagctcaggaccaatggatcctcctctcttcatctcattatcaatgaacggtgtgattccgtttctttgaaactccttctgaatgtgactgagcaagcctttgcggacatcttccccacggaagctcaagaaaacagggtgcaaccaattttgagacaaagaagaagggggagatgaagaagatagagaagaagaaatattcttatttcttttacgaaatctgaatattctataaaccaagaaacatgaagaatccattagtatgattgaaagacgatcaagatcacaacggttttttcagagctattaacaaagaagctttgcacatgttgacacttgactttattgacagagaatattgacattagcaaaagaggagggttcatggatgtttcctaccaccaaatataattatttaatgatattttcatggaaaatttgtggtatactacatcactgaccctgtaacgtaggctataatataatcttaagaatttttccaacatataagatgacgacagaattatataatgagtacaatcaatttataccttgattgttgtttggaatgaactgattatagaaaaagaacttgtagaagttacggcattgctctatgaactgacttataaattgactggcaaaatggatcaccgttttcggtaatgtgtgagacgaactacttttgcaaagtctgtccataggttcgtacaccaccctccaatgcactggtctgcaaggtaacacttcttacaacagtttcttctgcaatcaccaccgtgcatctgtaatgccaaaagtagaaaacagattcttactactgaccaatgacatactaaacctgactgcttaatttggagaaactaaccgagttttgataattagtccatggtccacaaccccatcaatcttatcaaggcttgtagccaagtcagctgcaggattttgcatccatcaacaatagagaccattgcacaagtttcaatggttacagtataagcttttaccgaggcttcgaatcggagttgtaaatataacatcaagaatgttgtgaccatcactggtaactataggaaagtctcctccaagagggccttcattttcaacagaagctcttctccacaccttttccaccaagtaaaatacaatgactcaaacaaggcttgacacaatcgatagaaccaaaagcccgagaaagcatttatgaaagaagcagattcacacctctgcatcgcctagatacaagtcatctatctcctcagctatggccaaccaattaagctgcaatcaaagttcaaggaataaaagttttgaatcatatcaccaagggattaaaacgaagttcatcagtagaaatttacttacagattgaactaaaacagggatagaaccttcaagaccggctttgtattgttcttcctttatcatgaagactgcctcatcagctacttttacaatagactgtattgtaaaatctctcttttgtcagcccaaagctaagcaatgagtattcaaagactgcaaaaagtacacgaaactgcatacaccttttgtttcagaatatagtcatcttcctgtgaacttctccgccgtccaataactgcaataagcgtattctcttctacagcatcagcatcatgaaatgcaaaatcaatctacaaaagtgtcacactgcaaacattacccctagatgcagaaatagatcaaaccgctttagaaaacacagagaagcagctacctgaacaccatcccggtaatattccaaggggattccatactttgctgcttcactcgcacttcgagcagacctgaaaaagggtcaggacaaatcatcatgaagcctatcaaaactcaactcgtaacataaaagattgaatatagagagatcaacaactgaacaaacaaaaagattgatactttatttggagtcatagaagataaccagcagcagaatcagaatcaaaagactcacattggtacaccaacaacaaaatcattatcgaagaactaatgaatagggaaattcaacaactgaacaaacaaaagattgattttttattggattcatagtagataaacatcagagagagaagcaaaagacttacattggtacaccaacaacattatgtaaagaaccagaaccaagttgttgacccaaataacgtatagcaaaatctgaagcttctccagatcctaaaccaataatcatcccactctttacataattatccacctgaaaacattaccagacaaaagttttgtaatcaagtatcaatctttcttcaattttatgaattttcaacacaatttcaaacaatacccatttgaaattgagtttcaaggattcaattttcccgatttaacccttacagtgtgatgagctgctctgagaagaggagaaacctccggagaaagactggcgcaaactggaaaacgtttgaaattacgacggcgcgtgaaaaccacggacgacgagagtgaaaatggagttgatgctgtcgcagtaaccattttttttgtgtgggaagaacgatttgagtcactgagtcgtgactcggtggtttttaccgctcttatctcccgatcagttttgtggtgcatgtggagtacgaactacgacgatattacacgaccattttctttttggagaattacgaaaataggctaaattatatatattttgttccaaaaaaaatgataaaatatatattaaatatttattttcatataattttataattttaaagcaacacataaattactaagttccaaatattatttttgaatttttaaacctaaattttaaattctaactatatccttaaattttattttatggtctttgagctaatccgtttttttttaatctaatgttaaattatattagaaaaaaaacatcggtttttacaacaagtacgacaaaatttgaatttgagaaaaaactgaaatttgaaaaattaaataaatttttaacttctagaggcaaaccacatttagagtcctctatgatatctcctatctcctaaagtctgataaaggaaagagtgtttcaggtttgcttatcaatccaacgaattagtcgagctgtctgtcgtattagaattctccccatgtcttctaccattttgttctcgccaaatggtgtagactgacactacatatcacatttgtgacgtattaaaactatatatcacatttatgattacgataaacagtacctatcaattttacgatacagttctctgcaacattaaaatccacaatggacggttatgcatatacgatatattttgatgaaaatgtttttctcaaacggttctacaaatacgacattctctagatgaacatgttctccatgaaaacgaataactctacgtgccacattctacaacctttcattaagtatacatccactaattggcaagaatctacactttttgggaatcaaaaccctatcttgtatcattttggatatcttattagtattgacgatccaacgaggaaaaaaataaataattgaaagaaaacaaaaaggagagtcatttaagtttgatcgcacttatgagtgttccttgcttcctttctcctctactttaagcacatgtgggaaccaaattcttcgtaaccactcaatttggctcacaatttttcaatatccaataaaaaacagtttcatatattttctcgtgagattattcagttcttcctaatatctatctatctctatattacatatatacaatattatataaatacgcactcttctttcaccgacctccttacaccaaaaaggtgtcaattccacttgttcaccatgaatatgatttaatgggttcttcttcttttgcagctttctttcttttccttaaattatcattgttttaggtggggttttaagtgctttcatgactcattcattctctgtataaaacctagtggaaagtgttaaatcaaaaacccttttttcccactttcttaatttagaagggagacgaaaaaaatggttagagtaatgttggtgaggtttgggtttttattacttatgatctcttttgtgtttttgtctaataacactttgggacaacaacaagacgatgatgatgattctgctgtgtacattgtcacacttaaacaacctcctattgtccatctctttgaagaacaagagcttaaacacaaaaagtcaaagtttacaccaaaattgcgaccaaggtactgataaaattctattctttttgttgtcattagattctctgtgaagctttagttaaaccctttttgtattctgcgtttttattataggaacaattcaaggaaacgtcatgggaagtcaaagataccatctgttgttcaatctcatgactctttcttgagaaagactctaaaaggagagaagtatataaagctttatagttaccattatcttatcaatggatttgctctgtttattaactcacaacaggtaaaaatcttgagttattgataattgtagaaataatcttgagttcttgatcttgatttttttgtgttatggtttttctttttttaaggctgagaagctttcaatgagaaaagaagtagcaaacatagtgttggattactctgttaggacagcaacaacttatactccacagtttatgggtttaccacaaggagcatgggtcaaagaaggtggatttgagattgctggagaaggagttataatcggttttatcgatactgggatcgatccgaatcatcctagtttcaatgacaatgactctaagcgttcatatccaatccctaagcatttctcaggtgtttgtgaagttacaccggattttccatcaggatcttgcaataagaagcttattggagcacggcatttcgcgcaatccgctgtaaccagaggaatctttaactcatctgaagattacgcttctcctttcgatggagatggacatggaacgtaagtgtaactgttgaatgtatcatataaaaacagagtttgaagcttatagattgttgctttggatatatatgcagacacacagcttcggttgcagcgggtaaccacggagttccagtgatagtttctaaccataactttggatacgctagtggaatcgctcctcgtgcattgtaagtaaaataataagacttagatcaatgtcgaaatctatacaaaactaacttaaacttttatgtttttgaactttgttttcagtatttctgtttacaaggcattgtataagagttttggaggttttgctgcagatgttgtagcagctatagatcaggtttacaaatcaagaaactaaatgtgaataaacattttagcttttctttcaaatatgaagactttaatataatggttgtgattttttttcaggcagctcaagatggagtagatatattaagcctatcaattacaccgaatcggaaacctcccggtgttgccactttctttaatcctatcgacatggcattactttccgctgtaaaagccggaatcttcgtagtccaagctgcgggaaataccggtccagcgcctaaaaccatgtcttcttttagtccttggatattcaccgttggtgcttcttctcatgatagagtttactctaattctttaaccttaggaaacaatgtaactattccaggcatgggattcgcaagtaagtcattaccatctcaaactataactttcaacgattcaagtcgaagattatggatttataacttgtgtactttgtttctttatagttcctacagatagtggaaaaatgtacaagatgatatctgcttttcatgccttgaacaatagtacttctgtagataaagatatgtatgtaggtgaatgtcaagattatgaaaacttcgatcaagatcgtgtctcagggaaacttttgatatgtagctactctgctcgttttgttctcgggctttcgactataaaacaagctttagatgttgccaagaatctatccgcgactggtgtgatattctatatagacccgtatgttcttggttttgagatcaatccaacaccgatggatatgcccgggatcataattccatctgtagaagattccaaggtgagaaaactaaagcatttgtttaaaggtttatacaaagtttctaatgatctaacgatatggttttcttgcagactttactcaagtactataactcttctattcaaagagatgtaaccactaaagaaattgttagttttggagcggttgcagccatagaaggcggtttaaatgctaactttagtaacagagctcctaaggtaatgtattactcagcaagaggacctgatcctgaagacaactcttttaacgacgcagacgtattaaaaccgaacctcgtagcacctggaaactctatttggggtgcttggagttctgcttcaacggattctaccgagtttgaaggtaaactatatacaagtgatcaaaacagaggattttcctattgacgttttcttctgttttgctctgtttaggtgagaaatttgcgatgatgtccggtacaagtatggctgctcctcatgtagctggtgtggctgcattaatcaaacaaagttatccacagtttactccttcaacaatctcatccgcgctttcaacaacggctctcctaaatgataataaaggcagtccgataatggctcagcgaacttattccaatcccgatcaaagcctctataccgcaacaccgtctgatatggggagcggttttgttaacgcaacggcagctttagaccctggtctagtttttgatacaagtaagtatgtattaatattaggtcacacaactaaaaattttatttttcaacccaaaatatctctttcctatgtaggttttgaagattatatatcatttctttgtgggatcaacggctcggatacggtggtattcaactacaccggattccgctgtcccgctaacaacacaccagtcagtggttttgacctcaatttgccatcaattacagtatcgacacttagtggcacacaaactttccaaagatcgatgagaaacatagccggcaatgagacatacaatgttggttggagtcctccttatggtgtttcaatgaaagtatcacctactcaattttctattgctatgggagaaaatcaagtacttagcgtaaccctcacggtgacaaagaacagttccagttctagttttggcagaatcggattgtttggaaatacaggacacattgttaatattcctgtaactgtcatagcgaaaatcgcttcgagctgatgatagataatttttcttttaccattcaattgttaaaggtacattttttatttgatgcaatgtaaaaccatataattaagtaaactctaatcttcaagcgtttcgtccatctttgttgtctttgcttggagaagaaggtaactttgcggattcctcttgcgctccagatgggtttgttgcaatattagggttaaccatagtgaaaggtgggtacttagggaaaggccatccctttaatggaaacttgtgactgaagaaaccagcaatcatggattttgcatttccagagttgatcttgttcattgaagacgaattattcattagggtttgagctgattttggttctgatgattgaagttttgggccacggagtgagagtgcgggttgggaactgaagaggaagaagacgagaaggagtaaacagagagaagaagcttttgagattttcgacattgtttgctttggtgtttttgagctcttgtttgtgattgtgttttatggggtttcttggtaatcttatatagaagtggtgattttttgagtttgtagaagagatgtgtttttaacgttgggattctacttcttacctaaaccagtattcgaattaaaaaggttcatgatttgagcatgaccatgagagatgatttatggttgataacgagtatgggtattgataacgattaacgagtataggtaatggatattttagtaacctaaccctagtcgtgagaattgttttaagaataaaccataagaagaaggttttacaaagaagagacgagccaaatgcttacacaatctgatcaatcacattcactcgagatacacaccacacactcaagaagaaacaaagaagtaagaaaagaaaaagaaaacaacaggggaacgagacacgtgtgtatgttttcaggggacgaccgagggagatgcggtggtggagcagcatttattaggttggacgagacgagagattgacgcggcggagatgatgagcataaggattacgccggcgaatgcggcgattaatgctccggcgccgtgatcacagtaagtggcgaatctatcacagattttgtcccatctcgcgtgtttgttcccgttctttcctacctccgccatgaacgccgccgcgtttgctgccgccgaaattagagtcacatttagctgttttttccgacaagaagaagccaatgtaagcacaaatatgagtctactcataagtttaacactaaaactaatataaaccataccaaaacatgcattaaacagaatcgaatctaaacatgaaccggattatccatctctacattagtttaatttagcaattaatcgattagaaaacaatcaaccaaaaaaatcctaaacatcatgtaatcaaatgaaatacttcttttaaaaagtgtgaataatactaaactaaaatgattaaaaaagtatatgaacgtaacatctccaactagttggtctatattcgtgaacaactaaaattaagacttttagaagaaaaatagtaatttatacaaaataatacatatgtgtgtatatttatatatttaccatgtcaagaatggcgactgagagaagccgaaaaccagtgaactccattttccctccaaatatctgaagagcaatcatcaacaagttgtggaagctcaccattgcattagctactacgaaaaaccttttatacaccaaaatcatcaaaaagattagtctcaaaatcaacatttagaatacagattgttaattaaagtgttgttaaggcttacacaaaagctggtgtgtggtcgaacttagcagtaaaagtagcttgaattggagtatttccaactttgcccacaataaaagtctttgtctctttgttgagtcccattacaatagctgcagataacgtggctgagaaggcaagtaatctcagccctaagagtattttgcagctcttaccgctcgtagcagccaatgtaagctttgaaaccgccattgtttgaagatgaaaatggtcaaattgtttttgttttgcaatgtgtagagtgtttgtgtctttatatatattgagtatttgagtgttagtgattggtcttttgtctgaccatctaacttttggagggttaattttaggttttggtggttgtgaagattcagtgaaaacgttagatttgaaccttttttttttttttttaaaatgttttgtggcaagttaacttgctcttgggacagtctcatctacccaaaacttaaaccagtttgactttttgacattttgtggaaatataaactcaattagctgattgcgtttactgtatatctttttaatgaacctactaccactttctatattttaagaaaaaacatgttacttaaatgctaaaaaaagcaatattattttttgaaaaaacttcatttaaataaaatatgatgtgaattttcaatttttttttttcaaataaatgcaaacttaaaggctaaaattgcagttgaaaccatgtgaatcttatgtgattttaatgaactagttggaactttttgcttgccaactcggataagttcttttttgtcttgttttattattatttttaaaaattttaatcccaaaaagtgtaaatcttctgtaaatcttctgtaaacacacaaacacaaaaccggaaattgaaagtgaaagcagtctatatagaagaaaagtttctgcattgagttgatttgtaaagtttagagatttaaatgaaaaccagagttctaaactgagaccggttaaagtcaacacagatgaataacatgttggatatgataaaacattatatcaaatgtgaaaagtgctgtgtaagctcaagagtctaaattcaataaaagagataaaatccatatgtttataaacacatttttttttttttttgtgcgaaatgtttataaacacattaaaacaaagatttttaagaaataccaatatttgtggttctgaaaaaggaaccctgaggttttgagacttaattatgaacagatgctttgtaggtgttacgtaaacatgagaagaatacaaacacaacaaaataggaagaaatcaatcatttttcacacatatatccgataagttctttcgattagtttttagtttttatcggttgttactaccacgacattgctcaccttaagtgttctatatcactccccacagttcttattcgaatgaataatactttagtacaagatatgctaagcaatacactcaatacataccagtttctcactctcgtccacggacaagggattctctacaacgactgttttggtttgagaaaataatgaatagagtctaataatgaatagagtctaagtagtcaatattttcttactaatgttactcgtctcatgaaggtggttgtggactctcttttaattttagtaactgctcattcgatcaaaacataagaaactgcaagtttattgaatacttaataaaaatttgaaagacgtttgtataaagacaaatactattagtaccaccataactcatttcttcccctataaataacaactgatctttgtattgttaatcactcaacaacaaacacaagaaagaatcataaattggaatacttcaaacatcttttttcttttatcatggcaatcaaaaacgtgatttttcttctatcgattgtatgcgttgcaatgtctgcaaatgctcaattacctcaatttccggcaccgtttccttttccatttccattcctacccattcccggtgtactggtataacaaaatgtttatcatcctttatgaatattgcagggtgtatcgcagagttttcacaatctatactcactggaaagtttggcaacataggccctgtttgttgcaaagcaattttggaagctgaaaccaactgtattccgcaacttccattcaatccattttttcctcctctgctaaaggaacaatgttcaaaaaccgttggcgcaatttctcatacgagaaagtagaattcaaaaaccaataatgtaatcgttgctcttttttcaaaattagaaaaataaggttaggtttacgatttgtattcaaaattttcaaacatctaataatagcattataaaaaaataggcacatttttgtgaacagtcatgaaatagttcaaagtgctagccatctacatattgaaaaaagaagcaattcttatgcaaattctaacaatattgctattttgatactcactaagtggatattcacattaaaaatagttgagcatcgttctgtaatattcgtggtatgattacaagatctatctatgtaattaaactgaaaacggagcagatatccgcttttaaaaaattgtagtgtgtgattattttttatttttttacgaataataatttttaatatttgttttgcatcatagaattacatatatccagacttttaaaatcaaaatgaaacagataacaaattgaagcgaatttaacagataatttgtctcatccctaatgtaatctacatttccatcttctatttacacaatgagattttagatgataaaaaaaataaaactaaccagagtttttgtaggttcatacaatatacaaaaacaaaaacaaatctgaaaacaattaaaattaagaaataggtttttttttttgttggacacaaaaattaagaaatggataaaaagaaggaatattaggaagatgtggacttctgtaacggctagttccaaagtaccgttctttttttggttttaattattgtattaaggcacgctctgacacattcacactcacacatagcgagaagaaaagaaaaaaaaaaactcaaaacttttgcttctactcaattctctgatttagggttttttcttgactttacactatctcgatttgagaagtgagaagagaaatcgccatgaacattttcaagaagaagaccactcccaaaggtataaaaaagcttaaaactttatcacattgtttctctgagattttgttttctggggtttttttttcttcatctctggagaaatcgcgaggattagttttaatatctgttgggtaacaaaaaagatgggagctttaagtgttctttgtgttcaaaattgaatcttgtagtgtgtgttagtgtgaatttttctgggttcttagtttctattaaaaggctagatagatagattccttaattagatgtgtaattaaagtatgtggaagctcacaattggaaaatagtaagttgcccagatttagataacttgtgaattttgcaattttgcatttgattctattgaaaaagttgtgattttttttttctaattctgcagatgctcttcgtactagtaagagagaaatggctgttgctactcgaggtatgtataggtttcaatctcttcaggcctttgatttaagcagattgtgtgtttgtgggagtaatgattgaatttgttggtgtttcgatctgtatcactccaattgctacttaagtaaaaggattggattgagatttctctttacctcaatcgatatcacattattttctgctagtacaagaattgaatggtctttgagagtttgttgatgaaagctttcttactaccatttcattgagatgttgtgtttgtctctgatcagtctagctttttggtagtttcttatgcttttgcttgtttttactgaatcattatgtcacttttaaactctattaacctctgttctgtattctacctataccaaaaatttaacaatcagagctaagctttgattctgttgtgactgactttatatctaatgtcattgtaggtatcgaacgggagattacatctcttcaactagaggtaagtttaatcaaaatgtgagcttctctcttagttatattctttactaacgtcatgtcacacttaggagaagagactagttgcagaaatcaagaaaacagctaagactggaaatgaggcaagtctttcatttcaatccctttcttacgaaaaaaacatttttcaaattctgtgaacttcactaactgatcttttggactgttgattattcataggctgccacaaagattttagctcgtcaacttgttcgattgaggcaacagattaccaacttacaaggaagccgtgctcagattaggggtgtaacaactcatacacaggtttgcttcttctagctcaacatcagctaaactaatagtttgactagaagaatctgatgttaatacttaattactgttttcttcctttggataggctctgtatgccagcacttcgatttcatctggtatgaaaggtgctaccaaagctatggttgcaatgaacaaggtaatgctattttgtttcgatactcagtttcatcgataagtcgatgaatctatagaaccacattagtctctgaataagataatgctcaacttcattcctacttcatattttcagcaaatggcaccaacgaaacaagccaaggtgattaaagatttccaaaagcagtcggcacagctagacatgacggtaagcgaaacatctcataatcttaagagcttactttatccaacaagtacagattagtttgcaggatttgacattgaacaattgatgtgttgttggatttgcagatagagatgatgtcagaggcaattgatgaaacacttgacaaagatgaggctgaagaagaaacagaagatc

SEQ ID NO: 831 - DNA, 73921 bp, Arabidopsis thaliana
tcactaaccaggttcttgatgagattggtgttggtgttgcatctcaggtccggtttctctgcataaaagcaaagtaatttcttcttttttggtttctcgggtcagtcgaacactaaaacatgtcttctctttcattttgttttaaacagttatcttcagctccaaaaggtcggattgctacgaaaaccgcagctcctcccgcttccactgcagctactaacaagaagtaagctcatgtcatatatacaactttggtcaaatcaaatccaaatcacagtgaagaaagaaagaattctaaccttagtttaacttgcagctctgaatcaagtgaagtggatgagcttgagaagaggttggcttcgctacgacgaatctgagatttatgaaaaacaaagaaagaagagagcagcttccttttttttgttatctctgtataaatctgctgaaacttaagctgtttgatattaagattggccatcagaaaactattaaggctttttaagaaatgaagaagacatgtatacacatattttattatagatagttcctctacgtagccacttcatattcaatttaataagcatgtttcttataaataaatattttcgtaaggaatagtgcttgctttattagtcataggtttgagtgtttgacaatccatatcagttatgttcacaagttgtataagaatatctttggtccatagatgctagagaataaatactctaattttcacgcaaataatgttgtcatgcaaacacaatacgtgaaaaaagatataagatatattcgaagtttatatcttatttttttagtgacttaacaaaacaatgagctgttaatgaaaaatcatgaatcacgtccacatgagctgttatcatctttgttagagaatatgcgttctgcaaatgaaaatcctcgaccatattcatattcacatcattttcgttaccacttcgatagctacttctttggccaatgatattggtgtggttctttcttctcagtataagatgttacactcactttagatattggagtattatcatgtggacatgattcatgattttaaattctactacaaaattattataaccctaaaatctacagtaacaaccaaaacatatgcatcctaaagtttacagtcaaattttttaaaaccacagtcggaaccaatcacactcatatctttttcatttatgattaaagaaataaaaaattagcaattcatgattttgaatttatagctggagttcgagtctactaatcatattaccccatataataaagattgttgaaccaaatatgttagggaaaaaaatatattcgtcgtggactattcattaaattttggttttctgtagactatatcaaattctacactgacatcataagcaataaatgtttcacccgaaaatgcgaaactacttgataatgcaataaaagttttgctgaacttgtcttcgttggagcttaaatcatccacgcaggtacataaatatgagtattgaatcaaaaggtttagaaaattaagaaaaagatatggcaaagaatttaggatttgtgttcttggttcttgtggttcttttggtgccatgctccatcaactatggtcttgtttctgcacaaccacaagagttactcccacaaatcggttagagctggttctaattatatatatttatctaaatttctcatttcgcatttttctatagtttatacatatgttatttaattaaaaatagtttgatcttagcttgaaatatccaaaacataaattccagaaaaatgttaaaaataaaacccagggtgctgaatctaacttttggctcagttttggtttgattcttgttttttttggatatatatatatatatatatatatataaaagaaaataaaaccaatttgattcttttttcctctctgtttagtctttagaatttggtttggtttatttaaaccagattagacacccttttattgactagatataataagttttaggttgtcaagctaatttcaattaatacatgattcttaatttatttaattacgatttaaaaatcagaatggagaagaatgatgatcacggtacgatcatcaagaagccaaataggtaggcagaaaagagcgtcgccttctccatcatcaccaccttcgttgttgtcgcaagcaccggggctttgaggaacaccatttcttgatgaaaagttgaaaacgaatagaatttacttaaatatcggtttttggaatcattgataagctatgcatacaatttacttaaatatctattttgttcaatatatatatatgatgaagttgtttatttgacaaaaaaaaataatgattgtcaaggttggttgggcaattttttttttttttttttttttgtgtgtgtagtatagacctacagtcaaatttaaatattaattagattgatttttccatcttttattaatgatctaacgatattatatatttatttctagcatgtatgatatattactatggatggtctatgttggacaactcttccgccaacacacaaatcattacgtaccttgcaccacagtgaaattcattacacatgacataagtacataacatacatagccacaatggatgaattacctacaacaagcttaacctccaataaattttgcatctatcatctaaaaattgcattctctcaataaacccttgagaccaatgggcttcttctgtacttgccgtttagcttgacgttaactttttcgttaactttggaagtccctttgccattaagccaaagctttaaaatttctacactagatcttaggtttgagtttttgataatgcaccttatcgaaagaactatccgtcgtggtatcatgtattaaagtaaagatgtccatcgtcgatataatgtagataagaatcattagttggagatccaatagctgagaggagagttgcacgttgtggaagttgttcatagaatcgttcatcacaatcgtatgtgtaacgtttacatgtagttagattcgatcagttgagcaaatatctctgatgattatgtaacaaatggtaaaaacataaaagaagcatcattgaactatacagacagattaaaagtaaatataatatctaaatacaggaataccatatattaaaaaaaaacgttgcatctaaattgttttgaattttacatgtaattctttaagacacattttgaaaatacaacaagcataaaaatcttcataagttaactcaaattctggtcaaatacatatagaaaataatataaacctgaataaaagaaaaatattgtaaactataaaataattgcttgtagctcactggtactcgattagtttaaataacacatgattttgacttctaaaagccgtgtgtaaattttcgtcgttgaattttcaacaattttttgtcgaatgccatcacccggttttgggatattcgaaatcaccatgagggttaaaaatttagtgggcttgggatgtcggctgcttgtaaactttctttcattttttgtttttttttcaataaaatccttcagaactaaaatacaaagaaagatcactataaagtcgttgatcaaaaaaaaaaaaagatcactataaagcaagagggtaaagtattaaaaatgattggcagagatttcatcagtttgctttttggctttttacgtgtcttcatagcttattggaatttaaaagattaaaaggaaagaaaaaattctgagagagagatgggaatgagtggttcttcaggtttagttcatgtgctcatgcttcttcttcttctcagcatcctctttcaccataccgaatctactttgccctctgatagtgaacaactctcaataactggttagtgtttcatcagtttcaacaaacacacacatacatacatgaatactgaacatagaatagctgaggatacacacatatacagatccatgtatgttatgtaaataattaatttctatgttttaattgtttgatagatgtactctacacatttgaatttcaaaaactatattcatgagttccagataaaggaaattgacagagttcatgaaatattctaaattacaaaaagagaagtctcatgaatgacataatagacttcttcaattgtacaaatacattgggtttgtcgatattatttcatctttatataatttgatcattatcttaaagtccataaaacactttctactagatgaccaaaacgacctattctgttaatctataaaaaagccgagacatattttaattacatagaaaaataatttattattattataaaataacttataatttttcaaatataaaatttaattaacattaattttattattaatatccatgaatgtatatctggccatttgaaattgaagtcagtaaacgtttttgtgtcaacaattaggtaaaagaaaatgtaaaagtttagatcttacaaaacatatacttagcttatagtatttatctagattttgataaatgaactcgggttaaaaaaagacatatattttgttgatccataaaatataattacaaccaatcaatattattgtgactttttgtttttgttcttttgacagctataatgtgtgatctataaaaccatccggtctataaaaccatccggtctataaaatttgactgtatatcaataatgttatatctgtctacctaaataaagaataaatatctttgttagtttcacaaaaagaaagaataaatatctttaagactaaaatgaagggaggagaatgatggcgaattataagcccaatacagcagtagaaacaccaccatcaagaagtagacgaggtggtggtggtcagaatacggtactcacaattcattactttaaaataaatcaataattgatcacctccttaatttaataattatgcactttgcttctaatatatattaaatttgtctagtttacgtattcgttatcaaatattaatgaatttatatcatcttgtagggagcagattgatgagtataatatataagccaaacggagacatatataatatcggaagcagagtatatatatcaccttgaagcagtggacatggtggtggtcacattcatcaacattaccttccttaggttttggccagtatacaaagttgtgtaataattcaccaagcataatttaaatgtgaatgtataatttgcaatttatgtgattccatgtaaggattttaaaattttcaaaatttgttaacaaatgtttgtgcaatatagtgtttttctttccttacaaaagatattttaataaatttgttaacaaatgtttgtgcaatatagtcacgagaaaagtcatgttttgcttagtttgtcttcgtttcattgtgtcattgctgaaactttatccatacgcgtttgttaatgtctttttttttgactaaatgaacaaccgaatagccgagaaaagtcacattttgtaaatgcatgttttttttccttttcggctttaaatgtgatttcgtgaatttaaaaccattcacatggattaagaggatttagcaaaattaacaacgagaggaagagagatggcaaataatttaggacttgtgattttgcttctagtaattgtgctggtctcatgctctaagtctagcgactgtgctcttgcgtctccacaaaagtcacgtccatcatcaggttagtcttgacacatatgcgaaggattttcataaatggaacataatcgatgttttcttctcttggtttcagtaaaatttttggaagatcgaaaaaaactaattagttgttttcatcttacttttcggattgctttagtcaatcaaaatgtttaaactggttacttacttgttctttgaaacatatgataagtgttttttttgttttgttaaagtaacatatgataagtatttatgctaattttcaaaaatataaagaaacaattacactttatataataattgcctctaaaacatcttgtaagaacacgatgcaaaatatttttgttagctcgatcatgaacttattttaaagtcctctctctagattattaaataatatatatcgtggattttgttaatcgagataaaatttaaatcatctttggttttggatttgatttcttaattttgataattcaaatgaagctttacaatttttgcaaaaatcattatttgataatgtattcgtaagaaaatatgattgatcgtcccacagagagccaatactagatatgtgtattaataaaaatttaacttatttaatacttccaactttttattttgacaccagtgttttgacatttaaccactataatacctattagttttgttaatagttttaaaaatttaattcatggaaaaaaaaaactgaatttaagttattttttattactatatgtagagtggagaaggaagttaataccagtacggtcatcaagaagtccacgaagtccttcatttgcgccaaaaaaaccgccgccaccgccaccttcaccgcctctgtcaccatcatcaccaccatcaaattaataattgccatattgatactttcatatagaccgaatatggattcttaggttcgtacatgataataacaaaattaatcgttcttattaagaaaatgaattgatacaataaaactattgtaaaatgatttgtgaagaatgccatattgccactctatataactgttttgtaaaaaaaataaaaataataactgttttgcattattattgtgaataaagttcattagaaataaaacaattattttgaaagcttcataatattgtgtttcttataatgtccttttttatatatataaatcaatcacgtttaatcttttttgataatatgaataaagtttattaaaaaaggattagttacctcatttcaaaaccaattcttaaatattcggtagtttatcttaggatctgaatggttgcatcggagaaatctgtttgtagactgtactgctttttatttttgattcacaaattatatttatagtaatacagacttaaaataaaataaaataaaattaatatagaccaatcacaaactgtttttatacacaaataaaaattatcggcgttgttgtctatcctaaaaatagaaaagattaaacagttgacagatttgtctatcctagttactgtaatcattcaaactttcaatgtttttcttcttaggtagtttgtttaactcacccataataaattcatcgctttagctaacttatttttgtcaacaaatatacgttttctttatttgcaccgtcaacaagtatactttaactaaaataatttagaaagttaaaatagaagtacaaatctgacatcaaaatatctaacatatattgtctaccactctatgctagattatccgtttaaaattttaaatagtagaggaaacaatgagttttgtgcattaaaacttttaaaatcgttaattttttgtagttttatttttcatttcaataaaataaagaataattttataaacctaaaagcaatatgtaatataacatttttgttgagagatgttaacattgggtctatgcaacccaggtaaatatacatataatagtttttcttattaatatatcaccggaaacatttatttccccgtcatttacaaaaaataaattctaatagaacgtaaaaaatttcatgcatcaccgagtttccaaactaggatattctactatattatttgggaagtatattttaaatgtaaccttattttttgtaagtaattacataggtatgccattagaaataaaattttaaagagtaaattaattcatctctttaagaattaaaaagtcaaatactaatttaattaattaaatttaattcaaaacaaaatacattattaatttctaaaaaagtaaccaattaaaatcaacaaattagatttgatatctaaattatcatattaattttttattaattattatagtttacctttacatgattctattaaaaaaaccattattttgttaatgttaatcttatttatgatatgtttatgaatcattgtctaaatattttagtcgatgtgggacgtagaactcacacatttttcgccaattagttaatatatgttcatttttaaaattttgagtcacaaaatatgacggaaagaattaagatttttttaaactctatatattatataataaatttaaaaaattatgatatattaaactttttataagtttaaatattaataatgttttataaagtttagatatataaataataatatttaatttttttatattttgagctttttaagtaatgacataataattctaaaagcaaggattgaaaagatttaatattttcattcctaaataattaatgtcagtgtcatgacattgtaaataagttcaaatacattatttatttatttaaacaaaaaacgtttagtaagaataatatttgttttaacaaaaaactttgttttaaaatattgttgacaaatatgtttatgctaattttaagggattgatttgaagtttgtttggattaaatttgattgataacgtgattgacaatttaaattaagaatttaaagtaaaattaattattttggagaaagatttaatgctaatggcattaagttgtaaataagtctaaatccaggatttatttgttaaaatggctgcaaaaatgtatgtatagatatttagatttataattataatcttagataattagattatattacgattaaatataattaatattttggatattaaattaatgtttgggtttttgaataccctttttgggtaaccggtaatttccggaccaatcggatatccacgggtttactaaaactctacccaataagaaaatttcctaaaattttaacccgccctaacccggttttttggttctggtattgggttggttatcggatccgtttttcgtcagccttatcaaaaataatctaatatagggcccaattaggtccacaaatataaccaaaatactatacaaaaactaattctaagttagacaaaaaattagatcctctaatacaaaggaaacttgtttcttaccaaaacaacttgtatacaaattttacacatttacttaaaactacatatgttgtatttattataaaagtaacatttttaaacaaagtcaatccaatgcatcattatatccaaatagtaaaaacattgaaaaatatcatggcatcacttttatactatactatttcgtatgtaattcaaacaaagtatacaatttaatttatacaaaatattaatacccgtactgtatagcacgggttatgatctagtccttatataataaatcacaagtcactttaaaaacaactgaaaccttttccatctgccatctggcttaaatctcaattgttgttcttttagttttctaaataatattacttgacaaattaaaaataaaaaacttgacaaattaaaaataaaatcaatttaactgtttttctcccacgttcacaggattatccatttcccttctcatattcaacaatgaaacaacattattattttctgattgccgtttcctgcgattctgtcgagtaaaagaaattggaattcccatgttcacccaattttctatttcacaatttcttcttagttttcaaaattatgaattttaaatttggatttgcatgttaatttctctagtacttttatagtcttctacctaggatctgcatctctcctcccacaatttctccttcgtacaaccataaaatacagttttgttattcaaatctatatgtgatttgtagcttttacaaatgtctttcgtttctaactaaaagtttaaaacaagtcatggacatagcctacaacatcttcaaaggtaagtttagagataacaatcaatctctcaatcttaaattttctaaataattttattatccatcaataacaaaaataaaacacacaagtgccactaacttgtttgtacctaattccttttaatttctgttaacctgtttgtatctaattctcttttctttgtgttaggtacactgattgctatttgtcattcaataagatcagcattctcttttcgttgcatgtgtgacaactaaagagatcccaccctcaagaatttgttcagtgcttcctctaacaacatgagaaactttctcagagaaagagaatcgatatatgtttctctattttccctttcccaaactgtttctttattaaagataaaactaattaactttaaaattgatcaaaaaaaaattatcaactttaaattttgcatgtgcaacgcacaggccttaacactagtaacaagataaatgttagtttcttgttttggtcgcctttgattaatattattgttttggtcgcctttgattgatattaattaaagagtgaccaaaaagtcatcttttgttacgcgtttttctctgtccttatatggaacttaaactattcgcatagagagacaatatatataaataactatagagtaatttgcatctagaggtttagcaacctaacaaagtgagtaagagagatgacaaagaagggtcctttgaatttgagacttttgctcttgcttctagtggttcttttgccctcatgctctaattgtgctcttacgtcttcacaagaattacgcccatcatcaggttagtcttgactcttgagacctatcctaatattcttaaatcgagtgctagcaaaaagttttttttaaaaaaggtgcaaatatgatccttccggagtaccaatatagggtgactattttgctagttttaggatattaattattttgtccattttcataatttgagttttcgttaggttcatttttttttgtttttggtttactgaaattaaaaatcaatgagataccaaaactcatttgattagtctagttggacatcgtttcgattttggttttggtagttttaataatatttttacattttttttttttttttacatttgtttttagaaagtttatttctattgttttagtttaatttcattttgcattagttagtaactggaaaaaatattattcagtgggatctagctttcgctatgtgtttccgaaatatacttataaataagatatttagaatttatatatttaacttgattattttgttttctgtgtttttttttttctttttttgaaagcaagatataaataaattcattagttttgatgaaaaaaataaaatgttaaaatctttttattttattatggatttgtcttattatatggtttttgtttggctcagttcaggtaatatatattggactatgctcatcccattgtgaattagattcagtaacattatgccatataaatgtttaataagttagccatatatttctctgaaattaaagtaatgatatctatgaaaagtgaaaataattttttttttagtcattaatttaactataaattaaatagaatggagaagaaagatgataacagtatggtcgaagagctcgtattaggagtgctcctccattgccgtccttttacccaccaccgtcagcagtttacatgaaacgacacatatagataccaaaaaagaatgtcaagaatatgcttaagtgttacagatactcgttgtaagaaggaaaaaagtgttacagatattctgaagcatttaggaggtctgaaaaaaatgcagctggcttaacttagcgtaccaagaactccgtttgattccagttaaggtacaagatcctctaggaagctaacaagtatccctctctcacttgttacatgtgtactgcctcacgtgtgtgattgttagaggataagccatttgtagatccttgaaaagctccatcgcttctcctttcatttgtacgtacgcatcttttaaataaaaaggaaagtttagtttattgattcaagtttctccttttttctcttggaataacttagtgttgtacagattcccttcactagtattctgttaaatcccttcactaatattctgttaaatctatttttttgtgctgatctcctgaggcaaagtttgtgaacttatcataaaggttttcacacccttgaatgttattccttgattaacctactacctttcatccgctacctaaggaacttaacctgtgaacttgtgacaaaaagtcgagtatcttctttggagcttacatcacacaccatagacttatcatatgatacttcatcgatcaatggcttcacaactatattcgcgaatctccattatattggaacaattagtgagcatcaacgatgattgaacgcatatgaaaagatagaaaaatctagcttttatttatagatcgaggtatgtgaaaaaaaacaaaaaattatttgaatgaagtaacaaaacaacaattagtgagcatcaattatttctttttcaatagttcattacttcattcacatagttgatcctcactaattgttggtttgtcgtatggaaaccttacttcattcacatagttacccaaaatctatattggttccttttttttaccaaatatacactaaaatattcagaaaaaagctaaaacattggttatttttactcaaatatacgcaaatatttctgaattactcgaaaatatctatatattcggatttataattgttatgttaggtatttggtgtattataagcataaatttaactaatatttttaggtgtatacttgtatgtcagatacatacggatagccaaaagtattagattcgggttagattgttttggatagagagacttaggacccattcatgtatttttaaacaacggttcggttcgattttggtattttcaggtctttggttcctatttgtttgcccaaagctactaatcaaaatcatgccttttaatatataagcatatgtaaaatattgatgtatttgcaataattaataaggtgtataatttgaacacaccaaaaaaataaggtgtacaatttgatatatgtaatttagaggtgatgttttaactttttttatttccctcttactcagaagaaattagaggcatttattcaacaaaacacaataaaaacatatatattttactttgcctttctcatttcacctttggaacattgtagtccttcatatatattagtaaataatacatatgtaaatcataagattcataacctcaaacatatgtttaaaacaattaaacaaaaaaattagtagatttcaggagtatagtcttgaactcttgataattgaacgttcaaaaatatcaaaaatttatttttaaaaaccgaaaaataaaggactagaggcttgttattttgttaaaggatatcatgactagaagttgtagtcccgtagtgatatagcttttttattttattctagatatacgtctgattgtgtgtgtacatgtgttgtagacacgaaaaaaaaaccttaactataaataaaaaatatgatacaacatggttttgtataacaaaatacttataaaactctcttgacctcttatcctgcactatgatgacttatggcttatgggcctttatctttaggcgatgcagagtgaaacgaagcgataggaggtttgacgatgccacggagaggtggagggggaggaggaagaggaacgcaatccaaacgcaatttgttcctttctaacaatatgtatgtaccacaaattgtatgattaatttcttcaaacaataaatatgattaaaactacaacagaaaactatgtatagagagtataaacaaggtaattacttttaaaaaatacgtaattagggaaatgataattgctagagctgctattagaaaggaaaaaggacaaaaataaatgtaacaaattaacaatgtaatacattattatttaaaaaataataaaataaatattcggttggtagtctagtacattgatataatactatttaacactatcaatactaatacaataaatcaaacttagataaaagataaataattatattcgataaaatagatgtccacataaaaataacgtgataccatggaaaaacattatgtgttctgcaaccttagatgttgagaataaaaccaaactaaaactccaaaccaaattataacagtattactatatgtggatgtggaatgtagctcgtttttaatagacacacaaactcaatacaaaagtaagagaggtagtgttaaatagttacgttggagacgtttggcctgggcgactccaacttgagataagataaacaagagcagaataaacaaagacagaagaagatgacctaaatttgatgtctttgtagccattacttaagtgctcgactctctcaaaactccattacaagacacatatataagataatgaagcataggtagtagatatggctactataaatgtagtactgggcctagtagccgacgaacatttccattcaacgcgctttgactttatgaagctgcgaaaagtctttgcaaaccaaaattatatgtataaatacaattgacgtagataataatttaatttttttaattaaatataaaacggtttttttatatatgtaaattgtaaagtgatgatgttgtaaccctttttatttctttctaatgtttaaaaaacgctttctgaaaaaaaaaattactttggtttgtcatttcattttgaagcattgtagtctttcaaatttataaagaatatgtaaattataacctgaaacatataatatgagaataataaatgttgttgagattggtgggagtcatggttgtgagattagctaccatccatggcatgggattatatatgggaggatatgttgcattagtaagagatattcattgcttgcaggttgtgatgtcatggactaaagttggtaacaaagtttgcgctgaatgttcttgaacaccacataacaataatcgaccaatgtaaggtctggtagtgcgaaaatcagatcctcttggggaattatgttgcatcaaagaatgttgctgattttgatctgcttttagcagagagcggttgcagttgatgacgtatttgctatgataaaaatgatgacggaggcatatgagtgtggctgctaaaaaaccttgcaagtgtttcatttaaaatattcagcaatcaaatccgatattatgtgctttcttaataaaaataagcaaacacatctttacacagaaataatcgtagggacgctatggcctatagcaaacagaggaatgcgtttggcctttttctaaacaccaaaaatatattagtcaagtcttttcgattttgtatacattcacaaaaaagataaaactacaattcctacatatatataaataaaaaaaatactacaaaataataatttctatcgtctcgtctaactgaagtcttcagcccacttgcaaataaggtacgtagatattaaatatagagataattcatttaggtggaaatagtatttttcttaagattagttttttttttttttttcttaagattataatataattcttctcaaatgggcttgggccaaagcctacaacaaaaaacagtccagttacaaaagtggttaatcgacaacattgccggaaaaaaagaaaagctctctgctcgttgatagatgccagcagaggaccggagccttaaatccggcgggctcaagagctaccgtttcgtggtcaccaacgaagatcgggaatctccaacgaaagagaccggttttcatcatcaaaaccatccctccgatgcaccaacccacaacagatctcccggaaagctagttgctccgactaggcacatcgacgaaatcggatcctgaaaaagcaacccaatccactgggcggtaacccttctcttccaaaccgaaagtagccaaaaaacctgagtttcgacgattcaatccggctcgatggatgctaaattgaggcagatctaaaggatggtggctcaaatccattgcctttaaacccgaactcctcaaccgccctctaagaccctatggatctgcagctaaccaccgtgcaaaccaattttttaagattagttttcttttataacaattttagttttaattagaaaaacttgacaagattttgaaggtttaataagataatttagacttctttttaaatattcatgatcaaatttacagctccaaatttttttatgtttgacatcaaaccacaaacgcattattaatttttacatttcctaactacacaaaattttaaaactcagcctaaaactgttctaccatttttaagtgtttgatatttctccactggtgacgctgaagttaaaaaagactaagacaaaatatatgaatggagaccgaactgtacagtgcagtgtgattccaatagtaacaaacatgattatggagtatgacataatcacaaaatattaaatgtcacaaagtttggtagactttgcggcaaaatggaaatgtccgggcattggacggtaggcccagactagactttgtggcaaaatggaaatgtccaggcgttggaccgtaggcccagacggtcagactcatagtaccacattttacatgtagtatataaataggtcttataatggagttttgagaaagtggaaaacctagcttaatggctacaaagacatcaaatttcgtttctcttcgcgtatctttgtttattcttctcttatttatctcatctcaagttgctatcgctgacgccaaacatctccaacgtaagtgtttacacactaacacacataaggcctcttggctttttctaacactcgcatgaacataagcttggttactgtttagcgatttaacaatatacataagtttggctttgtattcaatgttcattgatgaaatttttattattgtatgaaacataaaatgaaagtttatatcttattatgtctcaacgtcaatttgttttttgaaatatcaaattgttctctctctctctatatatatatatatagataataaatagtctgcgctctatcatgaattaaatattgtttagaatatccaacattaattttgaatctaaaatattaatattcataatttttaatttttacctatgtcaaacaaagcatatttaaaaactaaaatttataattgtaatttgtaaatcaatagaattaagaaggaagttgcagatagtacgacgatcaagaagtcaaagaggtcgtcaatacaatccaccgacgctgcgtgtgccgccgccaccaccaccgcccctgccccagatgccgagtgcagccacacctcccccaatgccgcagttgtcaccactgcagccgaaaatgcatgtatcatcactgcagccacaaatgctctatccacctccttcgttgccgtatgcttcatcgccgacggtatgaaaacaataattccattattaaaaaaatagttttcaaattataagatcgattttaactatgtatatacgatgataactagctataaaatcaataaaaattataatttattattatcgacactaaacattttccggaaattacacattcaaattctaattttgaagaatattttataaacctaaacttttatgatattttcagagttttgtgtagttttagaaaacaaaagcacataaaatgtggtactcttcgaactgaatttttttggtaaatttatcttcttctaagaatcataattataagtttatcaatatatgctatattgtcatcatgcagtctacataacgaaggagaaagatgacgctggtggtagtcgcataacgaagaaggaagctgatgctagtatgagatagcttcagtccttcatttatcaaggaaagaataaatctttttacaatatatgtttttttttttaacgtatgttgatatgaatcttgcactattaataaccatatcttagtcaatgtgatatttaatttgtaataattgctaagatatatcataatcccaatatctttttatttttttgttccatggatgatgggagtaatgactatctagtatacaaggtgttatgttgttattgtgatttctttgttagctagatttctactgcttttttgtttttcttttgtcaaaagatttctactgcctttattaaagaagttgaattatatatagaggacatcgaccaaaatatatattcatttaagttttatattatcttggattgttgatttatgattatatataattttactcaatattagataatactttaaaattttgatctagttaatatatatatttttgatctgagagatggagaagagcttttcactggtagaagtagaagatgaactagtcatgatgacacatagatgaagggaaaatatagagcagagaaagatgaacgaagaagaaagagagaggagaggatcgattgcttttagcttggaggctaggttaagcgtatgataccatgtagaaaggtaaactccgtgacctttattatataatctcatgagtatataaggttacaagaaaatgttctagatcgtatctagggtaaatctaaaagaaaatttacatttttgatatatactctaacaatcataaacagttgatcataatcatgtgcatgactatgagtttgatgtatgatgatgatgagatgtgatgagtatatgataatatattcaggttgtgatgatgaatgtaagaagattaaatgatgccaggatgatcgatagtttggatgtatatatgcatgttgcatctatactatatgatatggtataagtttggttgtatgttgttaatcattgtggacggattttgattcatgtgtgtacaagtaagtaaagattgttggtgtgatttatggatatggggtcagggtaagctagatatgaacaattgtgatatgttgtaacaccatgagtttataaatggtccccaaagaagaatgcactgataaagatttgagagctgattctctaaatatatagtgaatttgtgtgctaaagctgagagtagagttcctggcattgtcaaagcatctcacatagcattaggataacgtctgcaaataagcaatgattgatggcccgatagtacgtgctacattgtccttttcttggtgtcagatatactagataagatattgggtttgttgtccaagtccccggagaataaaaagtaattaaagcgtaccattcattagcgtgttggtcgaaccaaaaccgagaataatttctaatcatatcaaatatctaaccaaatatctttaataatataaaatagaaaagtttaagaatattttggaaagcttacacctctgaaaagtcaacttgtaattcgtcgttaaactttaaactataagaataagaggaaaatgtcaatatttcacataggtgatggagaaaataataatatgtttttattgggaaaatttcataaaacaatcttcaagctagcaaccacttacactataaatttttaaagttttaaactttcacaataaaccatcaaagtaataatttgatttttatgtgattttccctttatttgtgtgtactaggggtgggtaaaataaccaaaacccgaaaaccgaaccacaaagaaagaaatgatttggtttagttatggacttataattaagcatgaaatttggttgtaaattttatttaactattggtttagatttggtctggttaaaaacggtaaaattgaatgattgttttggtttttgattaaaactaaaaataattatatataattatattgtccaatttatattaagattaatataattaaaatttatctttgttgggcttataattattgattttgtttactagaaattaaatgaattttattctttaaactatatttaacttattagtagacattatatttattttaatcctacgattccttttatttctgtatcaaattgatattttctgtaaaaagtggaattaaattatatttaacttattagtagatattatatttattttaatcttacgattccttttatttctgtatcaaattgatatttttagtaaaaagtggaataaccgaaaaaaatctgaaccaaaccgaatccgcatatggttttatatggtttcaattttaataaaaccaaaaaccgtaacacgtcaaaaactgaactgtaaccaaaccaaattatatacgatttttacctggtttgaatttaattaaaaccgaaaacccgaaaaaaactaaaccgaaaaaaacttaaccgaaaaactgtatgcccaactgtgtatccttatctattggtttgacttatcggtaccttagtttttctctcgacttggatatataaatatatgtctctacgaaccaaaagaaagagagcaaagtaagaaatagaagagaaagagcgagacatatgttggaagatgggaacaaagtgttattcaaaattacgttatgttgtcgttctggttttgctgcttttcgtcttcccttgcagccttagccaatcggctccttcctcagttaccggttagtgtttcaacacactatgtcatataaatacatacgtttttttgttcaaacaatattgtataaatgaattaaaggatctgtttatcaaacagaacatacaaacgaaaactgatcgcctgaaagaattaattatcaactggccaaacgaaacggaagaattcactaaatatcaaaaagcatcaagagaactgaagaatgtatataattatagtatgcatgtaattcattaatatttgttgtttagatttacatttttatattataacagtatgttttcgttaaccacattttgtggatttttcatgtttgtgtttatagtaaaatatatttgataaaaacgaaattttgtatattccaaccaaatggaaaaaaatagtttgacgtataaatgcaaatacatattcaatagattgacttttgaaaaccaaaaatcatatgtacgtgctactttttttttacgttataacactatatacaatagacaaagttaatcaaactggtatgagcagaagttcactaaaatttataataaatcgcatatggattaaaccttaatgcaatttatatactttttgaaacaaattatagttataaagttaaaatcgttgcagcagatgaatatgttgctacgtaccttgtccattaattgtattcaatcacacatatatatcctcaattaaaaagcaataatatatatgacattgtaggcaggagattgatgggaatatatatgccgaatgggggaataatagcaggatcttcacctagtggacaagcaccaaacataaataataattaccacggtaaaagtctatttattttctatacaaaatttccactttttcgaaattttcaaaacatttctaaccctattacatatgctcttatataaagtgttgcaaactttgttgatcaatttgatatatttttatattcatagtcagatataatataattatgagatgtagggaggagattgatgatcagtgaagcaagaccttcaaaaagcaaaaaaggtggtggtcgcgagcctgaaagtccgggctgaaatcgaaactaattcttgaaatcaagaaaagtcgggtattattgctagtgtgaatccttcgaccatgccataaatcagttaggtaaactatatgctagtgcgattgaccaaaaaaaaaaaaaaactatatgctagtgcaataatgtatctttgaacaaaataaaaacaaaataatgtatctttgattttaataagattttctattcataatgtatctcaattgtccaatcgaaaacattcttatttaatcgtcatcttaaatgtgtgtaatatcaatgccaattgattgcggccacccgtctttcattttcatatccttccggtgtaattgagtgggtcaaaaacaaaagtaacgtcgctatgttatttggtcaatattttatttgggtgttgatgaataatatttattatagaaatatgtgaatatggttgtccatatatatgcactgactcataattaacagtcgtcggcactagactacatttggttttctttgtttttatgcactaaaattcaatgattgctgcctaaaaagtccaacaagtttgaactctactgaataagatcgttcgacgtagacaactctaaaatttaatattgcaaaatagtatgcatatgtaaatacgcgattgtaaaactcagatattattatttgcaaatgttcagttactataagactgttttcaccattttctttattttttaatttgatgataagcttgccagttcatcagacgactcacgttctttgacctcttatccgtcacttctggagactagtttgcttacgggccttttcctttaaacgatttagaaggaggcatataggatttgggaggtcgagggcgaggtggaggaggaggaggaggaggaagaggaacgtaatccaagcgcaatttgttccctgttaacaataaatgtgattacaagttcaatgtatcaatatgtatgcatgaaatcgccagttatattggtgaaaagtccaataaccacatggtccgtctctggaaatttaaaataccaccaagtcgttagctcaattggtaaagactctatgcgaagcttagaggtcgccggttcgagcgaatttaaaataccagtatgaacaaaaggagttaaacttggaatcggtactaacctttttaaatagaagatatgcactaagatacaagaggagaaggtctataattcaaatatgtgacggcagaaaataataattgtgtgtgtgtctgttatctctatagtttggcttcttggcaactcagtttttctctctgcttggatatatacataaatgtctctacgaaccaaaagaaagagagaaaaacaacaagtaaaagaaagatagagaaaaagatggggaagaagtgttcttcaaaatttcgtcaaatgcttgttttggttctgctgcttatcgtcttcacttgccttagcgtaacggctccattatcagttaccggtttgttttacttttacaatacacataacataaaattacgtagatatacttaattacattttttcaacaatattttacaaatgaaattaaaagtttggttcatacaaactaaaactcacctggacgaattcaatatcaaccagcaaaacctactagttttaaagtaaaagcacgcggaatagaagacgagggacaagaacgaacacactccctaaatagcaaaaaatcttcaagaagcgtggagaaaactcaccattcagaaggtatagacatattatatgcacgtaaatagattgctgtctttttattgattaaatgtttatataatataattattaaatgtagggaggagattgagcaatgtttttccaaatgcgggcataagagcaggaccttcaaaaagtggacagggtggtggtcgcattcccgtagccgcctcctagtacttcaattctaatactatcgccgcttttagttatgcttagaccgcgtaaaatacaatgtaacttttattttctgcagtcatacgtatggctttttaagaagtttcagttatgcataattttatgttaatgtaatgttttggtgtttttaatagaatggttcaaaaaaataatatataattgatcatctgtttgagatttttggtaattgaatgcatcaaaggttatgtctaaatgtttgaaataattttcaattttggatgaacaaaactttcttggaaaataaaaattaatgttagctgtagataaaaaaaagtcaattacacatttttttggtatttttctatttttttaatcaaccacacattaattaataactaataatttaaagaaaaaatgttcacaaaaatgacttcaaaagattaaaaaagtaatttcaaaaaataataatctaaagtaacaagataaataatccgcttatagagttacataaataatagatagaaaaaatagaaaaataagaaaataaaatacagagcattccaaactagttctgtatatgttgaacttgaaccatcatcttgaactcatgcaggagactgcatcatcgaaactacttctgtatattttttcattttaaaaattattatataaaatattattgtagttttggtagtggttaatttttttttggaaaggaaaataaaatagtttttttaagaacatactcattatctcgcaattattttagccgcagagatttcgtggtcggcagttgacttcatagttgatcattgacgggaactttaaagacaaaacattctgaacctttctttactgactaaaatccaaagacgcttgccaagactaatcggcaagattaagtttgtaactttaggatattaatttctaaccaaatatctttgaatgtaaattgaagaagcaataaattcctttgagcaataaacaacctagatttttttttttttctcattttctaaacctagattttgaaaatttatgtagttcttcatctccaccacaaaaattcacatatgccatatcaaaacaaaggagcactaagactgacggttcaaattcaacatatatcacatgcgttcaagatgacggttcaagttcctccgcaacacatgaatctatagcagatgattctatttacacctcccacaattaatatatagcttcacgcataattcacacaaaattacaactgacaatttttacttaaaacaaactgaaatctcggataaaattatatccatagtctgaaaaaaagtcttagctctttaaattttggaataaaatattttacgtgatcgatgtaaaagcattagacggttgatcaacctctaaaccaaagcgttttcacctatttggaaatctagagttggataggttggcaatttgcttatcttttagtgttgattgtaatggtatttaggtctatataaccaaaacatttgaaagcatatacacatatatatatatatatatatatatatatatatatgatagttttagtttgatatgttaagtatcttaagtggcataaacagcgtacctttaatcctgaatatccaaaaaaatttaatggagaaaagaaacaattgaaatggtgacaaaatgcataatacatgcctatccttattttaagccttttctaaatcatccaatatcaaaatctatggattatggctgataccatccgtttagtcgagtggatcatatattacgtctatattttatttagatgttgatatatatatatatatattttgataactaggggtattctaaggcaaattttagactaatctttgaaatctatggaaatttggtgttacttgtaattgaaagcgtttacggataatcatattgctacgtataaaaacatttctgagacatttgcatgggaatcaattttctgacttatatccatatagaaattcacacttcaaacatgagccactaattcatttggttggatgatgatatctgaatgttagatattgatatgaaatatgtgaatatgtttgttgtccctatatatttgcagagtgtgatatatattggaagtcgtcggcactagactacatagttaaatggtccaaacaaaattcaaagtcaatttaataaacattcaacgccacttgtttttcttgttttatgtaactaaaattcaaagatttctgccaaaaaagcccaaaagtcttctaactatcattgaatcatccgctttaatcaaattattttttctcttaccgttagtttttactatctctaataactttctctttaacatcgacaaaactcacaactgtcatattttaacaatggttccaaattttgtttttgttagcgggtttgattattccaaattttagtgaactggaatggaacaaattctcctgtgaatagttagaagacaaggcaaaacaaaattcttcaatttttcttgtgctttttgttttttcctgtgaagatgttagtgtattattagggatataaataggtacttaccaaaaaaaagggatataaataggtgattcgataaacaaatataacatattatcaaagagagagagagatagagtgaaaaatggaagagaagagtgcttcacaattgggacttgtggtgtttcttctattgtttcttttggtcccaacccatacggagtcttccctgccttctcaacaagaatcactcccagtgatcggttagtgtttctctcacatattcatatatacataaacaaaccaatatccgaaaaaatgattatctaatctagaactagaaaggaaaaaaaaaactattgaagtaggtctttttggttaactatccatgttttctagaagaaaaatccaaactaatttcaggagtacatacaattaccaattgaattcgaagtggtgaaattaatatggcttctattaaaattactaaatgggtttttactttttacgattaaaaaaatactattcgtaaattgaaagctatggaagagttatgccaattttaaagcctttttaacaattaattatattataaaaattatataagtttgaaaatacagaaactgaaattttgatgctaaaatattcgtaaacttttaaagccagaccaaagtatttgtacatttctttaaaaaagaaactgcagccacatatataggatgtattttctttcctttgcttgcatattagcattttttgagtcttatgaagcttagaacataaaaaaagtatttagatttttgtgaagttatagttttataccattttaaaatataatgttttttatcaagagtcatcactgtattttataaactaatttatttttttgactgcaacacttattttcattgattagacacataaatatataactttatttttatttttgcaggatcgtcaaggaggttgatgagtacctataagaccaacagtaacatagattttgagggatcaatcagtggacaagccggtggtggtcaacaaaatccctagtttacctttctccatcgtcgttcccgattactatggaggctactagacttcaaatatatgtattaattatcatatatgaataaaaaaaatatattacgcaattataagtcatggtttttagcagatacgcctttagtctagtgatacccttgtgaaaatcatttggaaactgctggactcaaatcttctctatagcaaaaatattttcttgtctagtggtggtggccgaatgatttgatgacgatttaggtctcgtaactgaaattcatgattacttattttcattacgtaccatttattctacactataacagaaaatataaaattacgtaccatctatattaatacacttaacattcttaccaaaaaacaaatctatattaataccaaaaatggtctcgttgggtatcaaaaagaccaatacactaggtatcagtctatttaaagcatttcacgatttcgaaaacataacatcaggatccggtactgtgtacctttgctattttgtgagtcggccagacaccgacaaatatacagacttgacttagcttgttaacttttttgtctttgttttttgtcgtcaactgataagttgacttatatgtgaatttatgaaagaaaaaaatctttgagactgaatggcaattgaaaaacaaaggaaaagggtcatcgctatctcaaaaacacatcgaaacacaaaggaaaagggtcgtcgctatcttaaaaacacatcgcacttggtcaccgttgttgataatatgtgtgattaactaggtttttttttttttttattctgaatatttataggttataggcccaaagccacatgtaatattaaattttttcaagtgtcattcgaaccagtgacttttaagtttcgtctagggttttaccaattgagctaacgacatttagtgtgtgattaacttgttatagttgttatttttaatttagttttattttattttaacgtcgtttatcaaaataccaaacgcattgatgtgttttattttttcccctactttcttttgttaaacgcgtctgtctcttttcttttaaaattaataaataaaaagataaaaaattcaaaactataaagtttattttcactaatgaaagcgcttataacgaaataaaatagttatttgaggcagtagaaacaagatttgagtatttttaattattatacatcttattttttaatacagaaaggttatggtccttatggatcagggcttgactggatctcccgctaccatacataaacgcatcgtttgtggatagttgcaattatgaacatttaaaatcaatcataaaagaatttttaaatcgatcaggactgctttagactgctcgaaatcgtcgaatttcaaaaactcattcttgcaagcgtttgcgattgcgggcatgaacggttgacaattatttttatttattattatcaaaactatgatacattaaaatacataaatacaaataattataaatatatactatcaaatccaatatattaacattaattctcgaaaccctaatttcttttgtatatcaaaattatgacatcaattcaaagtcaagaatggtaagatacaacaggctccgattggtaacacaaagctatataaaattttcagctgtaaactttttccgaatagtgcaaagctgtataaaaacgaggtgtatgaaaaagttgtacaataaagctgaaagtaaagtttttggtaacgtttttgataaagtttttatgaatgataaccatcaaagctgtacaaattgtaccgttttgataattggttaccatcaaaaaccacaaactaagtattgtaatacggaatatttaagaattgaaatcattttttgagtttgtcttattatgtttttaatttacgtgatgttgctttcggtatgaaccaaatgcatgaagtaatatataagcatttaactatgaaatttatttattttgaatacttatgtagaaaattttatatgttaattattaattttatctaagatatttgttgttattatttgttaattattaattatatgttatttatagtttatcataataatctaatatttgttgttttatattattcagaatactttataatgtttgaaactacaacccgcctgtttctgctatctccagcagtagcatatgtatccgatgtgtttgaatcaatgagatcctaattcaccaaaatatttaatatgatttctttccgagtgttattcgaaccaaaaatctttacattttgccaaacattactttactgttaaactatcaacactaaattttattattattattactattattgtgcttttaaaagatatatattatccttaaaatattttgagcctataaaactccaaaggcttcagtcaatacggagatagagaaagcaaaactagtagtaaaccaagagagagagaaatggaaaatatttttttttcaaaattgactcaagtgttcattgtggctcttctctgtatcttcatatatcgtaccgaatcagctatgtcttctcatcgtgaacaactttcacttaccggttagtatgatatcacaaatatataattatcattaacttgatcagttgttttgacatatttaatctggttcgtgtggactattacaaggaaaacaagtccccatgttcaaatgggtcaattatctatatcctgaataggaaaaaaaaaagaaaaaaaagaagtgcttatcgtattcaattttctatattttgcttaataaactttctcgctagttttgctattccaaaatctacaattttatagtatatgttagttgtgtagtaaaaaatatttgactaaaggagtcaacaccacatcgaatctcatgaaaatgtttcgaatagaaaatttgtcttattaacatttcaatttatgccattgcagaaaatatataatatatataaagaaaaaaaatcatgttttttcgtcgctgtttttattcttacaatatatgtctatcgtatatattataaatacgatttaaatactgctaatttggtttttaggaaataacaaaatttaatattgaaaatatttaatataaattaacaccgtgtttatggccttaatgagaaagaaagagaaggatatccgcatatatcgtattcacgtttctatgtttttttttgttcaaataaatatttcctctagatatttttttccttaaaatctacaatattttattttcaaaatataaatacagggaggagaatgatggcgaacattccgtatccgtatggtggcatatatgtgaaaccaccacccttaaaaagtaaagatagtaatcagaaaggtactcatatagtagtatagtattcatatcttcttaatatattcagctatcgatctcgttttatatttgcaaattatccacagttttcttgtcaaataattattcacttcttctcatcaagatttgatgtagaaatatttacaggttaggacactttatttaagattttaatcatttataatactttctaaaattggcacatacctgattattcgtctattataaatcgctaacttcgatgtattttaaatattatttatagggaagagaggggagacttattataagccaaatagtgaaataggcactggaccatcacatagtggacatggtggtagcagcattgaacatgtttcctctccttagtttgagcaattattatctttcaaataattcgaggccattaggctttgaaaaataaaaactatatagctatgaatgtaactctaagtttatgtgttcttaagtcctatatatgtacttttgtaatataatatggtatattttaagtgttttaagcaataattttcatttcaaaacattaaataatgctcgaaagcaatgagattcataaaatattattcgttaacacaagagaaagcaacaaagtccaaacgtatatggagaccacccgatgcagagttataataaaagcaattcttacatatattttaacgaaaaaaaagaaaagtcttacctatgtatttatcatcatgtcaaaaattagccaaaatggaaaaaaaaaaaatatcaaaacaaaacagcttgactcagacaacacatgtggtgtcaagtatggcttgcaacaagtaacaaactagagaccttgaaactagtctcagaaaaatgcaagacatattatgtagaaatattttaacatggaaactatctctatatgttgatatactgagaataaaacaccagttcaaaagcttataattagtaatgaaaaaaagaaacaagagaaagaacaaggtcattttggctattagtcttcattcattgtactttctaataaaataaaattcaatgagaaaaaagagtgtcaattatctttccacaagaggtcaaattaatcaataaaaactgagtggtggagaaaattaatatttttggggttttcttatcttttcaacacttcttggaatgttcacttttcattgggatttataaataatagtctacaatcaagaaaacaaagagagaaaaagagatggaaagaaaaaagttttcttcaaaatttattcatttgctcattgtgtttttgcttctttgtacgtttctttctcgtaccgaatctgctcttccttatcaccatgaactgttcttgggttagtattgttttaacaatcatataacatccacatatacatcagattgtctaagtgttaattgatgcgaaatagtctattcatggaactttcaatagatagatcattgaccgggaagtgcttaactacgatcagttgcaacttcatttcaagcttacctttcacttgtaataaatacgtatagggaggaagcggatgaattattataagcccaacagtgccataggaacaccatcatcaactagtgaccacgctccaggcagtaatggtatgtccctcctctttacttattttcttatcaacttttaccgaaaaaattataaagtacagattcttaaaattaaagtataaaagagtgtttataatatatatatatatatatatataaataaaaatgttatgtttttttcttacataattaattctcctaaattataatggtttaatgggtgtatgtatgtgtactaaagaaaataggctgataatggttttctactattaacactatctcctttttttcttataaagcttcaacgtttctttccggctattttcaaattttagactccgatttcattgcataattcgtttataatattttgctgccttttctctttaaaaattcataaatatgaattgtagggaggaagttgatgagtatatatagacccaatggagacatatttacaggaccatcaggcagtgggcatggtgggggtcgcactccagccccctagtatatatatattaatgtgtaatcaaggactcacaagcgaagcttttaattctcgatcacgtataacgtatgcgttggtgtagtatatgtttaatttctgttttcacaagccaagtttttcatttctcgaatatgtaatgtataatatgtgtgttggtccagtatttctagtgttcttaaataatatccaaaatgtgtgtttaaaatataatatgtattttgttgttaaagtttacatatacgttttagtctgtaaagctctaaagcatgtactagacaccttaccttatacgttttagacttttagtataccacgaataatatatttaagttattaaaatcaaaattaagatttggaatttcagataatatttggaaaatatcaaactggttcctagatcagatcatatcaagttcctgatactttattcatggctacgttctaagaaattataagtcaatgagaaacaagagggtcaattgtttttcataagattatcaaattaattttaaaagagttgagtactggagaaaattaatacatttgcatttaaaattatactttttgtttgggttttacttcttggaacgttcctctccatgattccatccgaatttataattccctcccattcgtgtatatataaataatagtcgcagtaaaggaaagaaagaaagaaaaagagatggaaaataatactttttcttcaaaatctattaatttgctcatattgcttttgctgctttgtacctttctctgccaaaccgaatctgcccttccctctcaccaagaacttgtaatcactggttagtgttttgacaattatataacatcaacatatgtgtatatataaggttgtcaaggtgttaattgatgggaaaattcatgaaatagtatattcacatgtatatatataggaaggaggatgatgagttattataagcctaatactgacataggaacaccatcatcaaccagtgaccgtggtggcggtggtaatggtatgtccctcctcttttcttattttacaatttttatcaactttctttttaacacttttctacaaagtacttattcatctaaataatatgtcgccgtgttgaaattagatgttactctctattaatgtttgctgctttttttattaggtaggcgattgattaatttacttttaagtcatcatatcgttcaaatatttttgaatctattcgttttatttattttgccgaccctagatggttatgctttttaaagcctcaaatatgtactaagggtgtttaagatccatgatctcacattggtagatgattctcatgctgtgtagggtttggtctttggtgtttgtcttggatggagcaaatatttagctggaaaatagaaactatgaataaaaaaattgttcgtttatatttttattaattaaaaaaatgaattacagataacttcaacttagtataatttgtagggagaagactgatgagtcaaatggatgttggagcatcaagcagtggacaaggtggtggtcgcaaccgccactagaataggtttcgagtactgtattgatgtttaactgtattgtatatgtatttaattttctattccctgccatcataaatcaagctttggaaaagtctcaaacatgtataatgtctttcgtacacaatgttttacgttcttttttttttgttttcatttcaatataatgatagaagttttttttttgtgtagcagagatatgtaaagataatcagattgaaactagctagagaaccaaaaatatttaaatgcaaacaaaattaaagattttatatatgaattacgtaagaggaaacaaaactaaactaaagtaggaagaacatgttcactatagagtaactctttacaaactatttcttattgataacaaacttgatttattctcacaccaccgcataaaaaacgagtatttttaacaccgaaaaccattatctaacgatatgataatgttcaaaaaaaccttttgacatcgctaaatgctcgtaaagtagtcgttaaatattctgttacgattatttgacaactaaatatcgtaaacgaaaatcgagagtcgctaaacttattagacttattattaatcgtcttgtaacgactaataataaatcagccactttagataaagtttttttcatactgctatcgtgtcaccaatataatagcctttttctatctgaaattatatattctacattagctatgttacgtaatacatatttggaaactatcgaaatatcttgttcttattaaaacctcatccacgattatcttaaccggagcactagccataaccatattcatttcctcatctttactccataatctaagtcactttagcagtaacataatagaaatgccttctatctagtgatcggttttgactatctcaaaaatatttatatgcaagagttatttaatattatatattcacatttaaccagaaacaatctgggattcagatatatgactttaaatatatgggtttaaataagatcaggaattatggattcaaatatttgacagctgttacaccatgaatgataagattggatcagagctagtatctaaaatctagaactatttttcattaattactactttgtagagaagaatagtcaatgagaaacaaaagggttaatattttcatacgtttatcatctgttttaataagaacaagagcgtcaacttagttccggactcttgatcctagcttaaagagtttattattattatagttccacattcaaccaaaaacactctcggattcagataggaacaagagggtcaacttcttaaagattaatgactagtggagaaattacgaagtttgccttgtatttttctttagtatttgtttactctctaccgccctaccggcgatgcctcaccattcgggtacataaatgaaattctgatatcaagaaaaattggaatctattttcgaaaagtcatactagcgttttctacctttttagttacttacatttttttttttcgtacctttttagttacttacataaaattccgttttagatgtcttttcttttttaataaagaaatttcttgtatcgtctcttttctgtgtttcagtaatttatgtacatatacacatgtgccaagtatatcttatccagataagcttcagattttgtaagactggtgactttaaattttaaaagaaaacaaaaaagtctgttgacttccttattgtaatagaggtcaaagtctcaagtttgaccattaatgtaaataattatccatttggaaatatctattttagtccaatagaaaattgattcagtaaatgattctgataaaatgcccgtatttccatgaggcacttaatgattaaattctcatagtgtttgaactccaacttcaacataaacaaagagaaatcttcaatggattttgcagctgcatgattaagaaattttgaataagcattttgcaagaagtagtccctcttgaaatttatgaaatgctatgtacaaccgcatttctaatctatagcaaagccggccaaaactatataccatcaaccacatctctctgtttctcgatccattcgtttggcaaaagctgctggattccttttgttttcgctctattacagttattcctctagtcttttgttacatcaaactctaagctttcacccaaatgaatttggtcttgattttcctctggattggtatttgtttggcaataaagtttcaactcaaaccaaaatacttatcaaaatatcttgcaatgtcaaagatatttgataagcttcataactatcttaaccggatcacgtggcataaccatcttcggttcctcaactttaccctttcataatctttgtcacttaagtagtaacataacagcgttcttttgaatgctttctatatagtgatgttgttcattattccctatcccaaaaaaaaacttatatgcaaggacttatttaatgttatatttacatttgtttagctatagtatatttttacattcaaccaaaataaaaattcggatcctgatatatgaacttcaaagatagtggcttaagatcacgaacctcagattcaaatttgtaaggagctatgaaaatattaaccttagatcggatctgaaaatcctgaactattttatgtcaccatacttagtaagaaactaatggtcaattaacaacaaactaaaaggattaatatttgtatacgtaattctttgtttttataagacaagagggtcaacttgttaaagggtaatgatcagtgagtattattgactagtgaagaaaactaaaaagtcaacttggtattattaggttttggtttgtttcattttttcgtggaacgttccctccacctgcatgtacataaatatgagtctaaactcgagaaaaaaataaagatcgagaaatgagaaatacaatttcctcaaaaatgggtcaagttctaattgtgcttcttctcctctgcaccgtcctttgccgtaccgagtcagctcttccttcgggtcaacattcagtcctactaaccggtttgtgattccatatattcataatattcatgcacacgtttgtatatttattagttgattgataagatccatgaatcatatggtctaattacatggaatatatatataggatgtatttaggacttgttaaaacattttaaagctgtatttgtgcttatgataattaggttctcacatatatagaaagttagagaaaacctaaactgatacatgagtacatgtaccaatccattcattgttaattgcgtatcaattaaaaacctatgaactgtataatagttactttcataatactttttgtttggtatgaaacatatacatatataaaaattcgatttatatgttttgttaatttctcaatagtgtaatgtatatgtgttaataaatacgacaagtaatcttattaatttacaacgtctaactatcttaaatataataaaaaacgaaggaaggagattgatgggttcgggcgcttcgggaccagtaagatcatcgcagagtagccaagctggtggacgttttaatgatgctgatcctatcgccatagattacggaaaatattaaatttctttttgatttcagtttttccaaatttaatgatgttttaatcgttttctgctgctttttcatcagtttacagtcaactgttacgtgatatttcccttgtttgaagtcatgaaatttcttgtatcgtgatctatattatatattttgtgtttttgtttgttttcattgttagaacatatttatttccttaaaacatggaaacgtaatctatatttggaaaaactaatgtcatacgattttttagccaagggaacagaaccatcgatatatggacaaattaatggtgctcctctctaatttcgccatcatctcttcctaatttccaatttttggtttaagaaatgtatttttttgtattttagctatcggccattacaagtccagtttttttttacattttgataaaaagaaaaaacaaatccagtttttaaagtctcagtgatgtacgtgttttcagatatatatatatatatcacatatgggattgttgagatggtggggtttttaatggaggatcgagaaggacgatctaaaccaagatggaacggtcgagatgactaaccgatattatagaaatagcgaagatatgattatagaagaatcaaccatcttttggtttcttcttgatttttctataatcatatcttcattattttcataatattggttaatcatctcgaccgttcgaactttgtttaggtcgatcttctcgatttcccaataattttctagttcattattttggatgtggtggttgggaagataaaaagaggaaacaaaagatttgtgaaaagcggaacaaagattagaaaataagaaatgattagagtcatttcaatatccagtgagcaaaaactctaccgaaattgaaggaattgaggagttttgaagaggaagaagtagtggcgggtgatgaaatggcaattgatggagaggaggaattagggcttcttggtgaatttgggggaaattttgagagtgaagagagtgtttatgtcattgaagaaggcgaggaggcaaaaaactgaaatgaaaggttcttatttagtttatccgttgcaatgtgtgccaatctttttttctaatttattattaaactgtataaactttttttttgtttattttctgtacaacaaaccgaagaaacataaaataaatagttagtatcttatatgcgtatataaaatctaaccgtctcacagacaggttagttaactatgctttgtctttacttatagatttgcatacgttgcagttggttcgaatggatgttgcaacgatattacatgatgatattgttggacaatcgcgtcttagactagttccgatgtaattgttttttttttgtttttgctttaataaacacatctccttgtcactcacaaaaaaagaaatatgaagaaacatgggacaagataattgaaactatcgaaattggtttgcctataattttgttttaaaacaataatgcagataatgtgtaccaggatacaaacactgtgtttaagaaacacggtagatgataaattctagtgttgtttaatcgaaatttatgtggtatattcgtttacaacctaaaataaatttaactgtaagtaactaagtataataatattatagatgaaattaaatttatttaaatcatatcaaacaaaatatggatgtttgtaatcatgtatatgaaattaatatttataaataaatttatgtgatgtagttataaattggatgttaattttaatttataagttctatttgtattgtagttcaaggttggaaaacaaaatgtctatttgaatgattaatatatactgtatgttccgtggccattcagttgcttacgtgtagccttagagaccaacacaaatatctcttattggagagaacaaatcgtgtcgtttctaagcactcgttaaatctattaaaaacacacacaaagtccacaagtcaattagtcaaattcaatccacgtgtggtttgaacactgatattttatttaccaaatttggcttatagtttcaggttatgttatatgccgtttcaggataagttttggaccggtccgtttgtcagagacttgaacacaaaatttgacattccagaatcaaaaacagtgccgtttgtacgatcaataaacggcaagacacttaccgttgcaaatagtcaatcttgctttttgagctaaagactgtaatctgaagaaaggataagactttggacacagagaacacaaagagatcactgaaaagaagaaaaaaaaaatggcagctttgagttcttccatgaccatctcatatctacattcactttcttgcaacaaaagttgcttgcttacatctcaattttcaaaacccttgtttataaaccaaactcagaagaaactcagattctcgatttccttttgcctcaagcaaaacgaatctggtattgaacaagtcgaagaagaagaagaagaagaatttaccgttgtgacggccgtaaaaagcagatacaatgagattgttatagtggatacttttgcttctagatatcttcttcttgattccactagtgagaatttttaaaaccctaattcctctgtttttgatattagatcctctgtttataacctaagtttctcattatgtagggaatgtgcatagtgttatcaataaaggaggccagaattggactggagcttattgggtatgttacatttttacatcatcataaagttgcaaaaatcatagcttgagttgtttctctgttgataggtaaatgttgttattgtgtttaattttgaatcctatcaacatttttgtttgaaggacgagtctgcgtgtttgccgcctattatccctaatggtcccattgcaatctacggcttggtgagaaactacgtggtgaatcttataccgattgtctgagaagtacatgaacataggcatgcaatgagtcaatgatgtgtttaaatttttgttcatgtgtttgttagggtggtggaacagctgcaagattgattcttgagttgtggccttcaacggagcttgaaggttgggaaatcgatgaaattgtaagtaaactatcggattttcttgcggcattacgtttgcatattggaaaatcttgagttcacttgtgattttcttttatgaacagtagttgattgagaaagcaagagactatctcgggctgtctgagctagagataccgacatcaaaaggcggtagactttgtattcatgtagatgatgctctctctccttgtcaagatgattcaaaaagatatgctggtgagatttacaggttaatgtatgttgcttattcctttgttcttttatgaattcttgaattcttatgtcgatattttagggatcatcgttgatttgttcgcggatggaaaagtgcttgatcagctgcaagaggtactttaatttgttatggtgttagtattatatagtcaactttgtgacaccgagtattttgaattcgagtatgtacagattccaatgtggctagaactggctagtaggttaatgcctaacggtcgccttatggtgaattgtgcgggaatcgaaacagaagtaaagaatggaaaaccagagttggtgttagatgatttggcttggatgttgaattctactgtcaagatcttatcagaagcatttcctggacaagtaagtaacacatttcatcttcatatccttttgttaactacgcgtttaagataaaaagaaaaacatcgcgattatttattgttgcaggttagttggaagagaacaccagattcagaaggtctcaactttgtggcattaacaggaggcttacctgatcttagtgactggtctagtaaggttccagtccgtttaagcgaatcagtgaagctatggaagctttgcgagacggtccctttgcaactcggtgctttgaatgcatcttaacatcaagagttttgccaaaagatttgatcagaaactcacatgtggatagtgaaagttgtgtatgatttgttttgccaattgagtacagagatacacaaaaggacaaaaagaaggtacatatgaatttcacatttgaacttaagaatttttaaatccaaaattcgattatcataaaattttgaatttatacaagaaaccttttatgatactatgttatatatatgttactattagtcagacaaatgttttgaacaatttcttggttcagaccgatattagacaattgtttgacaatttaaccacttgacgaaacttgatatgttgctcgaactctaatacattgtccgcaggttaaaatctagtttcttactaaaaagcattttgatcgatattgttggcaacaaaggatcttattcaagagaacaaatcacgtcgtttcttctaaactcgtttgagctgttaaaacgtcaccaaagttttgactttctatatacacaaatcgtgccgttttcacagtcaataaacggcattacacttaccgttgcaagaagtcaattttgctgatgagactgtaaaactgaaggaagaagaaaggataagacattaaacgcaaagagatcactgaaacaaaccaaaaaaatggcagctttgtgttctcatttgaccatctcatctctacattcactttctcgatacgaaaattgcttcctttcatcccaattttcaaaacccttgttcctaaaccaatctcagaacaaacccagattctcaatttcattttgtctcaagcaaagtaatcatgacgagaggcaaattcaacaagactctgccaaagaagaagaagaagaagaagaagagtattgggttgttacagcagtaagaagcagatacaatgagattgttatagtggatactgcttcttccagatatcttctccttgattcaactagtgagacttcttataaccctaattcctctgttttggattagggtttttgtactattctatcctctgatttttttaaaaccttgctatgtagagaatgtgcatagtgttatcaataaaggaggccaaaattggactggatcttattgggtatgttagactttcttgcatcaatcttttgttaatgacattgctgcagaaaaaatcatatctttggttgtttctattttcaaaaattgtggttttgtcacagataacgtaagattgtgcttaattttgaatcatatcaacaaatttgttgcaggatgagtttgcgagtttgccgcctattatccctaatggtcccgttgcaatctacggcttggtgagaaactacgcgatgaatcttgtaccgatttgatatccattgtctgagatgtgttgtgttgttgtttcttagggtggtggaacagctgcaagattgatgcttgagttgtggcctacaatgcagctggaaggttgggaaattgatgaaattgtatgtaagaagaagctatcttgactgacccgattaagattttgccgcgtttcgttggaatcttgagttcactgtgattatggaacagtagttgattgagaaagcaagagactatctcgggttgtctgagctagagaaaccgacatcgaaaggcggtagactttgtgttcatgtagatgatgctctctctccttctcaagatgtttcaggaagatatgctggtgagatttcaatatcaatatcaatatatgtttgcctattctggttcttattctgagctcttatgtctatttagggatcattgttgatttgtttgctgatgggaaggtcttagatcagctgcaagaggtactttacatggttatgattgttagtattattagtcacatatcgacactttacctgttgatgtattgatttcgattttctttaggtcccgatttggttagagctggctagtaggctaatgcctaacggtcgcattatggtgaactgtgcgggaatcgaaacagaacttcagaatggaaagcctcagttgttgttagatgactcagccgggatgttgaattccaccgtcaagatcttgtcagaagcatttcctggacaagtaagtaacacatttcatcttcatcttttggttaatcacttgtttgaataaaaagattaaacttcgttttcgtggttgcaggtttgctggaagagaacaccagattcggaaggtctcaactttcttgccttaaccggaggcttacctgatcttagtgactggtctagtaaggttccagttcgtttttgtgaagtagtgaagcaatggaagctttgtgagtgagtacacaaagtagctgaagttttttttttttggtcatttttcattaatcgtaataaataattaatcaatttaaatgaaattaacaatgtgatttttccttttttatttagtgttttttttctcctagattttttggtttcacatattattcatgtttatggatattagcatcatttaatgattttattataataaaacggatatttaaagtttttatgaatcatccattattctttttttaaatccatctttcatatctcaaatgtttaaaatatttgaattttatagaagaaaactttaatgatgttatgttatgtatatataaaaaaaagtttttatcagtttctacttgtactttatttttaaacctaaaaacaatctttaaataattttaacctttgaaatttattttgttttaataaccaagggttagaaaattcaattatcaactacaacacaccaattgttaagccaccagaagaaagtgatgactttggtagcccatgacaaagcagaaaaaaacagtcactactactaccactacaacggtcatggttgccactaatctaaggccgtacacatccatatttacattccaaagaattctctgcaaaaccgtttttaacgctctcagtacaagatttagacacttgtcactttatcataaaatggtagaatctataaatacaaaatatacaatgaatgtgtaacttgaaggttaggaaataaaaatatatatgattttcaaccatcttcttcaacatttctttcaaacttttcttcaactcttatagtcttataacactcacatcaactagtagaactacgagtgtcgagttctttttttaagaaattattagtataattttttaaaatattctcatcctattaaaaaagaaaagattcatatatccggctaatataattcatagataaaaatgatatttttcagaaaaaaaaagaacaaatttgggtcaacatcagcgtcacaaaaaatagaaacgtcatgtttaatagatagtactagcaaaagcctatatattcaaacaacattgtctaatttctcatattagaaggactaaaataacgcctttcacttaatttacggatatagatagatgatactaattaatctttataattttaccgaacctattctattatttcatcttaattttgttttactcaattaaaaatctgaatataaatcacatcaaacatcacaaaaaaaaagatatacgcactttaaattttatttaactaggtcgttgttcacaccaaaaaaacaatacaaagagagtagattatgtatgtgtcttggtcattttagtttgtgtaattgcacaacatattagttcaaagatataattttcaaggtgcgatttagtcatagctaatttgttggttctgcatccggttatctacttatctctacatttgatctcgatcggtttaacctaatttatattgaactaaaatggattgaattagtcaatagtcaaaacgatgaccttgaaggcttgaacctatgaatacacttaagataagtcgaatccaacaatattgaaaaatactttactcttaataatcttatcatggaagaatacgcagctaatgtcttaagagaggaaacgaagttccagtggagcagaagagtgcgtaccacgtcatttgattaaaataataataatacaaattggttacatataactgcatcctactcctattttcgttcttgcttgcacgtattgaatagtatagcataaatatatgttaccttaatatcgcaacgacttgatcaattcaatccatagataaggctgactgcttttaaaattgtatttccattaaatttatgtttcgtagtatagttttttaaatttttatatctaatgtataaacataaaaactatatatatatcattaagataaaaaaattcaaaaaagtcagaaaaactgaacaataaaaacaattatttaggaacataaattattttttagtatgtaaaactgaatttaaagattgataaatagaatttagaaatggaggatttggatcataagaatatataattcaagcaagcaaattaatttatagaggaaattcacatggataataagacaaataaacaaagaaaataaattatccacacaaagacaatcaatatttttttagaaaaatgtaccatgaagaaaattcaagccttttgtggcgcagccgccggagtttccggagccttggccggagtttcaaccaccggagtttcgggagccttagtcgaaggagtttcagccaccggaacagcggcaacaacttcttttttctcctcctccacaggtttcttctcttccacggcaggcttcttctcctcttccacagctggcttcttctcttccaccggcgccgtcttcttctcctcttctacggctggcttcttctcctccgcagctgcgaggaccggaacctccaccggtttagcctcttctttcttctcttcaactatttctatctctttctcgccggttgcaattatttcctccggtttagtttctccttccttggccggttcttcggttttcacgacgacctcctccacgacttccacctctcgtggcttctcctcctcaacaacttccttttttgctggactcttctcgaacaatttcttcatccttggaacaaccttcgacttccaataacccatcttttaaaaaattaacctgccaccaaaagtaaaaaacattattagaagttttctatatatatggttcgcggtaattttacataaacataacgaaaacaaacgatcttaactcttaacctaaaagactaaaaacaaggcaggatcatcgatgaaccttcgtttttatacatataaatacatctacctatatagactatagattataaattataacataaatttaatcacaagcctttgtcttttttaatttatacgtgttatgtagaatctctagaatcacaagaatatcaagcaaacccaataacgagcagaacaacaaaaaaacgaattctaacctctaaattatctaaaacgaacttgttatgatgaagttttttacctgaggctcttattcgtatggaatagactttgtttttcttaattttctcactaattactttttatgtctctctgatttttaagaatccccttctcgtattatagaggagattagcttctaatcaccatggttttcaactaaattacgttactacccttttcttttatcgtcgttgtctatctttttcccgctgccgccagaacagattctgttggctggttaaggaagtccggttcacattagtaaacccgaaatagttacatgaaattgaaatcaataaatgtttttctctctaatataatactttattgtcatctattgagtagttttgttaggaaaaaaaccggagtcttgcataatttgtgatttttgaaatttcggttttcttaaaataccggttcaggttctaagaaaggacagcgttgaaaaaggatgataagggtagatacgtaatttaagaaggaaattgccagctggcacaacagttggcaaatatagaatatacccctttcttatcttatattaaaaggtatattaatctgtttaactaacatttgtttatatctaattgaattagaaatatctaaaacaattaacagttattttaaaattttggtcaactgattagctgttatctaaaattcgtgtcttaatcttgatttttagcaattaaaatgacatcaaatataggagatgagtatccaatacactctggctatttaaaggaaatcaaactgattatagatttttttttttgtataaaaaatttgttttgcaagacagacatcccaccctcgatatctaaggatcataaaaatatgaaatcttcgtcacaacatggtttacactcctctttatgtataaacaaattctaattgtagtttgattaaaaataacaaaattgaacaaacactaaattattttagagattcacaattcatttccacataataaaaatttaacttctctatttgaaaagcatccaaaatttatacaataagaaaaaaactcaaatcatatgcagaactaagtatcagaagacaagaaaaaaaattgttatcacaagtttcactaactagtaactggtgaattaatttatgcaagtgattcagttacctataaatagtagttactaggtatataataactaatcaaatttattggggaatatttttttttttttgaattttgtgaattatataacggtaaatatgggccatgaggatgataagatggaagaaacccatgtgcatcatcatgggtttcttccatcttctgcttgtcgtcgatgattagtagtcgtgttcttctgatgttggtttgattaaatggaatttgagagaattttataataaataataaaacctttttaaaattcttgtaaaatcagctaaacagtttattatcttataatttaataaattgaatatctatacattatcatatatttcacatattatattttgcataattaagtaataataagtaaataatatctaaaaataattatctttacttaattattcaaatataatatgtgataatgtaaagaaattcaatttattaaattataatatatacaaaaagtagtaataaaaattgttaattaaattttttaattaattttgttttttgaaaatattaatctaagcccttgagcaggtccggaaattcgttgggtttagcgaggcatgcttggacataggtttttttgtcaggagtccataaaaataaatgcccaacgcagacatttgtgatgatagatatggtggagaggagttgagtcactcgtgtcttttcttttaaaccttagcgttgtgcagaagttaagagctgacaaccaatacaatctccagatgctcaaaaaacgttactaggttgtgatttggatgataaagttgtatgaacgttaccaggttctgcttaagtaaacgatttaattaaaatctcttaatatctttgtttttatgttgcatttcatgtaaaacaagattttttttgtgaataagttatgcattcatacaaatgcagccatggcatgttctatttgttggtcgataattgagtttcagacgttttcgaattgtaagagtcgcaagtaaagacacaattcattgtgttgtagtttttttttttttttctatacaaatcagttttgtcgtgatgaaaataacaagtttcagttaaatgaaagttcatattttggtttcttttcttctttaaaacagaagcgataatttttaacttttactctgtttattccttctcttactcctatttttaacatggtatcagagcttgtattgatcgtggagaatgtctaagataaacgcgaataagaaaaagtctcatgcgagaagaagagaaagatggtgacaacatatcaacggtgagaaaccgaaaaattaacttggaagcaaagaacattatcagtccattgacatcgaagaactttatatgacattttttccaattaagggtgcttgtattccagcttttaatatgcttgtcgtttgctactccatcacttaatgaacctctgtggccaaatgtaacaataattttcatcaaacaccgtctagggttaaactaagtttcctaaattacgatagagtagagattttttttattgaatctaatgttaaattatattcaaaaaaaaaataaacgtttatacatacaaatgtaaaaatttatcttaaaaacatttaaagaactctatggtgttcttcttgacccaaaccacatttgtatctcattagtgtacttctctcgagcttctcttcgtattgtactcaaacggtttctaatatttttgtcgattaacttgataagcctctccgcatttgatggctcctcgccatgtcttctaccattcatttccctccatatcgagtgaactgagttctgaagaacatatccagggataaaactctgtggtgtcgaagtcttttcttgcaagcatcaacataatatattgccatctttccgaatatttgtccagccattcgaaactttgagaaaacacattgaaagaagagatgctcccttgtcactatagagtatagatacaaatggaaacaatgggttttcacgtgataaagatattgtacgccttttattataatcatacaagatacaacacatgaatgaattttttttttgtgcaacacatgagttatggagatttttattcacgtaataaagtcattgactcattgaacggcttttattaaatcatacaagacacacaaataagctcgaattgtagaacattcagttcctttgtgttgaacttaagaccctagagataaagatttggatcggacaaccttagaacgggcgtggcaacaagtggattctttagctccaacacgatcccaaacttctcctcgacctccactctctctccttgcggaattttccaatcaaaagaatgcaaaaacgtagcgagattgtaaagaacaaccctctcgcccatagccattcccacgcatatcctacgaccagacccaaacggtagataattgaagtcatttcctttgaagtcataagacatatccagaaacctgtcgggatcaaacttcagtggattctcccatacattcgggttcctatggattgcccacgcgttgatgaaaatctttgaatctttagggatggtgaagccgcccaccacggtggtttgtgacgggcgccgaggaacaaggagtggagcaaccgtgtgaagccttagagtttctttcataatggcgagaatgtatggaagtttagagatgtgagattcttccacaactttttcttttcccacaactttgtcaacctcttgttgagctctcttcatgatatcggggttgtgtaatagctcggccatcgcgaattctattacgtgcagtgatgtgtctgtaccaccgagcaccatgtcctagaaaaatacaaaaacagccatatataacaaatctatttgcgttacgagggacaattatttttaacttaccatgagtacggccttgacatcgttcatggtcaacttcgtcttttcagcttcttcatccttgactttcaacaagacgtctagaaaatccacagctctcccgtcactactgtccctatccatccccaaccgttggttaatgatccggtcgaacatctgatccattctttgagccggtcttcgcatacgcttagccaaaccctgaagatcaaaccggctcaataccgggaaaaagtcggagatattgggcactagcaggaggtcgttcatctctctaatcacctctaagaactcggctccaacaacctccctctcttcttccttaaccgttgttccccatagcatctgcgtcacaacattcaacatcatcaagaatatttgttctcccaggttaactggtgaaccgacccgagcctggtccgccaaataccggacggtttgccgagtctctcggcgacggaggtcagtggaggaatccaacatggcgtttctcagtatcctattaacacatagcttcctcagcatccgccactttggtccatacggcgaccaaatgatctccgtaccaccatacgtgttaacagggcccacagcagggacatcgtggttcgcgaagatgatgtcattcgttttgagaatctcttgcgctacttcagaagaggtgaccacgattgtgagcttggccccgagccagagtttgaaaatgggaccgtgctttttagccagcccttggaagtaggtgtgaagctccggttggaggaatggaaggtttccgataatgggaaggccccaaggtcccggcggcaacggtggagaccgccgtttgcatttggcgtagagccaaagacaccaacaaagagttgatataactatcacagttaaaccatagtcaagttggtccttgcgacttcggtttctaaagagactggaaatgtctgtcattttttttcatagatttgatgtagagaactgaggagcggttttgatcttcttttataattggtgaattttattattctctccatttaatgagcggtgttgttttgtatttttaatacagtttacaaaaattaatcttgtgtttatctttattatatcaactcaatataactagaaatagatatttacatatttttcttagtgtatgtgaaacatgttatattaatattcaaaaacgtatagttttgctatgttcaatgacaagaattgtttttccctgtttttaatctgatgtttagctaccacttggtttcttgggaggacacaaatatgtgtgaggaactttatatactacaagaaaacatatcgaattttgaccaattttttgactaaacatttatcatcttaattttttttttataattaagttgaaactcgtgcgccgaggtttggagaattctcgtgtttgtgtgtctatcacgtttgttcagtttcaccaatgatataatacgcacttagtcacaaaggagatatgtatgcatatgcatactcatagttgttcataagctatcatatatggaacacgagaatgattatctagagtattgaggaaccataatgtgttacaaagtaaaccagttcaactagaatgcaagaattaaaagtgtcccacacacaaacacacatgtgtctataactttgtatatggttctattgaatggtcttactattccactcatctgacaaaggtaagacgacagctcatgagcttaacatagtaacatatctagtacagtcacggactcatcaccaaaagaaaaagaaagcaacaagatattatagttgggtctgggactatcaatagagtttccctttctaagactactatagctaataatgaaaaagtgaagagactagacaagatgtaccaagtaattgggctagttgcgtgtcagactccctcctaaaagagtgagatgactgctccctgaatttgaggcttcttgagagagattgcctattaatcttaagggaaaatttacaaaaaaaagattatcctaggagactatggatcttggcccgaaacttcattaaacagaaaattaaacaactagagaagaggttgtttaacaaatggtatatactaagcttttggtcacaaaaaagacaattatgcatatataattatatatccatacatacaaaacagtaggacagccacagagattaaaatagctacctaacatctatcaatagagtctcatggactcttcaaaaacgtaaaagaaagcaacaaagctttaatacttgggtctaggacgaacaatggagcttcgcttcataagagttcttacgttaaatagatgaagcaattagacgagaggcttaaagaggttatttcataaatggtatagtatacctaatatctggtatactcacggaccttcacacacacaaaaaaaagaagcaacaagctttgataattgggtctagagggccaacaatggagcttcgctttgtaagatttcttacgttaaatagatgaagaaactagacgataagcttataaataggttattccacaaatggtattctacctaatatctgatatagtcacggactcttcacacatgcaccaacaaaaaagaaaaaataagaaagcaacaagacttgctaatggggtctaaggcctacaatggagcttcgctttgtaagagttattttgttaaatagatgaagaaactagacaagacgcttaaagaggttgtttcaaaaatggtatattacctaacatttagtatagtcacggactcttcacaaaatttataatttctctatttcactaattaagcacatcactttggttataggtataacaaaagagaagggttatgttaaagagcaattaagaaacctggaaatgggttcagggaccataaacagtaaatccccataaggaatttaataaaaatggtagaagcaaaattcaataaaagaacagtaaatgctaaagatagactttgaatttcttcatttgtaaaaatgtacttccctttataaaggtgcatggattctctttttttttaccatattcgatttctcctttttactatttatcaaagtcttcttaaaaatttggaagtaatggagacaaatcattccctcaaacaaaaaaagttaacgagtgttgttgtgtaacaaatccacctgtgaccgaggatacatatgactgatgagctaatattagttgaaacaatttttcttttcttttttaccaattggaaacaatttaatatatatggtatgaattacttatactcttaatttctctatttcagggaatataagaaaaagagattgataagatctttgatacgctaccgggaataatattgaacaaaatgctatcaaccaaataagacatataactacataagcaaatcatacaatttggaaagtgtttttagtttcattttaaatcattgtaaaatagcataattgtagcatgattatcgtgaaaatccaagttgaggccatatttcaagtgcggtcccgccaaaaccctattgaccttaatcatggcatcttctacaccaaactcgtattgtttatctttctccatgtctatttcactcttttcaatgtaacctaagttgattttctaagtatgaaacatcaattacatcctgcacaaggtgggtgaaaactaggacatgcaaacagggtgtagacgagtagttcctagtttttatcacttttctaattgcactctgaaactagattctccttctatctttaatctctcctgaatttcttcttatctcatgcatgtcttcttctatttattttttatttttttaaatttgtcgacaatttctatttctttttattattattttttgtatgaatcgtttctaacctctttcactcagcacttaattagaaatctgaattaaagatcaatataccatgggttcaacaattgaatgaataaaattttagaaactaagatcgaaaattatattcaaagtgctaagagtaatcattattttgtgtttatattctggtttctacttttatgttcctattttttcttctcattattatatttttttggtttaacactttttcttttttccaactcatgttaacaaattaagctacaaaaaaaaatatgttgtaatgggaaacaaaataaaaaagaattatgttatgcgaaaaaaaaaatatgcggcaacaaaattttggcttgttttaggtatcaaataaatttggaccggcactgtttgcgagcgtagaagaaactgttcacacatactaaagtaatggttgacaagatcagtttcagagttgacgataagaaatcaactaggttaacaaaatgtaatgaaatcagaacatggaaatctgaacgtggcagataaatatacatattcaaactcttttctgttaatttgcgcagaaatgcaaattcaattgctaagcctatgcggcctttacaacgaatcagttaaaataatcaaagtaaatcaaataatctaatgatgatatatcgtgtttacaggtttatatggaggaaaatatagtgatatgataatcctcatttaaatcattatatagtgaagatactacttacacacgtaacctcctcgatcgtcttttccgattgaagtggtacagaatcctatatatatgactaccttcttgcaagttttccaccaacaccacatctctctctatctatggaagcattaggaaactttgattacgaaagctacaccaattttacaaaattgccatcctcccaatggggtgatcagttcctcaagttttccattgctgattcggtgagcccatttatatctttccgactatcttttaacaatcaatgcacatttgtgtattccttatacgtacgttagatggctatataaagatctttgacttgtatcaacttccaggattttgatgtccttgaaagagagattgaagtactaaagcctaaagtaagagagaacatattcgtgtcgtcttccacagacaaagacgcgatgaaaaagacaattctttctattcattttctggacagtcttggtctctcttatcattttgagaaggaaatcgaagagagcctaaaacatgctttcgagaagatagaagatttgatcgctgatgaaaataaattgcacacaatctccaccatcttccgagttttcaggacatacggttactacatgtcttcgggtaagaatttttaaaacatatacatgttgtccggtaagtaatattttatatgagttcttatagtcttattgtatcgaattttcaaattctatttccatgtagatgttttcaagatattcaaaggagacgatggtaaattcaaggaaagtttaatagaagatgtcaagggtatgctaagcttctacgaagcagtgcactttgggacaacgacagatcatatattggatgaagctttaagcttcacattgaaccacttggagtcactagctacaggtcgtagagcgagcccaccacatatttcaaagcttatacaaaatgctcttcacatacctcagcaccgaaacatccaagcgttggttgcaagggagtatatctcgttctatgaacacgaagaggaccacgacgaaacacttctcaagctagctaagctcaatttcaagttcttgcagcttcattacttccaagaattaaaaaccatcacaatgtatatgtcattgatctagttttcttcaagatagctagggttctttctgactgcatattcttaatcttttacatattttggtaggtggtggacgaaattagaccatacatcaaaccttccaccaaacttcagagagagaactgtagagacatggtttgcagcattgatgatgtacttcgagccacaattttcacttgggagaattatgtcggctaagttatacttagtaataacatttctagacgacgcttgcgatacttatggttcaatttctgaagttgaaagcctggccgattgtttggaaaggtaccttaactatatctattgcaatgattgaatcacactaaacaattaaatatgagtggagtgtttgataaccaattttttgtgatatatgaacagatgggatccagattacatggaaaatcttcaaggtcacatgaagactgccttcaaatttgtgatgtatctttttaaagagtatgaagaaatactaaggtcacaaggaagatcctttgtgttggagaaaatgatagaagaggtgattacttaaaaaaattattattcatgggatggtaataacttgtaacatgtttaattttttttggtaagcagttcaagattattgctaggaaaaacctcgaacttgtcaaatgggcacgtggaggtcatgttcctagctttgatgagtatatagagtctggtggagccgagattggtacatatgcaaccatagcatgttccatcatgggacttggagagattggtaagaaggaagcttttgagtggctaatatctagaccaaagctcgttcggattttaggtgcaaagacccgtctcatggatgacatagccgactttgaggtactagttttcagtatgtttggtttttttattgcttaaaatttgacattatatataagaatactataccaattaggccatgaaatttcaaacaatgtggcgcataaattttataaaatatatggactgttttagtcaatttcataattctcttcgcatagattatgttgaaagttttggtataaatcatcaggaggacatggaaaaaggttacactgcaaatgcactcaactattacatgaacgaacacggagttacaaaagaagaagccagtagagaacttgaaaagatgaatggagatatgaacaagatcgtaaacgaagaatgcttgaagataactaccatgccacgccgaattcttatgcaatccgtcaattatgcacgttcattggatgttctctataccgcggatgatgtttacaaccaccgcgaaggaaaactcaaagagtatatgaggcttttgctcgtagatcctatacttctttaggacttgggatgcatcatgtttgttactttctaattttttatgtgattgtgttatgtgatttaccgttttcaatctcggacatacaaattgtgttatgtgatttacggttctatttgattatcatggttgtgtgtttattttattactacaataaaatgtttatgtgtttgattctcatacatatatgactttttgtcttaatattaaaaatatgttgaattagtatggagaaggctatttatttattattattttttggtagaaggagaaggctatttaattaatcaaacataacgtagtattttcttataataaatcacaggggaattgttaaaaaatgtccatttctcaataccactttaaaaactttctcaaaacaatacctctaaaaatgataaatgatttgggctaaaatggagactttatttcttgtttttattgaatcttagacatctgtcatttagacaaaaaaaaaaaaagacatctttcataatatctagccaattggcagcttgaagattaccgcatttatgcttaaccggttcatcaatttcggacgcgtattagatgtttactatgcagaagatgatgccttcaaacaccacaaacgaaacttcaagattatatccatagatcacatacactgtgtatgatacacattaaagagtttagtgatttgggaatatcattttttttcctttttgggtttcgatgaagtttacagaaaattataatccaacaaaattagttcacaatgatgaaagatttaaggcttctacttatgagttctacaaatgtcttacacttaatcacatcactcaataacatagtttggagcaacagctaagatcctctcgtctctttgtgaagattttttcttcgtttcctctgcttctgcggcttcttcttgctcattagctaacactataagatgaccttctttacataccaaactctgtgcaatgcatagcttgtgttagatagaaacatcatttgaaataattttattcttaacttctatgattgttttggatttttacctcaatgatggctctgagtttcttgatatcgagttttacttgctcttgcgaactatatttctttttctcattctgttgatcgatgaaccatcgaatcagttccttttgtctaattccaggcaattcagaacctaaaggaaaaaaattgttttcaatagttgaggagagaaaatgaaaagtatggaaaattgaagagtgttgttgcttactgtctttgtttacagtttcttcatgttgtctaaggcgaatgactaaagcctgtgtgattctatcatattcttcctcgctaatcaccagcttttgagctgctgctccattatctgttgctacgtcatatgatgttaattatgattctttcttaagtgaggcagagaaaaaatgaagagcacaaactgtgcataaatacctgcagttgcagaagctggctcagctgcaccattctgttgatcttcctctccatcaacagggttttcaatgtcatctgtgtcgtccatgttgtcaccattagcatcttggtactcagaaagatcgatatcgcctgactcaacactggataagagaagcaagtatggttgtttacggttaacattttgggagaattttaggagataaaaatattttttgaagatgttcgaagttacctgatgactgaagtctttagcagtctgacagctaaaagaacatgacttggtttaacctgaaagaaaaataacaagttcccagataaatcaaatcaactactggatactggtagaataaaagaaaggaacagaaaaacgttttaggattatctcaccagaatttccaaatgactcctagcaatggcttctgagagcctgatcagtgcctctagctgcctaactgtcattcgatatgcgactcttgtacctggagttgtatcacctctacgaagagcaacataagactcgacaagtaactttcttgcttctgggcttagctgcaacacaacagatgaatatagagaaaagatgttagcatctccagcaaaagagcctttagcaatcaaaaacttttttcgggttagtcaacaacctttggctttaacgttttggcatatgcaatgtagcgcttgagttgtacggtagtgaattcaggagatagcgctgcttcatgcttctggtgaactcgcacaatatgatgggcaatgtggtaatccgttacctcatcagggtcatcaatcataacgtacacaagatcaaacctcgaaagaatggcaggtggaagattaacgttatactgaaaaagagcatgatcaaaccacaattagatataaaaccttccatgaaagttcttaagcaaagaaaggaatacaaatatgcatctgtttggtctaattcttggatcaccttaccttaagtggtttagatttatcatatcgcccaccaacaggattagctgctgcaagaattgatgtcctagcattcaaggttgcttgtataccagcttttgtaatgcttatcgtctgctgctccattgcttcatgaatagcaacctttgtgcccaaatgcaataattttcatcaaacacactctaagaaacataatcgtctgtatagtaacaagcaatgatgctgacttacctgatctttgatatccatcttgtcaaactcgtcaatgcaacatattccattgtcagcaagcattaaagcaccagcctgttgaagagtcagataaccttaattagaaaaagagcatagaaatcaaatttacaaagaaaggctatccttctttaaagcggttataaagtttaggtaacttgaaaactctaaaattacctcaatgcagaattcaccagtttccggttcttttgccacagttgcagtcaacccagctgcagaagaggacttcccagatgtatacacagatcgtggtacaatacctgcggtatacctgcaaataacaaaccaaaactgaatgatcagatttcagaaaaggaaaaaaaaacagacagctttgattttcaatgagaatcattacttgaggaattgggatttagcacagctgggatccccaactatacaaacattgatgtctcctctaaggttgatgccttcatgagttgtcttgtgcacaccgcctagaagcataagtagaactgcacgtttgatgtcttgatgaccaaaaacggttggggccatgcttccaactaacttattgaagtaatcaggagtatttctcatctgctgaatttcatctaactcttctgcctgcaaagtttaaataatcatgtaagagaaaaaccaggatgctgcggtatattaactcttaagacttataggtagtttatttcaagcctcaccgtgaactgctgttgatcatcttcgttagaatcattttggcggttcctcatgtcagtgttcctactaccatcagcaatctagaaagaaaaaaacattgatattgatcaactggtatcacttaagttatggcttgacagatactaaaaagttgacaaacctgcactgaattagcgataaaggcaagccgatacgaaagatctctaactcctagagccttgagaccttgaacaccttcatgtccagcagtagagcttttctgctgtgatgagtctcgacgacattctgctctctctccaggtgctgccagtgctgatatgtcaggtataacaactactgttcccgtaaaaataaccctgcgagaacaatcccaaaaggagtcacaatcaaatgcaaaccctttattattataatgatggaagaaataacttagagaactgacacaaaacgaaatcttacgtgtcacccgctctggcctgttccacaatctcatgacgcaaaatgacatccaaagaccgtggcaaggaacctgcaggtatctcttttgaagtctcctgcattctaaccctttgccaatccgcaaacttactttcttgtctaagcaacgcccatcttgctctgttcaaacaagtcgggctcacacagatcgtaggctgcaacaaggccacaaatcactcaacaaaccaaaagaaaacaagctactacttcttcctactacaaagtgtataaaaaaaaacaccaaaaatcaaagaatcaattacctgtgtatacttaaactgttgttcaacattctttataacactaccacaatctaaacacttgaaagtcccatatagaagctcaggtctcacttcacttgttcgagtaaccacacctgtcaccgacactaactttccaatttctgccgtcgttaactccctcaacctacaaaaccatcatcatcacaatcaccacacactaaagttaagccaaaatattcataacaactactataatatcaaaatcattaattagatatttaaaggtgttaccttttagtgaaaggaagattgtagaaagaaacattgatatctttatttggagtatcatcagaaatgaaagaaggattcatttcaatcacaaatctcttacacgcattcctcaaatacggctcaaacctaaaaccaaaatttcacacacaaaaatcaaaaaaccccaaaaatcaaaactagggttttagattaataatcagcaaattagagaaacaaaaaaacaaaacctcaaatattcatcagctattgctttctgaagagcgtcattaaaacccattacatgtgagaaatcaatgtacatcattgttgattcaccacctcgaatcgcttcaatctctgcttcgtaatacaactccggcttgttcgcatctaatcgaaaactgaaaccaaattgaaaccgaaactgattagagccaaaattgaaagaaattgggggaaacaaaaagcccaaaaacgcaaaccttttcaggaattcgaggaagacattctcgacttgaatcgcttgttcatccattacaaatccaccaaaagcttccatttttcaaattctacctcactcgaaattttcctcttcactaccaaaaactgtttgcgacaaaaaccctaaaatcgtttgaacggaaaacaaaacctttctccactatgggcaaagaaatggcgagcttgttgtggcgggagttttaggtggggtcctctaacattttcccgctaaaaagtatagcgatacgtgaattgggcctaaactttgggcttatatattgggcttataatttggacctttaaaatggaccttttcaaatatatatttgatcaagacaaccatgcttattctaaactctaaagataatcgattctggttattaagaaaatcgatagaacaaaaaaaagaaaacgaaccttcacgaatgttttgctattttttcttcattagaaatacaacttgataagatcatttgaatgttctgtttactaattatgaacaagtaaaacttaaaagatttgttgttatactatctctatcttatacttctctatttatagattaacataacaaattgccataacaattctcttgcctatataattctgagctctattcatcttttcacaacaaaccaagtttcaacaatcaatcataaaaatgagaactaaatatttttctttgctagtgtttattattgtcttggcttctaatgaagttatagccaagaaacactcttcaacacctaaattaagaagaagtgattttccaaaagattttatttttggagctgcaacgtcagcttaccaagtcgaaggagctgctcatgaagatggtagaggtccaagtatttgggatacattctctgaaaaatatccggagaagataaaagatggtaccaatggatctattgcaagtgattcttaccatctttacaaggaagatgtgggtttactacatcaaattggtttcggtgcctatagattctctatctcgtggtcgaggatcttgccacgtgggaatctaaaaggaggtatcaaccaagctggtattgactattacaacaacttgatcaatgagcttttgtctaaaggaattaagccattcgccaccatttttcattgggacacaccgcaaagccttgaagatgcttacggaggattctttggcgcggagattgtgaatgacttccgcgattatgcggatatttgcttcaagaattttggagatcgagtgaagcattggatgacattgaacgaaccattaacagttgtgcaacaaggatatgttgctggtgtaatggctcctggaaggtgttcaaaattcacaaaccctaattgcaccgcgggaaatggagctaccgagccttatattgttggtcacaacctcattcttgctcatggagaagcagtcaaagtatatagagaaaaatataaggcatctcaaaaaggtcaagttggtatcgctttgaacgcgggttggaacttgccttataccgaatcagctgaagatagattagctgcggcacgagccatggccttcacattcgactatttcatggagccgcttgtaaccggtaaatatccggttgacatggtcaacaacgtaaaagacggtcgcttacctacatttactgcaaaacaatctaagatgttgaaaggatcatatgatttcattggcatcaattattactcatcttcttacgctaaggatgttccttgctcaagcgaaaacgttacattattctctgatccttgtgctagcgtcacaggtgaaagagaaggagtgcctatcggtccaaaggcagcatcagattggcttttgatatatccaaaaggaattcgtgatctccttctctatgcaaaatacaagttcaaggatcctgtcatgtatataacagagaatggtagagatgaagctagtaccggtaaaatcgaccttaaagatagtgagaggatcgattactacgctcaacatttgaagatggttcaagacgctatatcaattggagccaatgttaaaggattctttgcgtggtctttgctagataattttgaatgggcaacgggctactcagtccgatttggactagtttacgtggatttcaacgatggacgtaagagatatccaaagaaatcggcaaaatggttcagaaagttattgagcgaaaagaaaaggaattgatgaaacatgcatcattacattatattaaccaactaggttaatatatgcacgatgtgtagtttgtttgagtaacaatttatcgttctgttataaatattgtttggttatcaaacttgaatactaaaatagtgattcaaatgtaaaaattttgtggacactatattaaatgaaacatttccaatatttcaagtttcagtattctagaattgataaattaattgtactttaagaatcaaatatttaaacaaatagttgatgaaataacactctatattgaatattatattaaaataattaaaattattagttttttttgagatattaaaatcatgaatgcaaaatataaaagttatattatttattatttttgatttcataaaatgagtatgtattcttttagagataaaagaaaaaaagaaaaaaattggcaagttcgatgcaaaaccccttaaatatggggaatcctaaatatggaaaacacaatagtaattttatagtattatccaagtagcagttgttcggaggctatctacatgtctcagccactcgtattattctccaatctataaaaattcaaattttcaatctccctttcttaagattaaaagtggcaaagttgagattttgatcgtcttcttcctctggaaatttcaatcgaaactatatcttcagagatgcagaatctgtgaaattgtagaaacgaatttcacatttttttttgaagaaatgacgacgcagatatttcagttgccgttaaagtactgtgcttcgagtttttcttccaccggccaacggaattacggtgcttcttcttcgccgtctccgattgtaatttgtaagagtaatggaatttccgatggtctttgggtgaagcggaggaagaacaatcggagatttggtagtttaatagttaagcaggagaaaggagacgtgacggagattcgagttccggttccgttaactttggagcaacaagagaaggagaaacaaaatcgagatgatgaagaagatgaaatcgatgaaggagatgtagatcctgaagatctcaaatacgtcaatgaaatcaaacgggttcgtgattcctttggctgagtgaaattgtagatagttgaatcagattgtactgaagtattttgtgtgtgtttaggtaattgagcttcttaggaggaatagagatatgatcttcagtgaggtaagctacattttcatggttctgtgttggtttttagtattggttttgattaagcccgagctttgtgtgtgtttgcatattataggttaagttgactattatgattgaggatccaagggaactggaaagaaggaggcttcttggaatagaagatgcagatactccaagcagagatgatttggctgaagccttggaacaggtgatatatattattatcttgagtctgccattaccttaatagtaaacttaagtgtgttgtgtgactggtacatgagccatatagacatcagttttctgctgagggtgaaaatgaactcatatatggctcaaggagggtctacagaatgctgttgtaaatcagttggttactgttgagtaagagtgttgtacagcttattacagtctttacatggaaacactgctcaaccaaccttttgttgagttgctttcatacttagatctgtcacatatctggtttcaagtaacattgtgatggctagtctaatatataagctaagtatgcaaaactgttccaaggcgtaactgtgcttgtgatagaaatctcacttgacaacaccaagttgagcagtttgctctttgtagcgacatggggttattaagtggcattagtatgaagatccttaaaaatgaattgattgctttacacaggtaaatgatgggaaaatccctaaagatcgtgcaactcttcggatgctgcatgaggaaatgatccgttggccaaatttagaggtacctcttctttgtacctcacaattgttttttgttgcctattggtgggactgataggaagaaactgccttaggcaatataaatctataatgacatctctccttaggcaatttaaatccataatccgtaatggttcctattgatgctagaaactataatggaagagatctcttttcttttgtgtaactctggtgacggctatatacatttagttagttagctaagcagaactctgttttaaagccctatcttaacaccttatcttatttatcttataaggttgaggtttcaaagaagcaacgaggaaagtcaatgtacgctaaatccacagacactggaatagatccaaaagaagcagccaagagactcaacgtcgaatgggattcagctgctgcaattgaagaagtcgatgtcgatgatgaacaaggagtagtaaccaaagtcgcggtttgttcccatatcactctcaaacactttcacagctttgacctggaaatcgttattctttcacaacattttaagcgttccgtatttgactttttgaaatctgattgatatttctcctgccttttgttcttaatccgtttgcagggctatggagcgttgtacttcgtctcagctttaccagttatcattggtatctctgttgtattaattttgttttacaattccctacagtagagtcaaatccatttagttgttatacacaccaccaccaatgacccatcattgatgttttgtaacttaagaacatgaaatgagtttttcaattatttaatcatcttcttccttatacaacggcttgtggtctgcacaaattccaggtaaagtactccaaaaccttcggtaatattaaaataaatgtggttcgtgcgagcatatctatcatgatcagatcctgtctcaatcttgggcatagtctcatgtcaacgatgttaaatattttaaagcttatattatttgtttatgtttatagtaataaagtcaataacctttggctgagactaatacgcaggaaacgaaaaaaaagctggacgtgcatatcatgactcagtgtagctaccttaagccaccaaacgtgcggtccatgcttactctctgtggctctgtataagtattcatcttctctttagcactaagacttagccatttgtcaatttctcttcttacagatcgagatttcaggtcggaaaataaaatggtggctgcagtacttatgccaactattagtttcagagacgaaagtgctcgcgaggattggcaagttctaagcagaaacgattcaaagaagaagattctagtcaagcaaacgagtatgatgcaatccgagagagagatatcgatggatccgaaatcaatcaggtcgttgtctatgtcgggttcgttgagaaggaacgatagcttcgatatggttcgtttaccggcaatgtcacctcctagagacttagattcgcctatgcctcttcctttgcagccagtgcagactactggttctcctaaacaacgttcaggtctcatgcgggcgctcagaaacagggaacaagacagcctcccaaactctcctaaacaacgttcaggtctcatgcgggcgttcagaaacaaggaccaagacagccttccaaactcaaccactggttctcctaaacaacgttcaggtctcatgcgggccctcagaaacaaggaacaagacagcctcccaaactcaaccactggttctccaaaacaacgttcaggtctcatgcgggccctcagaaacaaggaacaagactcgtcttcggcgtcgtacaagagaagcaaatcttgtgggtctactagcaagacactctctcataagagcagcggaatcagaaactctttcttcattaaaaccgattcgaacaagagcatcagcaataatagtacattagaagacagattcaaatgcaacgctctgtgtttattcctccccggtttcagtaaaggaaaaccgatcagatcatcacagaaagacgattcttcttccttcacccgaaccaccacgatgacgagatcatcatcctctaccattaccgtttcaagaacagtctccgtcagagaatccaccaccactaccacagtgatctccgctcgagcttcaatggagaaattcgattgcggctcatatacttcggaatcctgcggagaggaaggaggaaatcacttctttgacttaccgtccgagctaatcaaaagtggttcaggtgataacgaccatgacgaaccggtttcagcggctttcgtgttcgacaaggaacctgttgagaaagagatcaaaggtgttttaaaggtttctggttcgaaaaacagaaaagcaatggagtctccttcactgcgtcaggttcgattctccacatcatcgccggtttcatacccgacgtctccggcgatctctccacggttattagaagccaccaagaattttaatgctttcttggaagctcaagccgtttaaatgatggactcttaactacaatataaaatataagctgtaatataccaaagtcttgctaaatatttttctttgggaaattaatatcgtttttcacctccgagaaaactaacatttttactccatattgttgatatacttttcaataatggatgtggtacacttttctagtttgatttagttctcgattggtttaagtaaagtttctttgtaatttgtaaaagtaaacgttaaagacaaataaattttcttttaccatttgcgctttaaactaaacgcaaatgcaaagtattctagatcttagccaggaccggacttataaagatcagtttcaaactaagttcaaatctcattaggtttgggtcttgctagttgctaggaatctggccatcctacaaagacacatgtttggccatcctagtttggtcctaccttgcaacggtgtatctatgtgcaatggtttttaaattggtcccaaatttagaactctaaactagagatgcacgatttatataggagtacaagagagtcaaagataataagtacatattaatacaaatctttcaagaaatatattttgccttaattatattaatacaagaaatagattttgtctattaactttttctttccaatttatagaaaactcgttgaaatagcttggttgctttctttagtggacgacgaataacaatttaatagaaccaaaattaaactagtggtttaaatggaaactgtagatttgcagagaatatcacagctgcaaagatcatgtagtttcgactagttctattaaatgttgtctccgacaaaattgataagcatattaaatgatttaagtccgtccattacaacaatcattatgggcaaaattcaatcaccttacaaaattactaaatttgtgagtcgatcgatattaatgtaagggaagtaatggtagggttcgtgaatgtgctagaaattgtttttacgtaccttgtttgcattagaattaaatgctgaaccgtcggtgtacattccctatttatcaatctcttgtttctatttttatttttatcattaactttgagattaatttcataatttgttaaatgattagatgaataagtgttgtcggtattaggagatttgttgattgggaataatgtgtatgattgttgagcatttggcaccaatgaggactttccagcgtttgcgacaattaacaaccacgaaacttggaaggacacttttttctggggtctacactaacacttgtgaattttataaaaacaaattaaaaacaaaataacctttctcttttagtaatagttataagaaaattttgtaaacaaaacaagatactttactagagtttagctaaattgtaaactggaaaataaaatttgttaatgataatttatggaacaactattagcaaatgaaagcaaaaaaaaaatttatttgcagagctaatttgttaaatggaaagataaatttagagctaatttggtaaatgtaaatacaaatttattaaagataatttatgaaatactacttttagtaaatgataaaaaaatcttaaaataatatggaagtgaaatctatccgctattttattaacgttgcaattttgcaaaaatagagttttatacagaaatgggttatgtgtttacatgtttgataaaagaaaaaagtattttttttaaagtagttgtgtttactaaattttttaaaatgaaatactaaacgattttcacaatttccatatgaaacaaatatgatcattgtgcattgcaaatattcgagtatttactatttagtgactcaattatgagaaagaaaatgtggaaacttttaattaacacgacaaagatccatggaagaccacaacaactttcactaatttatataaagcacttttccataaataacggaaaaaattataaagcccataaaaaagatgcttatataccaagaatctgagctgtatgatgatctctatgtacgaacccattttataatacaataaaagaatatactaaacaaaaaaccatgaaaattgttacattcgcctaaataatactctaaaagatttacgttacaacgcataatgatgataacatgtctttaaccattcttctcctgccttcattgtctcgtcctaagcaagcgatctccaatcgtcctaatctcaaacgtcttcaccgcgagaccaatatcacgcattgtggtatcaagcacgtaaggattgttctcatgaacgatacgggtaccgttataaagatgacgacaaggctcacgacgctgcgagattgaaccatggtagtgaaaatagcgtattttcccttccgctctgtgatacgtcttcccttgtagatgctgagacatgtgaacccctgtcgcaaatacgttccgcggttgaaccgcatacttcctatcccgtcgtggtactttcttcacatctctatacgccaatttctcaaatccccatttcctgaaaaacaacacacaatcacatatcaatcatccaagaacaaagatccacctaaatagtaaacatcacagttaaaaaaccctacaggcctacatagtcgcatttagaatgtaaacacatacatacccatcaatgtctagctaattctgaactatatctggtaactttggaacctaaaatctagaaactttgaaacaagtaacctcaggacctaaagacacaatcctagagacactgattcaaatttacattgacaattacacaaacccatcaacatcaaatccaacccaatctcgaattggtttacataaaaatagaaatctaaaaaagctagaatctttgaaaacaactctcacccacatggaccaagcactgaaacacactaatgacaaaagtgtacaaaaaaaaaagctctttttacatgtaaatgaatcagattctaaatgcttaaaccaaatctatgattaatcaaataaaaacccaaactttgaaatttacctgtaagtcctcgccggaccatcaccgtcgtaacaaagctgactactcataggcatctgttcaatagtaaactgagaatattcctccaaagataccatcaccgacgaaatcgaactcttcgccggaacataaataaactcatcaacatcgaagaaaaacatccacttcgccatgaatctatacctatgcaaacaatcattcaccaccatgaattgattatgataataaccatcaaatctctcttgttctctaatatcatgaacagtaactctcccaagctctatccatggctttaaaacctcaaacacttcctctgtaatccctccggcgtcatgtagaacaaaatgagatctttcaccgaagaaccttacatggtaagcgatccattctctgattctctgtggtgataagttgccgtagagagaagatccacaatagagataatcgtacttctctcgccggcggagattggattcgtagagagcaaaatcgacggtgtttggagtttcggtgagtaccggaattgaatcggtgatgttccggtctgtatctccggtggttgcgtggaggagaagagtacctccggtgtttttagggtttatcacggtgtttgacggaaaagtacagtttacgacgacggttgtgtaaactctaccgtaaccccaatcggttaagattttggtaccgtcggttaaaatccggttatcggattggtttagtggaatccattcgcaacggtaagtgggatgagagtaaacgtgaagtggtttagatgataaaccgataacggcgaatgtgttaacgccgcctctgtaagcgttcattaacacgaagttataagctgcccagccgtaaccagtaaacgtccgtttaataacgccgttatttaacaccttctcttcagttaacggctgtttcgtaacgccgttatccaacaccggcttctcagttaacttgacagcgttatctaagactggcttttcgacgacggtggtgaagttgacggaggtggagtttacggcgatgcgtgagatgcagaaacggagttcggaagcggagatggagaaagaagaaggtagaaaagggaggagagtagctaaagtgcagagaacgagtaacgccattagagctagcttaagctcggcggagaagttccataagaaacagatgaggaggtttttgtctttagtgttttggtctctctctttagccatcttttgagttcttcttcactgattgaagaagacgaatcgaagaatcgtatgaactatgaagcagagggaaagtgaagcgacagagggaagagagagagaagaaaaaatttggagaatttaacagtaatgaagattgaagagtctcattttataatttttaattttatgaatacgtaaattaaaaaacacttttttgtgtttactagtataatcataaaaaattaggtaaatatgtagttgtgttgtaatatcataaaattaaaaataaattgcacagtttgttcaaattttccttcaaatattatatacattttacatattattaattagtaatatatttttgtaacaaaaattattcatgtgaatttattgttcagaaatgaaaattataaatagagactctttgttgctgttagaattctccatttatatatatatgccattattagaaactaatttattttattcatttttcttgtcatttttcgattaatattgaa

SEQ ID NO: 832 - DNA, 81729 bp, Arabidopsis thaliana
aagcttcaaagataattctattgaagaaactatatttaatttgttcgaagaaaactatacatgtgctaaacagcatgttatgtatttataaagagaataaaagtaatttattaagcagccaaaatgagttggattgagagagaataaaaaggttttagctttttttataactaattttgtcgtcttttcttttatgttacgctatttacaaaatcggtcctctaacttctccaatttcaactaacagccttataatttagtcatcgaacttttatgcaatttagtaagaatttaatttataactcactggtttttctcgtgtaacattgaatcatgtttttttgttgttgttgcagattactgttttaaagtcacgagaaaaaatacacagaaaatagtgaattttaataatataataactagagaaaaagaaaagagtctgacgattagaagacttttaaaacgactcatgcttttttgtttcctttaccgacgcatgggatttcgctctctgccaaaatattataacacgtcatcacctactaacatgtgtacgacacgtgtcagctttgtgacctgccatgtaaatttatcattctctttcaacgatgctttctatttttttacttttagcttagaagcatagcaaacggtcgaaaaaagcaggctactgttttcagaatctagaagactcatcattatcctttacgtataaaataaataaaatttagatgaacatttatttactttcgtcccgtcattttttattttttttacagatccggtagaaaagttattaactatttcaatctcaaactagaatacttgttgggcttgtattttgtaaaacttttggtttaggcttgtaattatgtttcatttgagcttgttttaacaactaaaaaagatagtcacttaataaaccggtattattatcatatgaatatttgtcaaaatcgcttactttagttatggtcacgaacaagattagcttccgaaacatcttacaatttgtttgtttttcacttaaattttaaggtgtttagatataaacatatgataaattatctaattttttttatatcttcaagttacgaccattttcattttttgtaataacttatgaataacataacaattttggagaaaaaaaaaactaaattaaatcatttaaggacaaattagggaggaagactatgcataagtttagtggagcatattaagggtgtgattggaaagacctcttagcgcaaaagtaagagagagtaaaagattatttttctgagctttcaccaataaaaaaaaaaaagaggagaaaacaaatattcatctactttacaccaaaattaagaaaaagtagagtaaatctttccactaaaaatactagagtaaaattgtttacgcccaaatacactttttctttcctctacttttttcattctatttactctattcccccactaaaaatcctaagtgttttgatgattttggtgtcattttcgagagagtagaaaagaaaaattcttatcgaattgacaactataaagagactcacttaagccaggtttacaagcattttatttctcttcaaggtgaagacgatgttgtggaagtgttggaaactatgatgcaatggctttgaatgatactcttaaggcccaatactcatataagttaggccctaatgatgagataagtattataattcattttttcttactaaggtctaactgatgtaaataatgggccttaagatccttgccagttgccacctttggagtttcgattattcgacaaccaactaaaaaatagacagcacatgcaatccataaccaaatcattttttctattttatctaccagattgtttcgaaaagcgtaaaatgtggtttaaaaatgtgtccgatataccctccgtaatcggattagatctccaatgattaatgttgattttaacttaactttatggatatataaatgatgaaatacgtaattatgtgtcatgatcattatcccccatgacttgagtgtttttctttaaaagaatgccatcatgcaatttgcatatatttcattcaagacgatctttattagggttcaaatggacatatcgaacaatgcatgatccaaatccgatgcgaatgagatcgatcggttttatttctagcgcaaaaataccatcggaaagctttaatatgaaaactaagaattgcatcattttgtaactaacaaacaaagcttcttaatttacatgaatttcttccaactcaaaagctaaattttttttgttatcaactaaaaaaaaagaacataaaaaaaagttccattgattatctaccacatgacattgcttcccaactttagcacatgctctgtgggatctctcttctttacattattccccatatcccacaaactatttaacctcaaaaacacattaaacaaaaataaataaacacacacacatatattaaatttaaagcagaatcacaaacacagacacaaaaagcttttgtacaaatatcaatacctaaagttaggacctcaaacctaaatatcacatggtagatatagtactacaatgttgacaaaaagaaaagctatagtactaaaataataacacaaaatattatttatttacatataaattaaagccaatgtgactacaacaacaattacaacatgatccttttgcctataaagccgccatggccgtacactcgagatgcctcggacatgtgatcaagtggtcgttggttaaaccggcggcttgcattaacgaatgtataaccgtcggaccaacgaatctaaacccacgacgaaccatgtctttgcttatagtctccgatttcgatgtcttaaccggtatcttttggcatgatgtgtattttgtggtgaccggtttgtgtttcataaacccccaaatgtatttgttgaatgaccccaaatctcttttcacctgtaaaacaaatctcagataattttactttcaacaattataagataaagttgacactataagtatatgtaaattgtgtgataacaaaactaaaatataccttgagaatttgtttagcgttgtcaacaactgcaaggacttggctaaggttaatgccatagtcgttgactattgattgtatcttcttctcgttgaagtctgcgaccaactctgcttcgaaaccagagaaagcctctctgtgaaaccaaaggttactgattataagaccaaaatgttttaccaatacagtaaaaattttggggggatcttgaaatttcttacctaaaagtgtttcttctctttaaaaccgaagtccaatctgatccgacctgagctccggttaacaccagaagctcaaatagtagactgaaaaaagatttgaacattactcataattagtttcaattcttataaaaattggttttatttatcaagaaatgaaaattttatttacttgtcatcatgaactggaactccccattctttgtcatggtaagcgacatatattggatctgtggaaacaagttaaggttttggacccagttaactaaagttgacttgtaagagaaggaaatttggttttcttgcttgacaagtaacttttacagacctgaacttgtagtgatgaaactgcatctcttcttcttctcatgctcaacatttaagttcttttcattcgattttacggatttgattctaccgtaatgagaaattttcttctttctctcttcttgtttcattgcaacctcttctcttctggcagctgctatacttccaggctgcttttgaacaatcaccataggcataacctctttgtagccaccatcactgttctctggtgatatcactggtttcgattttgtagagctagacctaagaagttccttgcaagaaccggccggttttcttaaggattttgtgttgggagacaaaggaggagagattagagaaattggtcttggtgagggtatctttgatgcaattggattcaaaggcttaggaggcgatttttttagtgagttacgtcggtctaatgtcggaacttggttcgacttcggttgaagaaccggacggccgttgatctgagaaatgttttcttgggtcagattttttaattttgaggaacacatttttttttttctgtctagctttgtgttcttgaaggatgatgataaatgagatgaaacaaagttgagatctctcaaagggtttttatatgtgggaaaagaggatgatgtattgtggggtagtaattggtgctagtgggcaacttatatttattacatgcacactaattaaggtttttgatacaagagtcttggattgtgtttaatgaagttttataggttttaattagggtttttaattaattaaggtttggagtgacagggaagttggtttctttaagaacatggtggggtgagatatgtaatgcaattccagaatagcctatggcttagggaagtgctatcttgggtcaccattgtaggacaaggacaccacattcttttctttttttaaatacctttttccatagcatttcgtatctaaccgcttgatattatcttatctttacagaagaatttgagatatattgctacaattgtttttgatgatctgaaaattttggacctaggtctatacatttttgagaatcaggatcagcttttaaataactaaatgggtgtcgactcgtgtattttgtttaggtgcatacgttttcggcttacatggattcaaccgttagcccaataccatgtagataaaagacattaccttaattttcttaattccgttgtatgaaacagttttgaaagactttccttaattttcaaatagttcttcaacctttctaagcaatttacctaaacaagttataatttggtattttaggaatttttgtcgtcttcttcttagtttttttttggtctttatcaagaacttatggtttatgctaaatacacatcttaagctatgaaataatggatattggcattagcaatttgtcagctaggagaagaagagtccttctctcacttttgccattactattaatattgcaagtgctgagttattttaattttgagagagacctttcatttaagatccagcttgccaatttgcttcacaatcaaatctttttatttatatttatatttattacaccaaacaatattcatcgacaagaaaaatatttgctgcgtgtgattaaatacagtaaattctgccaatccaagagtatttccgttataataaaaatgaaacaagtttgaaaaagaatcacaaattattttttcataaaattatgtagctaagtatctctataattttaaagtatagaccaaatcatccctatgttttcaagtaaaataatcattttattaactaattaaagaaaacactccattcgtttcgaatcaattatcgatttaagtttatgaaaaatgccgatttcgtatttaatgtataatttgatataaatacataatttaacctcgagtttaagttaataaaataatataatatcaaaaataacttttaaaggacacaataaaaattatatatatattaatttatatgaaaataaggatacttttggtgaaacagagagaatgtatcaattaacatttaagaaaaatgttttttttgcgattgtcattaagttacaagaccatatgacaaatacttatctagaataagaaactagtacaataccgaaatgatagtagtacatataaatgagagaaagaaaaagatcaacatacgaatataaatatgaaattggtcccaagattcaagctgtgtaacaatggaccattttccagcttttttttgtggaatctcatcttttagctaagtaaagcttacatttaagcctttatctacatatatggtccttcaaaattatataataattaaaaactttaaggataaacgcgaaacacatattgagaaaaaaaagaaaaacaggatctgattcatacaatttaataaatacactattgtttttttgtcaacaaaacaattataaaattttagagaagtaaaccaaattttcatgcttaaaaatttagagaggtaatattgcaacttccgctaaaatatttaagcaagtagacaaaacactaattatatactcaagcatatatcttccacaaaacttaacactagttaatgtcttaattcgaaatcctcataataattattgggacaaattagcgaaacacatcacatgaataaacaaattaattggttatttaagaaattaagtggtctagaaaaaggtaatcatttaaaagtaagctaaagctttgtaggatgacaaccgaacaaccaaagtctcttcaaacgtcaactctttcttcttcttcttcttcttaatagaccgaaatctcctttaataatcattaatcaaaggatatgaaatatgtttgatgttttataagaagataaaaatattacaaaaaggtagagaaaaaaagaagaaaatgaaaatgatgggatgtgattctttaaatggaatcacgaggaggagacatcccatgtgttgatgaataaaccacataaaataaatttttgtgacttgatttaacatttaacaaaaatattaaacttttcttaaggcttttcattttcttttaaacgagctttaaatagtttattgtttctcttttcctttctgcggccaaacaacttttgttgctcttatacttatatcatggtgttttttccaatatattgataaatgataatgatacttatagacatgtatgtatgattgtacattataacctaaattgtagaaagatgtaaagaggactttcatgtcatgtggctggtctggttttggtttatgaatgagtctataaaccacgttttttttaatgataattctcaattactaagcctatatatttcagtaatactataattaattgttgataatatacatagtgatccgatcccatgaaaactgtaactattatttatttttagcatattacagcttagatctatataaattggtgcgtacatttagttaaccagttaaattaatcatactttatattatgtgatttcatacgttgatagtaccgtttaataattttgacctaagttgccatataagtacacatatatatacacttaaatatagctgttattactaatgagtaatttcccatggactactgataactttattttcggttcactcttaaaatttaaattgttttcaatttgtgtttttttcatatgattatataaaataattatgtatattgtttcatgaatttagatattagtggttatgatatattatatgttagcattatcgatatattgtattccaaatctaaatccgtataatggacagaaaaaaaaaattataggatatattaagtaggacgaaagaaactgttcaaaagatatgtccaaccaatgttgggcaatctaaaaactttgtctttagccaatttatatctgtagtcgttacaaagggtcccttaattatttgaatactatatcattttcatgttttttcctggaacgattttagccaacacattaaatttgattatataaaatcatcaattttaaaaaaaaacatatttacaaattacaatcttattatatatacatgtataattttataacatataaaagaaaaactttttactttagcatatatgatcagagtgtttcaccttgccaaattaaatttctgaaataggtaaagttttttcttgtctttcttgtgccctaagaatcaagaaatgccctcacaacatctacaattggagccatgcagatcggacatttcatattactccattgaagctcatgagcacatttcagacaagtgcacatatgtccacacctgcgaaacaaaactgcaattttatgatctcgtttgcgatttaaccgcaatcgctttctagactttacaagcagacattggtacctgtatagaagcgagtctataggcatctcaaagcaaatagaacaatttctttctagtgaatctgaaagagagtttgagatagttcatagttacaagcacatcatcaatatacgattctacatggttttttttaactgaatcaacaatagtttataatgtttactcaccagaaagtgattcgaattccaaggatttctggaaatcaacacaagattttaccaaactttgtagttcaagaatatctctttgaagctgtttgatttgttgtttgagatcacatatcatctgtgtttcctgtgttaaccataaactgttacttcattaacacgtaaccctattgacctaagaaaaaacatagcaaaacagagacaatctcatagagtaggtattctcatgagccttagggttaaaagaaattggctaaaaccatcacttacagtttctggttcaaggattaacttttttgtttcattttcttctacgttcccttggtacctttctgaacactcaaccaaagtctcctcgttaccttcttcttcttctacaagattgcttcctatttctgacctcttttgcacgcatgagatcatgattttatcaatcttttcccgaaaatcaccttcgaggaagctagaaacggtcctcctacacaagcaatcacgtccttaaaatatcgaaatgttataaagctaatcttaagaaaataagaattgatcagataacataccacttgatcaagttccacatatcgcctttctcggaaatattgttcataacctcgagcacccgttgtttcttgagatcttcccaataacttcttggccgcgagatatcactaatccaatcataatacataatctctctattgcaatcttcattttcttcattttctgtttcattttcatcccaagcatttagaaatattggtgattcaagaattagaaacaatgtttccgctgcttgttgcttctcggcttttgatgtttcttcatcgttttgtgaagatttttcctctttaccactctctctaaatacttgtcttgcagtttcttcatccttttctctatccaaacaaaccactgatgtcacttcttgagggttgcttctatattcctcaatctccatggatttaccttcttctttctttcgcctttcttcgtttctcccttcagtcttcacatcaatgactcttcttgcatcttttccctcgtctttagctttccccatagttcttctcctattagctctctccttagaatcccaaagatacaccttctctacaaaactcgatgagaacttgttcgtttcttctccttccttcacagtaactttcctcaacccttctccttcttctgtagctttccgctcaatttcaggtttctttgaaccgttctcattgcttgcagcatcattaaagacgggtttattggcaatttccggcttatcagccgcggcctgattctcccttgtgttacttttctccattgtttcttgcaaaacactcttcaccctaaaatatactactccagacaaattttttgtttctactgcgctattcaaattgctccgaaatcccttcttagtattagccatatatctattcctgcattttgattcaactgatgaaaatcaatatactttggtttaatactcttctacaagactacaagttcaaaaataactgaagaaaaatatttcctatatcaatagcctgatcatacctagatcctcgtgaaaaccggtttacatctgatttcgaccgatatctttcttgaatcacaatgcacctttccaaacttcggatcataagcatatactaaacaataaggaagtagtcaatttttatgtaacatcatctaaagtgtaatctattaaattacaagttgagggtaaaataaaagtacctgaagacgcccacaaccgcgaggcgagaactttgaaaccgcgtagcgaccaccgagcaattcaagctcattttctcggtcacgcaaaatcatcttacaaacatcttcacttgcttgccgtcctcttatcctaggagtactacaactagccagctcaagaaaacatcttccttctccatcattctcataagaatttgaaacattattcatatctgattgaggaaaccaatctatttcttcaccactgctttcgttgctttttctcgcctcgtcgttgagaaagtcggagagacttgattcagaactcgtcctgctatcgagtagcgattgacttagactcgaacttgactgctgcgaccgagcttcccaaatctgaaccagagaagaagctcccatgctgacaccatttcttgacgaggtctcaggttgaccaggaatataaaatggattggaattggtctctagtggataagaagaaggaatctgcaaagattcccctgtttcaaaaacaggggatcttgaagaacattcaataacctctttacgcttcccatcttcgttacttccagaatcatcgataggcaaaacacgaaagctgttgtaacgatctctgacaaaaactttgagattcttttttttcttgttaccatccctcgaagccattttctaaataaaaaaataaagatcaaaacaaaccctatgctttgtttttaaacttgctttgttttgttacactcaagaataaggaaggagagaaactataatcgcaaacgactacaaaaaaaatgattttgctttctacagacgctcagaacaaaaaaaaaattgagtagaacatgggaaaaaaaaagattataacagagaaattgataaaatcgaataataattgttatgtttttcctgttctttagtcctctgtttctcgaaaaacttttggatattaagataacagaaatttactttctgaaaacttgaaacagaagaacaaaacagaggactatcaaagaggcaagaacagggtaagaagaaatatatctagagaagaagctgagtctttaggacttgctctcactggatatttttatataagaaaataaaactgtgtatacttggtaagatttatgtatttttattgtatttttataatgagattttctatgttaaaatattgtacactatctaaatactaaagactgggtacataattatatgaacgaatagtacttaatctctaaattaagcaatagtagttttttctttgttaatagtctcaagaatcataagaaagcaatacatacttgattacgttatttatcacaaaatgatactacgcaaataatgcatcaatctactcaaccaaaacagagttttcaaaaaaaagatatattccgagtttacttagcttcacgtctcgaaaatcatttatcggtatcagtttgcatctccctgtaactggcagctctattgttgaagacattaagaagatattcactagcttgtcttgaagaaggtctctcttgaggataactttttgtgcactgaagtgctatttcaagaacctgataagctgcttcttcttcgcaaggtaacagcgatttaagctctgaatcaatcagcttctctcttgcttcagaacccggaggtgtatcaagaactgtctctacccatctcaccatatccgtctcttcatcaaacattgcttcggttggcattttaccagtcacaatctccatcaacactatccccatactgtaaacatcgctcttctcagtcgccttcaacgagtacgcatactctgcgaaaaaagaacggtatccaacacgttaggtttaatagtcgaatcgtagttaagaaacccgagaaagacatgtatgtaccgtacctggcgcgatgtagccataagagcctgcaaacatagtgtttgattctgtgttggtgtcataattcccggttaggatcttggcgagtccgaaatctcctaaatgtgcttctatgttggaatcaagaagcacattactagacttaatatcgcgatgaacaatcggaggaacacagtcataatgaagatactccactccttgagccaacccaagtgctattttcaatcttgtttcccaaccaagaacctcctttttcttcgtattctcgttggcatgaagccaatcccaaacgcttccattcgccatatactcgtagatcaacagattcaaaccatctgctttactgctacaataacccattagcttaaccaaatgtctatgtctgattgttccaagtgtcttaacttctctgttaaagctcttgtttgacatcaaatcatctttccaaagaatcttcttcacagctatcgtctcgccgttctttaactccgctttgtaaacttttcctgaccctcctgatccaatcatgaactcttcgttaaggtaatgtgtagcttccattatgtcatcccactttatatctgactttgcacctccattactaaatagaggagcttgtgaagaagaagagttcgatgaaaatgcgctgtttccgcctcgcactttcttgaaaagatcatggttttgcttgaagaagaggatgataacaagtaccatcaaagcaatcgctgctaatgatgaaatcgcagagattataaccactgttttcggactaagacttcgttgattctttgatccagctctgttgcaatgactaagagggcttccacaaagacctgcattgcctacaaacgcatcagcttgccatctagagaactgtttctttaactttccctcaaggttgttgtaagagaggttaagatatcccaagcttttcatgtcaccgatttggccaggaacttctcctacaagctgattgtgagacagatcaagagattcaagcttaggtaacgtcgaaatcgtagacggtatacgtccggtaaagttgttgtagctgagatctaaagcactttgaagatcttgcagctgtccaatctcaacaggaatctctccggttaaagcgtttctcgataaccgaagctcgaaaagcttgctcagtttccctattgtagaaggcagaggacctgaaagctgattctcttcgaggttcaacgcattgagagcttgcaagttaccaatctcttgcgggatcgagccgttgagtgagttaccatcaagaaatagcgtaagaatattggttaagctgaaaatctcagtagggagagacccaacaaacttattagaagaaagctttagctctcccaacaatggaagctttccaagccatgtaggtatcacccctgaaagatagttattgttgagatcaatgtgtgtcagcttcttgcacaaaccgagctccaccggtatgattcctgagagagagtttcttgaaatatccaataaagaaagctcactgatcttcccaaatgtccgagggattcttcctgtgaactgattcttccccagccttaaccgatcaagattcgtagacttacctagctcaagaggtatatctccctcaaatccgttttccgtgacatcaaacgagagatacgagcttgaaccgcacaatggacttatcgaaccattgaacttgttgcttgaaaaattgattcttgtgaggttcttgaggttgataagtgaatccggaagatttccttgaagagaattgttgtagatcataaacagttctaatgccgttaagaacccgaacgaggaaggaattgaacccgagagctggttatccgctaaatcgataaccgtcatttgatgacagttacctaaactggcgggaatgttacctacaagctcgttctctctcaagtgaagacgagtaagatctttcaatcttccaattgaagaaggaatctctccacttaaacgattcccgtaccaatcaatctcctgcagtctcgtgcaattcccaatctcaaccggcatttcacccgaaaaccgattctcatacagatacataatctccaatttaccaagaaatccgatttctttaggtaccttgccttccaagttattgtgatagagagtaaactcttgtagattcgtgaggtttgatattgatgaagataacgtaccctccaagctattgttgttaagataaagattcgtgagttcgacgagctgaaacaacgaatccgggatttgacctgtaagcgtattgttcgacaaatcaagcaattttaatgactgacagttgctgatttccgctggaatttcgccggaaagctgagtttcagacagaaacagttgcttcaagcttgtgttgttagaacatatagtctttggtaacgaaccagagagacgatttttcgctaataccaagaactcaagctgattcattctccagaactcttcgtgtatcactccggtgagattattagaagacaaatcaagtgtttgaagattcgctaattctgttaatctctttggaatcaaaccctgtaactgattaccaatcaaattaaggtattggatactaaccaaatcaccgagttgactcggtatctcaccggagaaactgttatctcccaaattcagcgtctggaggttcttaagtcgattcagctccgccggtaacgaaccgttgagacgattaaacgccgcggcaaacaaagcgaggctggtgcagtttccgatttccgccggaatcggtccttcgagttcgttgtcttgtagtatcaaagtctggagctgaacgagtctaccgaatcgactcggtataagaccggtgagtctacacgaagccaaagcaagcatctggaggttgacgaggttcccaaacgtctccgggattgttccgttgagttcgttgtctccgagttttaacgatttgagattcacaagtgagccgagttgactcggtatatcgccactgagtaggttagagaagagatgcaacgattccaatgaagaggagaggttagagagagtcgttgggatgggaccgacaagacggttcgaagacaaatcgatgtggattaggttgttaaaccggccgatcgaaggagaaattgaaccggttaaacctaaaccggagagatttaaaccgatgatttcacgaccaccgcatgtgacgccggtccagttgcagtaactgggactaccggaattccaatctcggagaacgtcttcttcttttgggtttgtgataaaagagttcttcagttcgagaagagtttgaagatcgtctctttgacccggttgacccgaacccaacccggatgagaaacagaggaaaaacagagcaagaagaacagagttttgctgcattttttttcttcttcttcttcttcaagaaacaagagatctgtgagagtaatagtgaatgaaagaagcttcttcgagttcttgtggtagtgagacgactaatgttggaaacatagagaatttaagacaactgtttggttttggatgaagtaagacgattggttataagaacggtgcatggggactatctctgtatctctgttctgtatacgcgtctaagtatgtgtgtttgggtttgatgtggtaagtaggaggagaagtaaatgcagaggataaagttttgggatcggctataaaggctagaactatatatagagtgtttttttttatatatatatctcttctgttttcggatctttcattgagaaggagagtaatgagaaagagaagaagaaggtcaaagagggtcagagaagagacattggaaaatgcaattgcaagtgtccatttatgttgcggctatgccaatgtgtatttatgttcttttctagtactagtacttaaattgttttggattttagttttgtaaaaaaagtttagattcttcctaataatctctttcgaaccagagacctaaacaaatatttttttaagccgttgctaatgatcgaaatatggattttaaaaccttttttgatgggtcgatatcgcatcggttgatttacttataccaagataatatgcggaactcggaatgggttatatgctactttgcgatattttatgaagcctataggttttcgaaataacaatttatgtattttgtatgttaagtgatcaatttcttaaaatagtttaatgattttttatttcattcaataaaaatttgtgaattttgtgatcttgtagattcgatgaatttgcctccaatccataaattttattggttgaaacttgaaatacagtaaaaatattgtgcagtctttcaatttgtccttttttcaacccttgtctctctatttgtttacagaagttcagtttgatgagagtctaagtcgtgtaagtaatggtaatgagaaaagagatttatgacaatgagataaataagttatatgataatggtttacatatataaattgatatggctttgaccttggccaagcaaagagagtggttgagatgagagacgatgacttggttgaatgacatttctttaatttctgcttttgttgtgaagtgtgttagtttctcattacttaagtcctttcatcaaaaaagagggcagttgtatttctgtttttagatttatagaaaatttcacacacaaatatatgggtggaattaatatgttaaatattacatatatattgttgagtatatatgataagctaaatatttatcatatttgataaactttaaagagggtaaatttcatagcaaattaagcaaggagtctaaattttttagattgacaaaatagtccaacatataaagaatagattttaaaatgttgaaccctaaaatctaaacaaaatgctcttatatttcctcaaatttacatgtaacctatcttttaaatttatattatctttaaaaagaaaattgctcaatcatccctataaataattgctaggtcaaaggcattctctcatccatattttttgtcatcaccccaaactcggcaacatattggttagttctaatttgattctctttgatattttcccgattaataaataaaagattttgtagatgtcatctttgaaacaaaggccgaagtattctagctgctgaagttgaatcacaccgtgttcatacactctatagaaattcaattgactctaccatctatatactaccatgaaagagacaacaatggattacaaatgcttttattttccttttacttaaatgataaatacagaatattttgaattcttgatcatagtttaacagttgatgtaatcatgagcggatctagagttatatttttactggatgcatataatttcttttcgaaatagatcggagacatttaaaagagcttacattattttattttatctgttttgtttataattagacaggacatgtggtacactggtatttatgttcatcttagagctcctcaagatcacgagttcgattttaacttttaagagtagattagactagtttaacttcttcttatctacgatccaaaaactaatgaatccttgttaaagtccaaggcttcttgattaaaaaacaaaatgtcttctttaacaatattttagttatatatacgagtcaattttctagtaagaaatcgtattacccgttagtctaaaatcgattaatttaagtatcaattgatgtgaagatggtgatacgtcgtattcattatggtttatttgtgtgaaatgttaaagtgtacaagtcttatcttatggaaaaacattctccttttgtataaatgtgatgttattcctgaaatatgatcagtctcaatttgcatagttaattaatcgtcttattagcttgtggttgtgcctattaatgaaacccaattgctaacaattcatcttctttcttcttttggctcctactgaccaaacttacccacatataaaactataggtaatcaatctatctcaaagcattgggccctttgactactttcaacgtgtatatctaaatgttctaaaacttatcaatgaagcaaaacgttccacaattttacatatttgaaataaatcggtttttcaaatgaaaatacttaatgtttttttgggatttatactcaaactaagcatcgctaagccaatatatatagactaataatttttaagaaaatgacaaacatatatttactaaaaagttatttctcaaaactaattaacatattttcataatattcttttattcttttattgtagtacattgacagcgttttaaatattagtactgacaacttggagattctttaaaaatctaaagaatttgtttggcaaattagtcatttccggagaatatttttttttctttgactaaaatatatactttatattcaagattttaaccagatatacaaaaagttaggatcaaagacaatcattctagatcaaccacattaagtattacactaagcaatactactttctttctcaaaaagatgtttcagccaaaaaggaaacccgattgctacatacgattggcggcgatcctccattgtcacgctcttggcaataagatgagctccaagattagagcttcttatttcaccacacaatctctggagaatgttctaaatgagataatttttgtggacgttgtgcaaatatcacacatgacaaaaaaaataaaaattggtataatcgtatgaatgatctttcaaactgtcttttattcgaaagatgattgtatatgtggatagatgtcaacacaccaacaaacattttgatcctatctgtatagcgaacaaaatatttgtgagaatattgaaccaagtcttaacaatgggaagattcatatcttagagatcagtgcaaaatttgagggatcaaaagattaacgtcaagtgtgtcatcagacgaactcctacttttatgatacccataatctttcaatctgttccgatttaaaaattttaaatgtaattactgattgtttgtaattgataataaaaaaaaactatttcatattttcaatttctaacattattgtttattgtttgtaattaataaaagaaaaaaacatttaatagtttttcatttttgacattatactttcttcaaatctaaaactaccaacgatgatatttatattttattaatccatttattctttgatattttcaaaaatgtccattaatgttttcattgttactattactaagtaataaataatataaataaacactgacaaactgaagttacagactataaataatttaccatactaaatgtaacatcaaagctttcatagctcagttggttagagcacccgtttagtaagcgggaggtcttgagttcaactctcaatgaaagcatttttctccttcttcttttttattgaacccataccctcgaaagctttttcttttgttattttttgaagtctatttctcttttcactgtctctcgcaatctccgactctctccttcttatttcgtcgccgtcgctactctttctcgtcggtaagttcccctctgtcatttccttcttctccaacatctaatcttattgtcgattgtgtaaattgctatgttttccagttatttactcgggcacgaaacatgttcgatgaaatgtctcaaagagtatttttttagactcataacgaaactgcttatctctttgcttttgttcgtgattttgtattgcggttctaacgttaatatgaactgggttagctttcaaattgtaaaaaaagtttaccagattcgtctggatctaatgctcatgttttagttttggaataaaaaatgtccagtctttagaaactattgttaaggaaacggaacctagttttggagaatcgttagttagagttgatcgcattgacatagcaaccttaattttatggtctcatagtttgcagattctcgtatttcagaagctactgtatttcaacatcaaagtttgtacctttctatgatgcatttaccattttggctttgaagaagatatatctgaattttgattgaaatgtttacgtttttttgttaaatctatcagactataatgagtgattttgtttcattgtgttgcttacgttaaggtggtatagtgtcaactttcaaggaagatggctagtggtagcctgaagagccttatatcttcagcagtgggtcgaggtgtgaccgaagcaagagcaaggattttcggacatatgcttaacccaacgggacagagatctcctcataagatattaaggaagaagcttattggtgataaggttgcagaatggtatccatacgacatcaagaatgaggatcccaatgtcttggctagagaagaaaaagagtactttcctaaacctctcttttcttgtttactttccaattgattgctttgtttatcatagaaaactctttgagtgggattgagctggaacatgtttccacaagctttttagttcaattgctatttgggggttagtatccaaaatcctagacatgagaaagaaactagatgtagattgtatgagccttcttgtgatttgtggagcttacgcagagtcatgttctttggtttctggtgtaaaatgcaacatagtcacgaactaatcttatttggcaaggatagtactgtctttgaaattcacttacacttggttttatattcactgcttatgttatcattgttttctctctgttgagaggcattttaacttaagtttgggtgttgttgttgtaggcggatatcgaagcttgagatgttgaaacgtcgtgacaaaggaccaccaaagaagggtcatggaaaacgtgctgcgaagcgtaacaagtagaagtaataaccatagctacaaaaaattctctgcactcttagagtcaaactcttctggttgaatcagatagaacttataagtgaaaatttctcctacttaaaactgaattggtttccaatgatgttactatgttgagacatagttgaaagctatttgcttcccttttgactaaaaatgtcaatggcttttgtttctcttctcttactcttttagtctttagagttttttgagattaatattggtgagatgtttgtacttttttgatctagtttttcttatctcgtgatagatttcaaatcctctttgtcagtctttgatgttggattgaaagtgaatttatagatttttaccttttcgaatttaaatattaaggtgactaaatactgaagtggtaggtcggccattctaattctgagtactagttcaactattctgaggtggtaggtcgaccattctaatactgaaatggaacgtgtcacttgttacttgttcttattgagaattgattttttacagggatcctaattaccacggatttacttgaatgagtttagtccatcaaaaagttgaaaaagaaccaaatattaaaagatggttggtgtaacctgtctgcttatataatccacgtgtgaaaaatgcataaaactcaaacgacaacattttgaaaacgatggcaaattcttgaatgattcttctttttatgttccctttttactaaagctaaaaggattcattagcaagtgtttgtgaaagggagagagaaatggaggaaggtctaaagattcaatctttggtcatttatccgatcaaatcttgccgtggaatctctgttcctcaggctaccgttactcatactggtaaaaactaagaacaatcttcttcttcttcttctactcctcttagtttgacttctgagaattgaaaaaaggtccttttaaaaaaattggtatgagaaagattcccttttgatcattcttgattttctgagattttgattataagatatgggttttgtttgatttagggaaagtcaacaaattttccgagaaagtgaacaaattgtctcagaaattgctattaatagggtaaaatgagagtgaacacttaaagtctccacttttatgttggcatgaacatttagatttttcactctcattgttacgggatcgatgatactagaaagggtcttgctttattagtttattggttggaaaatgaacaaattatctggaaattgttcttgtttgattggatggaaagtgaacaatttctgggaagatgatattatttgggtataatgagagtgaccactaaagtttttctctttttttttttgttggcatgaagactacagtttcactctcatttctgtttctttatatgttaagggttcgaagatagcagaaaagggtcttgtttgattgatagaattgtgaacaaagtttccgagaaagtgaacacaatgctaatatatagggctaaattttgataagaaacgggagagtttcatgtgtgttaaaattaagatggtggaatgtttgactatgaagttgtcttggtgtttgatctaatggataattccatgggtttaatctatggaaactgatgtaggttttcagtgggaccggtattggttagttgttaactataaaggaagagcatacactcaaagagttgagccaacccttgctcttgttgaatcggagttgcctaaggaagccttcttggaagattgggagccaacaaatgactcattgttgggtaaatttctggcttaactacgagaattgtctctgaatcgagacttcaatttacgttcttgattattcattttgcagtgataagagctcctggtatgagtccgttaaagataccgttgactaggccaagctcggtagcagaaggtgtgtcgatgtgggaatggtctggctctgcttttgatgaaggagaagaagctgcgaaatggttttcagattatcttggaaaacaaagccgtttggttcggtttaataaaggtttcagtttactttcttttgaatcttttgatttgcaacaaatcttaatgcaccgagttgatcaagttatttgtctacagatactgaaactagaccttcacctcctgagtttgcagcgggttactctacaacattcatggatatgtttccgtttttggttgcatctcaggtgagccaatatctatatttccgatatcggttaatgtgaataggcatttccgcatttgatcttctttttgtttttggttgttagggttctttagaccatttgaatacccttctgccagaaccggtgcctataaaccgttttagacccaagtaagcgatatcaatcatctcgaggtcttattattaccttcaatgatggttgttttgttcataatctgtggtttgttgtttctctctagcattcttgttgataattgtgatcctttcggtgaagatctttgggatgaaatcaaaataaacgatttagtcttccaaggagttaggctatgtagccgctgcaaggtgatgattatctgaatatgacgtgaaagtaatgtaacactcagattctcaagtcgagcttttaaccattttgttctttcaggtaccaactgtgaatcaagaaaccggggttatgggtaaagcagaaccaactgaaactctgatgaaattcagatcagacaatgtcttaatgcctgacaagaaaccgcgtggaaaggttagctatataagctctagtctggttttcagaagagacttgttggattgattatgatgctaaacctattcaatatattgatttcggtttatgacaggttttctttggcaaggagatggtttggaattggaacttaaccaacactgaaggcgaaggaaagaaaacaatcaaagttggtgataccatctcagtcataaggaagatcccttccagagctgaagcagctgtttaagtcaatacataaacatgttgcttcttcttcttctgttgtgttgtgttgtgttgttatctctaactaaagtaaagagaactactttcttgttcatgttaattccaaacttgttgaaagtatgattttgtttggttttgattgatcttaagccttgaaaacatgaggatttcgtcgaaacttcttgtaagttttgattgatcttaagcctgcaccttactgtgatagtaaccaaagaagccgttgaaacttattttactcaaatgtgcaatactacaatacattagatttcatacttaaagagaggtctgcattttaacatttcaacttatcagactccaaaagttgttgaacagcaaccaaatctggaagcacaatggctccagcttctatccagtctttagcagcttccgtcttaaacctatcaaccaacaaagcatgcatcccaatactctttgctggaacataatctttgcgcatgctgtctccaatatgcaaaacctcttcaggcgcaatattattcccggctctctctagcgcgagcgtaaaaatcctcggatctggtttctctatcccttcaattccagagaatacaccaaaatcccactctgcctgaaaagagtcaaatggcaaattgagtaaagtttaaagaacctaagaaccacacacagtcacaatgagtcactcttcactaccttgctcaaaccgaaggaaggtaaaataacttcttgatatcggtattccgcattgctaacaagtccgactataagacctttcctgcgtgcccatcttaaaaacggttgagaatcttgaaacacagagtaaggtgcagcagaaccaaacgtcgaatagattctcctaaatatcttctcaaatgtctcctcatcatactcatatcctgcctaatcaatgacccaccataacatcaaagtaagtaacacacatacacctaatatcgaagaagataaaataaaaccaaataccttgacaaatgaatctctcacacaagttttccaccaaacaatgtttggcattttggcatggaaaccgaaacaaggatacttttgtgccatatctgtataagctagtttaaaaccttcatgaactcgtttataatcaggacaaggcaaaccaatggctttagcagccatacaatagtaatcaccaagctctcctttgtaagctataagtgtaccagtaacatctactgttatacaccgtagtttcgataaaagcgacaccgccatttcaaatcctttcaccaaaatctgcacaaatacacgaaactgagctcaaataggctaatttctgcagaaaagaaatgaaatttacagagaaaaaactgattcgatttcagggtttttgctaaaaagtggtgattgattaacccaagaaacaataaatgatggaatctaggcaaagtatcaatttttcagcagttgagtcatatatcaatgtagggtcacaaataaaaaaaagatagctttttttcgcaggaaacaaggtaaaaagtatggaaatttggaagaacccgtgaaggagagagagagatttgaagtacccagaagctaagaatcgaggaaaatatctaaatgaaagaaatcgccattgtttgtttcttcttatcttgtgtttgctttaagacaacagtaaaatgagagatcacgaagaagactgtctttgtgtttttatatatagagacgaaatcgaatacagtagatgcgtgtgtacgtgtggattattgcgcacacagacaaattttaggcagctaatagaaattataatcttggtgttagatagatttcttgagaaatcggacactcttaattaagcttttaaaggtaaattaattgcaattttggagagcaagttcgagggtatttagggtattttacacacaggaggaacaataataaaaagtaaacccattggatggcatgacagtggcctgcagtattgtcctaaccccaaaaacggtttcaggttttcgaattttgtgttttcttttttaccgtttttacgctcaaaatgaagtaaaaatgttttgatagcaaacaaacttatggtagttcaaccttaccaaaaaaaaaaatcctccttaccaaaaaaaaaacttatgttaggtcaattaatattagagaattctattctagaaagtaggatgaaaaataagttagttaagaaaaaagtcatatttaggcgaagttgtaattaacatttcgattgatttgacttttgaaaataaaatgtaatcgtttgatatagaattgatccaaaaagaactcatactagagaaactagagcaattaggtaggatgtttgaatatttcatgagattccgtggttgagcaaagatatacaaacttctgataaaccttctatcacttcttcacatgtttaccaaaaaaaaaaaaaaacccttctatcactgtgcataccataaaaaacaagaggtctcgatggattttaaagacgatatatatatatttagtttttctattgctcaaaaatgacatttttaataggatttaagcataatatatctgtagtactcaagatacaagaccaaatctaaggtagacaaggactacactatatacagtcaacaacagagacaaaggagcttagatctatctattcaatggtggaaaataatgagcaatgcttgaagtagaaccatcacctttgcttttaccggtgttaaactgcttattggtgcgtaggaaactcctgagttctcgttgaatctcaaccggtaattcatcgaaaactgactgatcgatttcatcagtcttatatccccaatctgtttctctactctcttctacctcttgattcacttgactattatggctgctgctacttaactttgctcttttactggctgatgacactgtggaatcttcttgagtctcttgttttgatggaggtgttgcattgtaattcttaaagatatcgacaattgaaggcattccctgagaacaaacaagcaaacaaatctcagtaaaggtagaagcttttcgtgcaccaaacaaagcaatatattgcgtacccgattcttttctttcgagttgttcatcttccgcccaattttctttgtctgtgtgcctttgtttgattctgattgggtagaaacatccgttgcttcgtttgatggacaagagacaacatcctgacaaggaatgtgtggaattggttcttcaaggatacacaatttaagaacatatatataagctcttgagtcattcaaacactacagggcctaaccaatcacttcgttaccagttataattactaaagaagctcctttgaaagttgaaactgagaacgtaattgagcctaaatatgtttagcctttttgctagatcacacctctaagaaaggcctaaaatatgctttagagtaaagggaaatgagagctgataccttttcggagactagatcaatgtctttatcttggttttcaaaattaggcaaagtataagttacaccggtgtctacttcaggcattgctgcttgagtttctgttgacctctgttctgaacatccttcgctagctgcaccagttgcagattagatcacgacattaagtaccagaatcaagagaagtagaaagttctgaaaatatacagaaatactctagaatacctgaagcagtcatcgctacatttccttgaacacaaccatctgctgaacgagaaggaacagtaggttgactttgaaaatatctcatgatcgagcttgttccctacagtaataagatatcactcctaccaaatcagtgaagaaaccaaccaatgtttgaaagagataagtaagtagaagacatttaatggctctaagaacttacagatggtatatcaacaattttactcgctgaaacagaaagacctgttatcctccatgtctctagcttatttccttgaggtttgatcccgaaggatcccatgtactcacgtaaggcagcttggaacaagttaaaggcatcttcttggatcttggttactccatatctcataggacatgattttgaaggaaatttcttatgagaatctgaatcctttgactgcaatatttttcaggaaaaatatgttttaagtcgtagtcttcgcagagaaaaatgatatataacaagagaagtaggtactctgaaagcgctagcatgaagggtaagggtgcttgcaatccgcttattctgctccaagtcagaaccgaggcgctcgcttagttcctcggaaagctgattcagccaatgctgaacctagaaatataagagaacacaacacttattctaaaaactagttctatgatatgattgaagataaaaaggggatacttttgctactatttttccaaaacgtttcacctctataagcactttcagttatgacctatcaactagagcaactgatagcaaagggaaaagaagtgcattgttgagattctactcttacagttgagagtgacttcaaagcacgaggtccgggaaatgtctttccagaaccatgacttttggggagaaggcgaccttgcacttcttctccactgatccctcttgctatattccataaccaagtactacaagtcgggggaaaaatcagaaaaacgtattaatagacaaacaagcacgagttgcatgtctttaaatttctattatcaagcaaataagcaactattgggaatttagtatgctagaaggtactaatcaaataatgaacaatctacaatagcctacgagtccaggacaacaaaaattctatcttttccaaagctattacccagtatttactccgtaatgttcttgtagcttcgtttcagaaaattgcagcaagtcccctactgtgtcaactcccaagtcagtttgcaagctagtgcccagctttcctcccagttgtttcctgcacgttatgtctaattagagctcaatgattaccagcactaactgaaaattttatgatcctgggacagcgataaaagatgcaatacacaactttggactgtcttacatcttataaaacacagctgtgttgatactgacgcaaatatttaagtgtattccgtagaatgtgacaaatactaaaagttctcctacgaaaatatgtgttgtgatcaatacactattgaaacttacttacattttctttattggcaaggaacttagtaattcctgtacagctgcatatggtacaactgtctgctgcgcaggtttgttcattccactagcaagtttggctagcatctgcttgttgaagttatatgttattactcgccatacaagcgataaaaggaaaacaaaataaaatagcttcttgccttgttatgggctatgccagcagaacaagtaaactcagtctccttaagcacctgtttccggagttctgcaacaatgataattccacaacttaataacttatcacgtcgatcagcatcttctcgacaaatccaattgcggacactctccttgaaatcatctccatcctgaaagtaaaataaataaattcagatcataatattgactatcgactatacttttgttggagactaaaagacaccaaaacagacctctctgttcattccaagaatatgggatttaagaacttcctcatctatcaattccaaactctctggaggtgcatcagcaagcatgctttctgctgcatcagtgaggtcaagatacacttcatcaatcgaagccctctcacattttccgctttttgctagaatcgaaaccacctgcagcgacaacacatagaatgagatgaatttagcaaatgtcattgtttagacaaacacaaacagtataataataacttccacttccatcaacctcagaaccggcactgcgatataaattaaggtcagctttaccacgagccacaggaacttgaaccaattgaatctgaggacaagcagctttagcctcatcacctctcatcgacctgaacattaacccaaaacacaatttttccctatcctcaaaagattgatacaattgggggaaagaagcatttctgtaattacacactaaccgctttacgccacatttacgtgcttcgtaactaacagcaatcaaaccaccaccttgccattcattgtactgtacaactgcactaggcagtcctcgcaactccggttgcttcctctgctccactaatcactcactcataaaaaaatcccttaaccaggtaagtaaaggagacattttgataaaatagaaacaaaaaagcacactttttggtatttggtaatttcccaaatccctaaaacaaacgccaacgagaaaaaaaaagaaaagaaaccgttattaaaattcgattgaaacccaaaattccaacaaagctaaaaagttcaaaaaaagtgttaaaaagctttgctttctctcactaaagcgtctagtggctgaatacaattcgggttagagagagaaggaccttgaacgtagaagcaatccatgtcgacatgagcgataactctagcatccgatgcttccggtctcgctaccggcatttctatttcagaaatctccgcagaaatcagagggagagagagagagagagagagagtttttaccaccgaaagaggggtttcttggggatgatgactgatgaatagcgcgcgaaaataataattaggagaaaaagcgagacagattaataaaatgagaaagtttcaaaacgaaccctcaaagaaactaaactttgcaaaataacccgtttagaacacaagtaatttgacaacaaaacatgaaattcattgtaatgatctcaaaccctaaatatttctccaaatttgccgtgtcaaattatttgtaaaaataggttgaagattgacattgttgtttttagagatttagtgtggtaacaaaattatggacatcaagctgcatctttcgaattatggttgatcgttcggtagataaacaaaaagtatagataaaatatttaatatttattcattacataaaatttttattgagtttatttttatttatataaaacaatcataaaaataatatgggtcatgtttttttcatccattactatttgttcactactattattaatttcactattattgtgaaatgtcgatttttattgctcattaaatttggctagataatcttcactaactaaagatttggattcaagaaaaacaattttctctcaattatgtttatgattacaaaaataaaataaaaaaattaggtattaaattataactgtaaaaattaaaacttatggggatttttggaagtatatacaagtttaagtactaatctgaaaatgtttgtgttttagtatataaaccactcacaggttgtgactttacaaattggaaaatttcgttgaatgcttcttcttctccgtctcgttgagattcctccccaacaacaacaatgaagcgtagcttgggttcaaattcttcaaacaatagtggcagtggaagtaacaagaagtctaagaagaataataatccgagcaatcagaaaaccctaggcgcggcatggggcgctgcttcttctcgttcttctttccggtcttctcctttctccgatttcggaaggtctttctatcattctctgccattttagtgttgggtagtggttagattttgaaattcccatgtaaaagttgaaactttccctctgaaaagtgatgttctgagaaagattgaattttggaaattttatgaagttagaatgaagtaagatgcgttaagcattgttatactatcgtggttgttgattattttttttatgtttttgatgttagttacatggaagtgaaaaataggaaacttcagaaccaatttgagactgaggcttctgctgcttctcgtggtgtttcgggttctgagaaacttattttccaaggggtttcaatctttgtggatgggttcactattccttctcatcaggtttaagctctattgctttggtttctacccattttcaattttgttggtttctagttctttcctgatttgaaatggcttaactcttatatcgtacaaactgttgcaggtgaataaaccttagaatttgttgtagtgcagttttgctggtgggttatatgtgatttaacagtgtctagatctgtgtaggagttgaaaggatacatgatgaagtatggtggaagatttgagaactacttttctaggcgttctgttacacatatcatttgcagcaaccttccagatagtaaagtcaagaatcttaggttagttgtttctttaaaattcttcgctaatttcttgcaagttcgtgtcttataatggatttttgtttccaatcaggacattcagcagaggattacctgttgtgaaacctacatggatagtggactctatctctgccaacagacttctgggctgtaagtctatacaagatgatttagtttcagttaaatcatgtagacataagtataaatgtttggatttgatcattgtctactgtcaacttcgtatgcattcatttatcttgcacacaatctatttaatcatctgattcaatgccatcgcatcacaggggttccttaccagctagatcaactaaatgatacccagccaaagttgtctgccttttttgcacccagaagccatttgacccctcagatggcttcgccggttacatcttttcagcctgatactggatacagtgaagctgaagaaggaagttcaattagagcagatgattcagaggaagcaagggaccacatcgatgatgaaattgatggcgtttatatcgagaacactactccagaactgacagaacaaacaggaactggtgatctgaaatcttctgaaatgaatgcagaaggacttggtaattatgacatagaagaaaaagaagttagtagtgaacttcaatccactactaatcttcattccacttcagacaacaagtccgttcatgcaaatgggaagaatggtggcaaatcaattgcaactgctgctggatcttctacaaggcgtcattcaactctcgaggaccctaattttgtagaaaactactttaaggtacaacttacaatagattcattatctgctggtttcttctgaaaaataaacaatgatctctgcctgagatagtacgcctgtattaaaagtcctttcagctgaaagtaagagtctcattgccagtttatataactacaaataattggatggatagtattgttccaatgaagattctgaagatgctttctctatatgtattttttttgttctgcagaattcaaggctgcattttattggaacatggaggaacaggtaccgtaaaagatttcatggctcttccaatggacttaaatgggcagattcaggccagaatacagctgaaatggccaagaagtcaaccattatccacattgatttggtaatttcctcaatctaggctattttatttatcttctgctttctaaaagtaaaggaaataaaagaaagccgtggccaattcttcgattctgcattttcccgcagcacaatagctatcttagcatgaaattggccataaaagacagtgaaataaatgcttgaagtttgtgattctaggattgcattttttttgttctgactttcatttgttgcattctagttatttgaatctgtgaaatatttccaggattgcttctttgtgtcagtggtaatcaagaaccgtcttgaattacacgacaagccggtagctgtatgtcactcagataacccaaaaggaacggctgaaatttcatctgcaaactatccagcgcgggcttatggtctgtcttatacgaaagtaatctctcttaagtttggttgcgctcggggtcctgacctttctgtttttatactaatttgatgtcattttctttatctaggagtgaaggcaggtatgtttgtaagacatgcaaaagacctttgccctcagcttgttattgttccttacaactttgaagcctacgaagaggtacttgttagaattgagtgcctattgtatattgtcacatccgtccagcttgtttgacattgtaaatcaattgcaggtagctgatcagttttatgacatcttgcataggcattgcagaaaagtccaggtcagccttcaaaaagatattttttcagttgctggtgtttatttattgttaacatttatgtttattttttggaatttaggcgctaagctgcgatgaagcgtttttagatgtctcagatttgagtgatgtagaaaccgaagttttagcctcgacaataaggaatgagatccttgagactactggatgcagtgcaagtgctggaataggcggtactatgctaatggctcgtcttgctaccagagttgctaaaccagccggtcaactttatatttctgctgagaaggtgcttactgctttctataaacagctttctatcttttggtatatgtgtttgtttctgactcgtaatcagtggaaagaggtatatgagcagtggttactggttagtttcttgattgcagaatccattttggataaatttcggttagctgatagtgtctgccatttttgcaggtagaggagttcttggatcagcttccagtcgggacactacctggtgtaggttctgtgttgaaggagaagctggtgaagcaaaatattcaaacctgtgggcagttacgtttgatttccaaggtaaaacccatttttgtggttatggacatgtctggttgctattcaattgttaacattatcgttttgttgaccagtaattgttgggccacctgtgaagccaaaatatttttgatcgatttggtcttaaaagagcatgtggttcttgtataatatgtagacattatcaatcgctgttaagaagaaattttctatgaaacagttcggcaccaatttctttacttaagctttatattgaaattggttctgaagttaagcaaaacaccataggtagttttatttaatatgatacttgcctttgaagactactgtttcttcttagttaataattgttatctacagacaactttgttaagctataccagaaatatcctatcgagttttgtaggattctcttcaaaaggattttggggtaaaaaccggcgagatgctttggagttatagcagaggactagacctacggtcagttacagcagtgcaggtctgcttagctgttgactcgctcacttgtttcacattcatcgtttttctctctgtaggtgatatttttcttttgatatgtatattctcaaccagtaactttaagattttatgtgtacaggagagtaagtccataggggctgaagtgaattggggtgtgcggttcagagatcagcaagacgtctttattctcgtgaataatgtcttgttgttttttcccaaacattattcatttgatgttagctaagaatatgtgtggttgttgatggttgcaggttcaacacttcctccaatgcctatgcaaagaagtttctttgcgtctgcaaggatgtgaaatgataggacgcacttttactcttaaggttttctgccttctcttagtttcatttttgtagaatatttaggtttttgctttgatagtagtcatcgcattgggtagtatataccatcttcgagtgacatcattcatcacgaaaagaaactatagtgaatgcttgcgctctgttgttactgcagataaaaaagagaaaaaaagatgctgaagaacctacaaagtatatgggttgtggagactgtgacaatctgagtcgctccatcacggtgagttgttacaatggaaattaggatgacagtattattttatctcacagatatcacgtgcgatatttttcatatatacctgtgtaatccttaaagcctggctgattattttttttatcattgatgctataggtgcctgctgctacagatgacatagaagttctgcagaggatttcaaagaagttgtttgggtcattttgcttgggtaagtgcgtctcagctgctttgaaaagatggttttgcagttgcgatttactgagcatctatcgagtccttcctcacatgcaagacgcagcttagttgaattttcaaattttataaaagatggatgagactagtttgaaagattaaatgaacctgtgagaccaatttaaggtaaaaattgcagagttgttctatctaactctgcaggaaaggtagaaagttggtccttgagactgaacgtcctacaggaatctattacttgctattgactccttgataacatctaattcttgcatgcatcttccatgattaaccgtcaacttttttctctcttgagatagatgtaaaggaagttcgtggggttgggcttcaggtctctaagcttgacagtgcagatccttctaataaaggttagttctaaggaaattaaactctagggttcactatgatttgttacataagaaattaatgcatttctggtaaatattcttgaaaagaaaagggatttaaacattgtagtctctccctattcatttctatttgtttcttaggttcaaggactctgaaatcatggctcagctctgcacctgccgttgtccaaatagaacaagatgataatgtttttgctgcaaaggttagggaaaactcaggtaaataaaacctttacaagtgatgcccagaaagacgtgcttatttgctatatatgtctttgataacaaacccgacgttctcttcgagaatgtattagtatgtctgtgaaaagaaaatattctgacccaaagtcggttttcttttttctttccttttttgttgttatgggtctagaaatgaagagctcttacttacgccctagctgcgaaaaacttctgacttacttattgtcttgtgacagattgtaacaggcctgttactggtggagtttctagactccgagaatctaattcagaagaatcttcaattcagtcaggtgatacaaattcatccttaccgcccatgtgttatctcgacatggaagttctagagaaccttcctccagagctcctttcagaattagatggaacctacggtgggaagctgtttgagttgattgagaaaaaacgaggcaaaagaagaatcaactgcaactctccacatgtctccttggatggttagttatgtcagctgtatcagaagcatgatgaaaataaatgttttttccccagtgcagtgcacctgagatgattactttttcttcccataggcactgctgctagcattaaagaattaaaatctctctcagttaagatacatggcttgagcacctctggagaaaaggtaaagatcctgctattcattcttggaacgattcatttcacatatgtttggctattctcaacagtagaaccctgaaaatgagtatagacttctaagagttttcgttatatttccaaaattaggaatataaagaaccatatgtgccgcatccttccattgccagaacgtctaatcagcatacaatagaaatgacggatttgttgccttcatcccttagtcaagtcgacgtctctgtgttacaagaattacctgaagagttgagagctgacgtattgggagcatttccttcacacaggagacaacagtcatcatcagatgttcccaaggagacttgtaagaaacaagatgaggaaccaatagatttaaagggcactgagaatgagattggattatcatttagctctctttggtttgggaatcctcctctttggacagagaagttcaaagttagtggcaattgtactatggaaaaactttcagcgatatacttcaaggttgctcagtcaaggcccatgttatccctagtcctgcaacacgctatttcagaaatgagtagttttcctgatgcagcaagtgccagtgatttggacaaagctatttacgatgtgtgtgaacttcttaaacagtacattaacctcaaggtaggaggtgatattgaggagatatatctctgcttccgacttctgaaaaggtattgcagagatctttcttgcacctgtatgttaccttagttatgagttatgatacatttgatttctttgatttttcatcttagattattaccacttttggtgatgattatacttttacctccagattagcagcaaggagccagcttttcctacaagtctatgagatattgtctccctttattcaggtcagtgaaaaggttccatcgacattataaatcactacgaaagaaaaaaaaagtcagaatttaaaccatggatacaagctacatcctgaactgaatcatttgggaaaattcgaaattggcaaagtaatgagacttccttctttgcataggcctcgatcagtgaacactatggaggaagcttgagtataccatgaaaggtcttcactgaggttggactgaagtctggctggatgctataaaagaatgtatacttgcaggtacatttaccttcgtcccttctgatcggttaagattcattgtaagtgttatagggtgaaacattgttgtggtccttaccaacaagatctgtgaatagaactaaacttgggatttaactttaataggacaatgtggattctgaagggcatcatggtgaacgcacacggacaatacacgaagcagcttaagcaaaccaaactcgggaagatttttgggcaatagaaggctagctgctgcaaatccgcgtgtgaaatggagtctcgaaagcacttattgttgcatttgcacaatgagatatggaagtgattcaaatctcaaagtgcagagccattaggagccactgcttttctctgttcatagaaatgtaactgaacttgataatcatttcttcccatgacacgagctaatatatcacctagttccttgttcatgaattgtctttatttttaaaaacgataatttattctctggatgaatgaacaattgtagaaggataattccccaagtaaatttttttgtttgttaaaaaaaaatatttacgacaaaaacaaaggatacatattctctaatctctaatattttgtaccctatatgaaatcagtggttggtaacgtcttctctcttcaaagcaaaataaaatccaacagttgagattctaactcacaattataaacgtcatttatgtttactaatgaaatgaatttttcgaacttccaaattatcatcgaaaaacggtaaatatgtttttgccttttgatatatctcacaagaaaatctcaacttttactgtaaatctttatcttaaaccccaccattttctcttaagaaaagatttcaaaactacaaacaaatcttcataacattttctactatgtaaacacaaacgcttcaattggcaactttgaatcacaataacaacaataacaacaacaacaaaaagatggcagagcacgacttctctcttaaggaaacatgtcccaaaatcggcggccgaagatcaattcccggcggtgacatgctaacgtcatcatttgacctcgtcgaacgcatgaccttcctctacatccgaatcgttaaggctcgagctttaccttccaacgacttattcgttgaagtaacaatcggtagatacaaaggaagaacgaaacgtagcacaaacccttaccctaatctggagttcgacgaagttttcgcctttaatagtgatcgtcttcaaggaaatatgttggaagtgaccatgaagatgaacgaagaagagattattggacagtgtagattcgaggtggctgagattcctacacgtatcccaccggatagtccattggctccacaatgggataggttagaagatagaaatgcgaacagatttggagaagaggttatggtatctgtatggatggggacacaagccgatgaagtttgccctgaggcttggcattcggattcggctacagtgactggagaaaacgcggtgattgtgcggtctaaagtgtatctatctccgaggttatggtatttgcgagtcaatgttatagaggctcaagttttggttctgttgcaaggaaacagaacaaatccggaggttttagtaaaagggtttgtaggaaatgttgttgtgaggagtcgggtttcgcagagtcgaacaatgagtccagttttggaacgaggatatgatgtttgttgcggttgagccgtttgaagatagtttgttacttagcttggaaaataaggtaggtcaaaaagaagagtgtttaggtctatgtgagataaagttgtctcaggttgagagacgggtattgccgggacctgtaccggctctatggtataacctggagcgcgttggggactcgggattcgcagggaggattcatttgcgggtttcattggacggaggataccatgtgcttgatgagtcgattcagtatagcagtgactacagagcttctgctaagcttctatggactccaactattggtgtattggtgctcggagtcatcagtgcatctggttcgattccgatgaagtcccgagatggtcgaggcaccaccgatgcatattgcgtggcgaaatatgggcaaaaatgggtgagaacaaggacgattgtagatagtttaagcccaaaatggagcgagcagtatacttgggaggtttatgatccttataccgtaataaccgttgccgtgttcgacaatctacatctataagtacctggaaactcaaatggtgaaaaagactcgagaattggtaaaatcaggatacgtttgtccacactcgaaacggagaggatctacacgcattcgtatccgctcattgttttaaaaccggacggtgtgaagaaaatgggagagattcagctcgcgattcgattctcatgtatttcgactatagatatgcttcagaaatactcagaaccgttgctacctgaaatgcattacctaactccgttgtctatataccaactagacagtcttaggcatcaagcaacacacatactctgtttgaagctaggtcggagtgagccgcctctaggaagagatgtaattgagtatatgctcgatttcggatctaacatttggtgtttacgaagaggcagagctcatttcgaaagaattgtgagtttcttcacaacgtttattgattcttggatttggtttgattcggtatgcaaatggaagagtccggtaacaacaattctcgttcactttatcttcttgttcgtcatttttctccctaagcactgagtcaccagtctccttttgtatggtttcgatatcatttgagaccgagacatcctcctcacatggatataaagctatctaaagcagattcggctttacccgatgagctagacgaggaattcgatgggtttccaagcgcaagatctgcggatttggttaggaacaggtacgataggttaagaggaattgcagggaggatgatgatggtttatgtgatttggcaacacaaggagagagagtgaagaatttgttgagttggagagatcctagggcaacgtttctgttttcgatgttttgtttagtggcttgtggagtaatcttcttagtctccatgaaactgctaatgactttgcttgcgttctacgtcatgagacaccctaggcttagggtttttgatattccttccgttccacaaaacttctttaggagattgccttcaagagctgatagcatgttgtgaattgtttttagttatatttttgtttccttcaactcttacacgtttctttggttttcttccttttgtaatattagaatttcttttttttgtttgtttttttaatatattagtatttagcaaacttaactagtgctacgattatggttttgaaaatttagttatattcaatattttcgaatatatattgtttaattatatatctgtccgattaacaaaaactttttattccgctattgttgggcttacatgttacccatgttggcttataatcttaatgaatgattggacttagtcatcgactcgagtatattattagtcatcgatcatatcggttttatgattttgattcttttttttttctgaaattgagagaaaaatatatgattcggtttggttatgaattttagaagacttttggtacattttgggtacaatctggtttattagattacaaaaacttttcttaaaaaattggataatcattaagtttagttaaccaaaccaaaacaaactcatttgaaaatcgtgttgatcggttcaggtttaataaccgaacttaaaccaaagtgaacaaattaactgttaactttattgtcatgactttaataaaatacatatctttaatcaaactttcacattatccaaaataaaaattggaaccaaaattataaacggaaaattaatcctacaagtacaaggctgatctatctcctctttatacataagtcggaattctattctgggcaatgaagtgtatgattggtgccgacaaaaaatagcttttttttacagattgttcagatttgatgaagatggtgtttttccaaaacgaatgaccagcattttcaacatatttgaaggagattcagaccgacaaggaagaattcactactttttctttatctttaatttctcgtaatgcaaatgttaaagcggattatttggcacgaaaagtcgtgtagaactgctacacattatttatgtaaacagttttctgcaattttgactcctttgaatcctaaataatatctgataaaaaaaaacaaaaacaaagctactacttgtaaatttatatcattgttgttttataaaattataaaataaaattatctattcaacaaaattataaaatttctacccatcattgcatgaaattttttaatgtacagatagttaaatgattactaagcccaacaatatcttaaaacaatttatagaaacaaacctcgctggagttaaaccctagggttatattaataaaagactcaatgaatcttttgcacatactttaaggatttcaattagctggttgtgagctgtcaattagtagctatatatagcacaagacaagaaaaataaattaaaactggatttatgattccaaagagtacttattctataatgttgggttttcaaagttgttaattcatgtgataagatgttatcatgtgtcaaaatttaagtttgttaatatatttaaagatagaaatataaaagatatttaaccctatcaaatttaagtttgtttatattttcaaactttttaattaatatattaaactgctaacctagttctattaagatttgtttgttaatatattcaaaaagaaataaaagttccttatcatatcaaaaagtgttaatatattaaacaattaacctcagtctattacatttgctgttgttgatatattcacaaaaagaagtaaaagttctttatcatatccgaaaaaaatacaaaatttgttaatgttattatataaaatcttatcattctcattagagtgtggtatatggcaaactatgaacctattttttttatagttaatatattagaataatttctcatatcgcaaagaaaaggaatttgttaatgttattatagaaagttttaacattcttagcagaacatgacatgtggtaaaaccgaaattaacgaaagtataacatgttttaattaattgattatatttaatacatagtttaatattttattatattgtacggcaaaatatatctgtaattttcttttcttaattaaaaggataaaaaatatatcaacatgtctacattagaaagaaaacaaaaaaagatatattattaacttagagaataagcataactcaagttttaaaatagaaactcttacaaatatatattctttgctagtagagttttccttgtcacctaaaaattaagaagctaaacaaaatgtctaaactcatgctgccgtttcatgagcatcctatgacaatttcgaacctatacaaccatgcttgcgatttttgccctggaagaccgaaacctggcaccatatttttttgcgagaagtgcgacttggatctgcacaagggatgtgccggcaaattcctcaacaactcatctcgctgtaatcactctctcaagattttccaaggtaggttcggacagttcggtgaagatgacgactaccaatgccattattgtcaacaaaatgtaggatttcattttgctcgttgcacgatatgcaacataagcatcgacgaaaagtgtctgcgaaatccaccaccactcactattttccaaccaaagcaccacaagcatagcctcttcctcttgggaagactagtcgcatttacttgtaatgcatgtggtgtggaaggcgaccgcaatccttatatatgtattgaatgcaatctgatgctccacaaagagtgtactgatctaccaagggtcataagcataaatcgtcatgagcatcgcatatctcatacctttcatcttggcaaaggagaaggcgtttgggagtgtggagtttgtcggaagacgattgattgtgtctatggagcttttatatgctctcgctgtcccagtagttatgctgttcattcaagatgtgcaacaagaaaagaagtatgggatgggatagaactcgaagatgtgccagaagaagatgaagaactcgaagatccattcaaggtaattaatgaaaaaggagatattgttcattttagtcatgaagaacacgttctcagattggatgtgaattatgttcatgataatgatactatgtgctgtggaggttgtattcttcccatcaatgatgatccatgctacaagtgcgtggaatgtgatttctgccttcacaaaggatgtgctagtcttcctcgaaagaaagcccattttttgcacaaccataaaattagcctacgggctcataaggatgacgtttatgtagataaatgcggagcttgtaaaacttattctaatggtttcaagtacgagtgtcacgacaaaagcagctgtagaggtaatataaagtatgatatccgttgtagctccatatcagagccgtttcaccatgatgatctgcatccacatcctttatattggaccttggaagaaaccaaacagtgtaaggcttgtggcacagagatacttaagcctttaagttgtttggtgtgtgagtatgctctatgtataaggtgtgctactttaccaaaaaaggtaaaacataggtgtgatgatcacttcttgtcactatgccatgatgctggaaactcgagcggtgacttgtggtgtgatatttgtgagaccaagaccgatccaagtgtatgttactacacttgtgataagtgtggggtcagtctccatattaattgtgtactaggagatttatattatacgaaggtaggactcgtctatcctggtcttgaagtacttcccaacaatggtgctactcgacctttctgcaacagctgtaaagttcgttgcaagttcagcttccttatgaagcaaactctaggagaccttgttcgttacttttgttcaatacgttgtattcctagagcaaggtaactataatcatccaaattcgtattttacattctcagtctaaattgtaaacagtgtgttttaaaagtcttttagcagttttttgttaagaactattttacagttttccttttgttttgcatggctattattgagaatatgttcattttttacaatattgttttgggtaagatgtcaacaatttcatacttgttcacttttcatgtgtgaggtaaaacagaatgatctgagaatttaaacgaaaaagcgtatcttggacacatgtctatggtctaagatttataaaacactaaagcagcaaccacttacctcagctaaagggttttgaatcgaaggaaaaaaaagacaatcagtgtgaaacatatggtctcattaaaaacatatgtttcattatcaagctgtcccaaccaatcctataactagatcaggagagatttatctgcgtaatcgttttaattctttgcctaagtgttcaaaggacatgtatcatttgctaataagatcaatcaagagtatacatgtaatgaaatcgtttacaaccgagaaaagatcatttgccaaataaaaatatggctacaaattttaaatttagatgtatcacaaattaaaataatagtttgcaaattcaatattaatcaaccgatctacagttgtagatccaccatcgccggatccactgacaatattatatgtcgtatcgacttcagcaatacagtactaatttgtatactagtatacataaaagccaactatatagtttgaaatttgccataactaattaatttttcattgaaaaacacccatctcaagagctatagagttagcttgcggtaacgaattaacgatgccttgaacttacaccatctataacttgtaagaagattgtttatttcacaaggaggacctaattggcttcatgctcgtattgccgatgaatgttgatgttagagtctttgttgttgtactctgtgttagcatcttttgtgaaggtattgttatgttgacttttgaataaactcaaattcgaaaaatataataactaatttttcattgtgcaatatacagtgaagaatattataactatattctcatgtacaactagatcgatatgcttcagaaatactcaaaagtcaaaaccgttgcaacctgaaatgttcttgcccattttatctaattggtgtcgtctttgttaatagcccaattgatataaaccgcaatagatcggcccaataagtatatactttgggaaacattgataaatctgaaacatttgtgtcaattccaaaataactgaaactataaggggcctgaaaataaataacaaatactaaaaaccacacgaaaagccctactaaacccatcagtacctgaaactttcaagtagaagactccggccggcgttattctaaatctccggcatcaatggccatgttctcgcatcgtctccgacgaatagttgtcgccgcaccttcctatttccaacgattctccactctatctcgtccctccgatttcactcccgtgccatcgttattaccgagatctgtggtgaagcaatcgacggcaattaatcgatctcccgcgagattgttctcgacgactcagtatcagtatgatccatacactggagaagattctttcatgccggataatgaaggatgcgattttaatcattggttaattacaatgaatttccctaaagataatcttccatctagagaagaaatgatttcgatttttgagcaaacttgcgccaaaggacttgctattaggttcgtgtttctgcaaattgcttcaaattttggaattattgtagaatgaattattgttttgtgattatatgttgcatttttcagtttggaagaagctaagaagaaaatttatgcaatttgcacaacaagttaccaaggttttcaagcaacaatgactataggagaagtagagaagtttagaggtaagttttatatacgacaacatttttgttgaatggaattagtttttgctttgttgacattttgatttgatttttggtgttgtttatgaacagatttgcctggtgttcaatacataatacctgattcgtatattgatgttgagaataaggtttatggaggtaataagttattgattttggaagtcttatctcattgtgggaattgtgtataaagaagttgcatttttgaacttttattttggttttgtttttcaggagacaaatatgagaatggagtgatcacacctgggcctgttcctgtccctactaaagaggggtttgattctttaaagaaggagagtaagccggaacaagaggaagctgaaataattctaacgcctccagatgagggtaaaacctcaggacaagtgcaaggtcaaggaagtctaacgcttccagatcagaggagtgtcaaggaaagacaaggaactcttgctctagtacaaggccaaggtcaaagaagtggaatgtctatccttggacaagggcaaggtgaaggaaggcgaatgtctattcctggacaatggcaaagtcgaggtcaaggaaattcatttcaagggagtttcaagcagagccagggaactctgcccgtgcgaaaagggcaaactcaaataagtgatgaaataccttcgttccaaggaaatgttaagcaaagacaagaaatgccaatccatggacaagggcaagctcaacgaagtcaaatgccttcatctcaggggactctaagacaaggacaagctcaaggaagtcaaagaccttccaatcaggtgggttacaaccaaggtcaaggagctcagacgcctccataccaccaaggtcaaggagctcagacgcctccataccaagaatcaccaaacaattacggtcaaggagcatttgtgcaatacaaccaagggccaccacaaggaaacgttgtccaaacgacacaagaaaaatacaaccaaatgggccaagggaattacgctccacagagtggtggaaactatagtcctgcacaaggagcaggaagtccaagatttggatatgggcaaggtcaaggaggtcagttattgtctccatatcgagggaattacaaccaaggccagggaactccgctgccaggacaaggccaagaaggtcaaccttcatatcagatgggtttcagccaaggcttaggagctccggtgcctccgaaccaagtaataccaggcaattatggtcaatgggcatttgtgaactacaaccaaggaccaccacaaggtaactttctccaaggaccacaacaaaatcacaaccaaggaggtcaatggaattacagtccacagaacggtggacactatggtcctgcacagtttggacagtggtatcctggaccccctcaaggtcaaggaattcaatggccccaatatcagcttagttacaatcaaggccaaggaactccattttctggacaatgtcgatgtccaaattgtggaatgacttcataccaggggtataacaatcaaggccaaggaactcatatccctgaacaatgggaaggtcaagattatgcagtgctttcatatcaggctagttacaatcaagcccatggagcacaggcgcctccataccatggaaactacaatcaagcaacaccaggcggttacggtcaaggaacatctgcaaacttcaaccaaagatttccagtgaaccccgcaaattacaatatgcagaacggtggaaactatggtcctccacatggattagcaggaaatccaggatttagacaagggttttctggacaaggacagaatcaaacatttcaacaagacgatcagagaaatgtagcaggtgacttgagaaacaataatcctgtagacccaactgaaaccagaaaaccaaattctcgaatataagcgagattactcagtttgcttgtctcaaatgaagattagatgagaggcaaataaacttcttgttgaaaattcagtttatactttatagatggacttcaaatatcccctacaaaattttcgaggcacttttatagttcacttaaaagtgataaattatagagttgggaaatattggcccattcacacaataggttgggtgtaacgtaaaaaaaaaaaaaatgtttcgtggcactgatactatagcaattctctttgtataagactggataataaagtcatagggcctttttacatagtgggggccaaaattaacataaggctgctagagaagcttaggccatgacaggtctttcttggtttttctttagaggtggtaactttgacagcgcccaagtcggagaatcacctatccacagtgcttcaccggtctccttgtgcttaaagtcagggcctttagggtttctctacacatggttcaaaaacatttattgggaaatttgaaaatgaacgtaagaagaaacatttatagtgtcttcaaagatgatatatagtaccttgtctaatctgttatcccaccatttactggggttctcaaccaagttcttccaaatttcctctcctacatctcacaacggctcgtttagagaaatgagaccatcacaattgccacataactgcctaatacttgctaaaagaagaacttacttttaagctgtttcagatttcctttaggtacttcaacgtcaagctcaagctgcgagactttattagacatgaaaggtctttcttggttcttctttagaggtggtaactttgacagtacccaaataggagaattggtcatccacagtgcttcaccagtctctttatgcttgaagtcagggtatttcacgtttgtctacacgtgttcaaaaatgttagtgggaagtcgataaagaagaggtatgatgagagactagtgtcttcactcttcaaagataacctggagcacaatgttttaccttatctgatctgttgtctaaccatttgtctgggttctgaaccaaatccttccaagattcctctcctatatctcaggatagctcactttataaaacgagatggtagcaaaatgccactacttacctaatacttactgaaaggagaacttacctttaagttgattcagtttgatgtttcctttagggactaagacatcaaacttaagctcttcgagttttagcaaagcccaatcaggagctgtgctgagccacagggacaaaccaccaaccttcatcttgaaatcgggatgtcctggctttacctacacaagggaatatcgataaccgaaagatttctagtcgaactcgtcaagcaataaatccgaatcaaagtgtgtttaccaatccgttagctttattcccacggtgatccaaccactctttaggattttcaataagatgcttccaagaattagaggtttcttcatctatgactttaacctttttggatcttgctggaaaaatacaatataacaaatctgttaactcaaacgttacaaatccttgtacacaagagatattgccaaaaggaatcacattgagtagaaaataggcacacaacataagtatttttttctcgcataacattaagaaaaggacattagagacctaccgggctttttcttgatgctggtaacttctttttcaggtggtgagatcgtcttagtcgtagaagtagcagcttgtacgaagttaagattctgaaccataacctgttatgaacaaccttcacatgttatcaatgaatcaaaggaacatgaaacagattacaaatctaatcattaaaactcgttccatcaactacaaaatcataatatgcttattgtaagaagtgtgtcacctgaacattggattgagaatatgtcacatttggaggaggcgaatcaataaacagcttcccggaaacatgaatccgatcttctttctttacatgttgaactgcaattttagctaaatctccttcgaatataatcggaatcctgaaaagttttcaactttgattaatctataacacactcatgctttcaatgaaattcaataagcttaaaagcaaaatgtaccagaaattagatgattttgaaccagaacgctgagaaataactgttccagcccagaattttccatcggagcaaggaccgaattgaactggttgttcaacgaatccgattaggttgatccagtttgaaatttccggtttgtactcaattttctttggcggagtcgattctttctccgtcgctacatttagcggtggtttcacagatacttttgccagaggtttctttcctccaccgctgatgactgtggcggagaaaacacggatttgctgcgagattatccatttttgagtggggagcttcgctgcttttgagtggtatagtgacgaagacactgctcttgtcaatgttcttgagatcaaattcattgtttcatactaaagagaaagaatctgatttattctacgatttccggtgaactgtgtcgccggggaattttagagggaggaaatgagagaatcgcgaagataagataaagccctaatttgtttgggcgccaaaggtttaaggggaaacaagtgattaacaggcccaaataataattattgggccgttattccaaaaggcctagaatctgacgtttatccttaattattcacttatacacagttaacctaaagatacgaccacaatgattttttttttatgacgaaattttagttgattttgtagtatatcaaacttagccgagacttgtattttattttttaccctcataaacatgtaattttgaactaaaaagataagccaattgatattataatatgctttttatgaaatgtgaaatacctataactgcaattgatgcaactctaattattaaattcaatttccacattcagctgagctcggacgagattttgactttaataaattttttgtttcactttttacattcataaaatttaattttcacattcagttggtcaaatataatttccacattcagttggtcaaatatgattatttagttttagtttttacattcataattttttaaaattttgaaccaaaaatatcaatcaaataatacaataatatgtttttctgaagtgtgacatgagtgtcagagaaaagtttctcatcgatgtatggtcgaatttcgaaaaatactagaaaaatctatatgaaaggatgtgaatgtcgcaagcctcaaaacaccatacttgacacttctcactagagatgacaaattcaaacatgttttcgaagagttgataagactaggcatgcaaatttgcaaactttacattactaattttaaagtttgattattttcgtaggctaaacagcgaaacaaattgtcatgcgaatgaaaactatattaataaatcttggaattgaatttattttttactatatttgatttaattattttgaactcattgtctacttataagagagactagattgagtactcaattttatgtaataaggttttcaaatttttaatatttccatgcacttacacatgaatatgcaataaaaacaatgagtgtaacaatataaaataacaatttaagttatatatatctaaaattagaatgtttagcattgtaccatagtgtttttgatttgtacaaaaaggaaactaaaaaataaacaaaatgagatcatgggaataaattttctactggttcatgaaaagattaatatatttataagcctcttactgatgtgacacgtggtatcattattacttattagtcatgagattatgaggtgccgacaaaaattaatttaagatgatgtttgttttctaattttcgtgtcgatatgtcaaattgtattttctgtactcatggtatttttattattattattattattattatttattattattattattattattattattattattattatttgtgtaatactaactatgtatgtacgtaaatttgatatgatacttatactattctgatatgaaatgttttggcttttattgattgatattaagtttatgatattgaaatgtgattttttttcttaatgttgtattgcgaaattaaccacgtataactgaaattttgttttaaatgaggtacttatcaatattcaacatgttaatagatatgcaagtcctaatctagtatattataaattttggtgtattcaaataacaaaacaattctgtaattttgacttgatcaaaatactttcttgatgattagatttagatatacatcatgaatatatacaagtttttctctaacaatgttaaatctggtgactggtggttaatacttataggtataggtatcactttgatctttgcagatgccaaatcagctttcacgaatttgatctatgcatgtgctctactatgaacatggtcgaaggagacactatcttgacagtccaacaatcatcggaagcacaatgcaactttgtaaactttgaggcatttgattactgttggaagttgattctctactcaatcatccaattgacaagaagaccaaagaaggagaagaagtctcaaattgaaagaacgaagaagaatatgtatgagtcgtcaagtacaaaggaagaaaaagttggtaagatctttgacttgaaaattaagacagaaggtatcccacttcacgtaagctaaccactcctacacaagatgaaaaagaagaaacaaatggaatgtgaggaacaagaaacgaaagatcaaaaatgatctacaactgctgttcagtgcggtctgatacgaaaatcaactcccaataaacagtcactaagatggtgaatggataattaatcttggacttcaatggactcgtgaagcaaaaaccttaggtatattaaaccggaaatctcgctaaagattggcaaaagctatagttgcttacttcttacataataataataattgatgtcgcaaaattcagaacaattctaaattcaatatgtcgtgttaaatctgtattcgattatcagataaaaatatcattttatagtcacattagaggaattcactactttcaccattttacattaataatcgagcacaaagcatcgaaaccatttttttacaacaaaggccgagaggacacatttcttacagaaaaaaagaaacctctccaagaccaatatcgttgttacatgattacaacaacaacagcacaaaagaaaagtaaatacaaattattttcagaacaaaagtagtcgagtcactccaatgtaagaaaacaaaggactttttactccgtggtgattttcaaaacagtggtaagtcttggcttcttgtatcttctaagaagcaaagaagagcaaacaacactaaccgaagagagtgccatacatgctccggctgcccaaggcggtaattgcacccgcagaaccgggaaaaacactcctgctgctatcgggattgacactacattgtacgccattgcgaagacgtaatttaatcggattcgtgttaaggtttttcgagagagatcgatggctgttataacgtcttctaagttgtttctcatcagaacgtaatctgctgcttctattgctacatctgttcctgcaccaattgccattcccacatctgcagcggctagagcgggagagtcattgattccgtctcctaccatggctactgtgcttccgtccttttgcagcgaacgtataacgtcagctttaccagctggcattacttctgctctcacatcttcgataccaacctgcactcatgccaccataaaccccatcaatattctactaaaacaattgtttatcaagattgattacacacttatagaagtaaatattttaacgaaatcgaaccactataaccgaacagaatgcaaaaaaaaaaagaatgactacacctaatcacatagattgtgaaataagattctaacctctttggcgactgctcttgctgttctccagttatcacctgtaaccattatgggtcgaacacccattctaaggagaccttccacaaccaaagcggcttctcgctttagaggatccgcgattcccatcacaccaactaatttcccattataggctacaatgactcccgtctttccgctttcttcaagatcttccacaaatttctcgacatggtctgggatgtttatggcattttctgacataagtttacggtttcccacctgatcaaagaggataaaacaaaactttctttcagttggcgagaacaggaccaaaagcaagaagttgataatatattatggaataaaaccccaaccagaatcatcttctcattgactaagcactgaatcccttttccgggaagagcagagaaatccgaggtatcaagtaaccatccagagttttgcaaatctttgttatttgtttcgccatcttcagtggattcatcaaagaagtggaaatgccgagcgtacgcaactatagcttttgccaatgggtgttcactgctagcctaaggaaattaagagacaatatgaaaagctttagtaacagtttatacatcactatcaatccaagcagctaggaaggaagatttatcttacctcagcagacgcaacaagtgtaaggaattctccacggtccatctctgagaagacctttgtggttgtcacagtagcttttccttgagttaaggtgcctgttttgtcaaagattacatacttcactttgtgagctttctctaatgcatcacctcctttgatcaatacaccattggttgctccaactcctgttgccaccataacagcagtcggtgttgccaagccaagtgcacaaggacaagcaattaccacaacggatattgagaacataagcgagaaaacaaagtgagtcccgttctccggaagccattcgtctgggtaagctccaacagctccaccaattgaccttcaaaatcatatgtatcaagaaataagaacaaactaatcccaagtgtttcgttctcagagaaaaattaaagctaaggtactagatcttaccagcctactaaggtgaacaatgccaaagtaatcactaccggaacaaaaatacttgcaacctgaaaattggacaagccagggtaagtttgtgtccctgttaatgactatatcacaaaggaacaagcaataacaccaatggatgacacgcttattgacatgtttatctaatatacttacataatccgcaaatttctgaataggagcttttgacatttgggcggtctcgaccaaactaataatctggctcagaactgcatcagatcccacctttgtagctttcatgtgaagagcaccatgcatattaatagtacccccgattactggtgaatcaacctcttttgatacaggaactgattcaccagtcaccatactttcattaacgtaacttgaaccccacaccacaacaccatctgcagggatctttgcaccgggatgaacttttaatgtatcaccaggctgaatcaataatgcatctatctccctttcccctacaagctttcctcctataaaaaggaagaaagaattggaactgaacttaaacaaagttgaatagttgagctttcgtttttgatagatttcaagcttattgataaacgatcctcattggaagcatttccgtataaccagcatttccatgtaaaaatcattcaaggataagacaagtaagtacctttgccttcagttagtaaaatcgctgttgctggcgtaagttgtactagtttcttcatagcatccgaggttttcccctttgcaagagactctaaatattttcccagtaagacaaaagttatcagcatggcgcttgcatcaaagtatgttggagaccaaaatccagtgactgctccatataaaagagccccaacagagtagaagtaagaagcagacgtgcccagagcgacgagcacatccatgttagttgaaccatttcgtagagctctccatgctgcaacatagaatcgcttgccgataacaaactgaataacacttaccaaggcccatttcaaccaatcacccatcatgaagggtccacatctccataccagtaaggcatcaaaaagagcaatgtgggggcagattacttggatgaagaagagaggaatctggaaaagaaaatcatttctgttaaatgacattagataacagattcaagacaaatgattgtatcataaatggtgagtgcattcaaataagttaagttactcacactaagaacaagactggagataaaacgccgaaacatatttgaggcctctccagtatctttcgaagacaacctttcataagggctcataacacgcaacttaaacttcccaaatccatcttcttcaatcccatcaaccaaagatctcgaactaacaacttccggatcaaacacaacctcaagctctccagatatcctgtcaagacgaaactgtctaaccccattcaatctagtaagtatcccttctaaaacctgagcatcaagctcattcaaaatcccatccacccttaaaacaagcttatcctgctgattactctgcacaagcgaaccttcaaacccagcatcttcaatcgcattaacaatatcatccttgttaataacatttggatcatactcaacttctcctaatgatgtagacaaagctaccactgctcttttcactccaggaagatctcttagaataccttcaacagagttaacacaagctgcacaagtcatacctccaattgtaaattgacccaccaaagtagcttgtgtctgttcttcagccaatatctcagcctcaaatccagcatcctctatagcttctttaatatcctcttcctaaaaacatacaacaataataaatgctccaaatcaaatcaattcctggagcaataaatttcaacaactactgtatatatatatatatataagatctcaaaaatccaaaatgatgaaaccttgactaaattagggtcgaagacgacatcggctcgattctgtaacaaagcaacagaggctttgaagacgccattaacgttcatcaaagctgcttcaacggaattagaacaagcagcacaagtcataccggtgactccgacctgaatcttccttaaaccggaaacatctcttccttcttcgattttagtcaaaatatcatcggcgttcgcttcgttgtgatacgaatcgagaagaccaacttcttccatatcactgatctgggaagaagaacctccggtgaccggagtaagctgtaaatcccgtctactcggcgccatttctttacgacaagcagacgggaaggttgagaaatcggagaagataaagaggaaggtatcttcttcgtcttcttcaacgatgatgatgatggtgatttgaaaatctcagagacctttcttttttcctttatgtaataacaatggaggaatttttgaagaaaaaaaaattttaaaaaaaaaaacaaaaagtaaaaacaaaactcaaaaatattattttcgtagagagatagaagaaggtggaagatagcaatttttcaactaaaacacgtatcagataatgacaattttacccttaatcactttgagtaaattatatttatgggcttttttgttgtgatcgtcattgtacacgactaaatcaaaagaaaaactgaatctatttatttattgattaggatctatttatccgagtattttatataggagctgaagtaaaaaaagaaaagcattttataggagaaatctattattactatgtacgtatgtaattaaaggaaatattaatagtacttgttcaagagttaacaaaaaatctggaaatattaatagagttttaaaatatctgaaaacatttaaaaaaaaaactgaaaatattaatagatttttaatgaaaaatctagagcactagagctttgatctatacttttttcattaaatattcttagaaacatgttaaatgacatttgttaatggttttttttacagcatttgttaatgattttgattggtcttgttgattttttaattattgcatacagttgttcaaaacgtgtatgttaaataattattgtttgaagtcgtcgtctactaattaatttgattccaaaattaaacaacctagtgtagtcatagacgaaggaaaaaaaatacgatagtagtagactagtagtaaatgtttatgggcacatggatctttgtgtttatataggaagttacagctgtactgttttttccacggtaattttactatggttcaatggatgtagcctagtctgatcccgaggagtggtagactcgtgagacctatttatatttttaaatagtagtagtagtcaaataaatgcacccattgtttataattaatttatacttaaacgttgaaaatgaggaaaaaaatgcaataatatatgtttgaaatctaatttcgataaattttctagtttttgatagcatgttgtaacttgtcagtaattttaaatcaaattataagaatcttttcaattataaatgacttttagaacaaatatatgatttgccaatattttactaattttttagtagcagattagtattattcaaattcaagatgatgttaaaaaaatattgtatcaaaatagtatcatttagatatctttaagaaaatccaatgatactatttttagtttgttgaaaaaaatgcatacaaaatttaccaattgaactatttttttacccaataaaaatgcatacaaaaaacattgaaaaattaatatgtatagtttatttctttactgactaatatagactactaaacatagtagtagactagagttggtaaaaaaaaacattgattggtaaaataattgcataaaacaattacaaaaaaaaaactaacaaagacaaaagtcaaaataaaaactatgatagaagttagtctaatagtactggaaacgagtataccatggcgtcaattaatctaatgtaccatgtgataacaagcaatgtgaagctaaataatataggcgttaatctaagaattctaattcttagctcttgccattagatattaattatattcttagattaatcaaatagtaattgtaacgaatgatatcatgcaatgtgaagctaataatatgtgcgttaatctaagaattctgatactagctattgccattggatattcttaaaaaaatatagctatggttttggttttggttttcttcattttatatctattgtatttccaaaatcgcatatctaatgagtttatctataactcttcttcttctttttttggtatgatataaactcggaactattacagagaaccaaattctgaaacattggaatagttagtttactttttctttcgttggaatgtgacttccactccacttatcaaaagctaatacaccaaatatactttctctctgtctgaatcattcattatgctttctacgaacaaataaaaaacaagaaaaacaaaggcaaagataacaatatgaaccttccacttaagaaagatcaagagataagctttgacctaaatgtattagactattagtctttttcctttctttttttctttgtttgttgtcaagacctaaaacgtagacttcaagtaatcttaaaaacaattcatggttccttaaaacataatttgtatagtacatatagctttcaaaagagtgacggtaaaatatatgtagtacatatagcttcccaatggagtaatcacaaattgtgtagtacatttaaaaataaaaaaaaataaaaaaaaaaacgaaaaaaaaaataacattagaaattgagtaaccaaagacatcaattatgcaatctttttaaaataattatataagattgtcatatttcgttttgtacacttttccttttttctgaaagcaaacctcacatatatagtttttgtacgttttcgtaggataatgaaataagaaaaagtaatctactaacaaaataattctttcttcttttttctttttttttctttttttcttttaagaattaacaagagattttttatacgccaaaaattacaaaacacgcatcaaaagctttgtttggtacatgaaccacctaccaaactaatattattcaattcaaattgcctttataatctcgtgtgcatctttcatatctaaaaattgagtttaatttacaaaaacatacaataatagtattaagtcaaatgtaaattaatgttatagtataatcatgtcaaagaaattaggtattaggtatatcgcatccaaaacctgaaaagcctttaaaagtgtccttgcctaggcaatagtagctaatgccttaaaagccaatcccattagttattccaaactcacatacaaattaattaaatatgaatgtagtgtatttgttaatttcttactctgtttatgctttacattaaattaaacgcaaaacaagagaaataaaagtcaacaagtcgttgaacatggtcaggggtaatcctgtagtttcatagaacctaagactaatgatgttttgttgaactaagataaacgtttagttgagctaacgagagttggttagtgttgtcagtagtttcttgagttggtactttttttgaccaattctcatccaaatcttcaccattattaataattttcttcaaccacactcaaaatagtggaatttcttgtcactaaagcattttaaaatgtcaggaggaaaggaaaccttctaaactattcagagtctttcaaacctctctttcatatcctccactttgttaaaattcaaagcactacagtctacaagtttagaactgaagtgaagactaataccagtcaaagccggttaagtgaaatttgctaaaccggaactgaatttccaacagcaagtattacaatctaaagtgactgacacaatccaaactgactagttagatcactaaaatagcttctttcattctcttacaaaagctttacaatcaaataaaagttaaccaaagatataaaaatggaagtctcaatacatatactgcttcttcaccgatctgtgtcatacctacaaaacttaatagcagtaaaagttttgattgcaaagacctaatgaataaaaaagcaacactggtaatttcaatgcagtttgatcgaagatttcagtcgtcactaagagaattaccagtcaccatcttcatggattcttcatcttcttcttgtgcctctgcttcttcttctgcattggtgttttgactttcagcctctatgggctcacactgcttgttcaatgcattttcagattcttgctcctcttgtttctcatctgaatgaagcggggttcgttcagactcaactttctcatcagtttctggatctaagtctccatcttgattaatagtttctggttcagagctttggctctctagcgagattgactttgttgtaccagtgattccctctagactaggccctggtgcttcagatggcgctgctgctatcacagaatcttcttcaggtggtggaattatgattgcttcagaggacagtggttctgtgctatttaggttgtgaggaggtaatttgggttgagaagaccctgaagtttcacccgccagagacggtggaggcaaaggaggagttgcagatgtttgtggattgccttgagagctgctttctacagcattgtggctgctactaccaatgtctgtagtcttttgactcgatgaatgcaatttacgtttccttttcttacgcagactgtgtcttggatctctgggagcaggaggtggcggctctggtatcacaaacggtggaatggttgtagagtcttcaccatataaaacgcggactgattgagctatagctgacacagttggaggtagagtgggtggttcaggtgacttcacggtaggaacagtcacaacattccgtaaccaatgaggtagcttgttctctgaagagctaattcccattatgtctctccccatgggattggagggattcaaccctcgatttgggtgaaggaaagatggattggctgatcttcccaagaatacgttgttgcttgaatcaagcatctgaggtaacggcatatctaaaaacaagggtagtttcccgcgcttaatagcatcccgtttttcctctgctctcagtgtgtttaaggaacttaaactatccaaacccaatgaacctaagttgcccattccaagagagttgagtggaaaaggcttctcgttgggaatatttgtcgatgtccctgctcgttcagatggtccagcagaaggctccccgggaagattgtcagtgcacagatttgccatgggaggaaaatgctcacttcgaaatcccaggtgatcagatggttcaaataacggaaggggagatgctagatcgccgaatccgagttttatgtctgtgagatgggattggaaccttggaggagtggcatatttaccatgtaaggcccgattcattattccttggggaagaccaggaaacaaggaagatttggtggacttatcagtcctgcttgatttagatggcagagatgaaagactatccaagaatttacgttgctcttcttcccacctagctgccaagtactctggtgttttaaatttcgaaaatttgagccttggatctctgagaattgtctcccagtttccatacccatgtctgcgaatcccaatccagagagaatctagttcatcctcggaccatgcatctactcttgttttctttttctgtacgtgcccaattccagagccagttcttagcattatattctccagcacctttcgatggttctctgggatagatgaaagagctgatggaaactgatccaaacccaaaggcggtaagtccttctcttgttggttgaagacaggtggatccataggagggattttcatattgggtagaaacggcattggtgttccgccaaataggtcttgcatagaatgaccagtaccttcaaatcttttcctcatcgaaagattggccattatgtcttgatgcgaagttcccattgttctcggctgaaatggaaatcgaggaagcagcttatcatcaaatggaaggttaagcaacggaaacttctcctggaaatcagcaaaagcagcaccagaacttcgaggacgctcaaaatcccctgacggaggaaactacaatgtcacaagattaaagcccatatataagtaatatgtttctgttttaatatgtgtatggaaagtagatgtgtctgatgaaattgcatttagaggagggtggggaatacctgacgatgtggaagccaaccatccatattactaagaggctgctgaaaaggttcttcctttatgttctgtggttttagtttacccataggaggttcctggtcatttgcttccctctcaaccaagttcgatgtttggggtagattgaagggaaaatggggtcctgttatgggtctgttctgtctactacctggacgagaataatttctccgggaggattctgactgagtaaaattaggagcacacagtccaaggactggcaggttgtttgggggtaaagatggcagacattctgcgccatgatgatgttggcttagaagatctggtttaggatctgaagaactggcttttcttttctgtgcatcacattgctggctagctttgctatcgtccaagtccattgatgtagggctttcttcgtcctgattagctacttcagttacctgatccacattgccgctaggaagagactcttcaacagaattccttctcgcaatcaggttcttttgcctctctcgcagtttggtactgttttgcagaacataaagatacagttattcaaattcttaatcaagaatgatgaggagctaaaggttttaattcaccagcaaattaatatgacaaaaattctatatcgtctatcgaaatatacacaaattgatattgctacagaatcttcttttgtcttctcatcaggaaagatcacaatctttaggctaagtaatatttatcttgaaagcagacgtgaatatatttgcaaaaggtacaaaagtttccaacttcactattatcaagctagtaaataatcgaacaatgaatagacttaggactaaaacttacaacttttcttttagggctcgccctgccggtgtatattccttcttaagttctggttctggttctttctcatcttcaccaccactctgcaataattataaattaggaatactggtaattgtcacgacaaaggtattcataaccacaaaaagatgcttttaggagtagagtaaaatggttacctcatttacaggtccactggtatgtggggcatatgcttccctatacgaaacagcctttctcaaacgcttccctctgccaagcgctgcttcttcctcgctctgatatttctcccatctacatatacagttgtccgtatgaaaattagctaacaagtaataagcagttgaaacaagaacatatgctgccaagaccaaagccaagacgctgaactcagagaaagagggaactccaacctcatacgcagaagcctgtcccattcattttcttcagtaaaattaacgacatcatcatctttcctctctgaactcggttcaccagtatcatcagtcaccagtgcaggtgattcagctccaacttgttcttcagctgtttcctcattccattccacaggctgtttataaagaaatatataaactatcaaaaggaggcaattcaactatgcagtttaagctgcctaggtatttaagggtcatttgagtaaatctagtgagacttgtctcactgttcctttgttaatcagctataagaaaaacttgcatctggaaaccttacagttagttgtgactagaaaacatgcatattaacatgtcatattagaaagaaaaacatatgaatatgatttcacaccttcacggagccgagcatatcattatccaactcagtatcagcggcatcagtggaggcagattgaagatttgaccgatcaagcaacttcataattgcaatatcatcccaaacaatcttcccatttccttctgtacatttgtcttgataaacatctccgaggccaccaccttttttcctactcttgctttctaaatccatgattacatctaagtttccattactttcagctgtatctttcttgttctcaccagcggagtcgttgaaaagttcttcagtaccccagcgtagaatatcttcaaattccttctgggatcccgacttgtttacaaaaagctgatcgagcatcaacttcttcttggccagctgcaaaatgcgctcttcaacgctggcacggacaacaagtctgtataccaaaagtcgtttggactgtccaattcgatgagctctattcatggcttggatatcagcgtgagggttgaaatcagagtcatagataataacagtatcagctgttgccagattgataccaagaccacaggcacgagttgataacagaaaaacgaaccgatttttgtcttggttgaaacgtgctatagctgcctgacgatcagctacagcaacagaaccatctaccctttcaaatgttttaggcccaaattctatgttcaggtagtcctccagaatgtctagaagctttgtcatctgtgaaaatatcagaactctatggccttccttatgtagcaccttaagcatagagtgcaacagagtcaacttggctgacgcttttattctcatatcgtgaagaaactccaatgacccagactctggctcagtacctggtatgagatatgggtgattgcaaacctttctcaactgcatcactatgttaagcattgattgttgcgctaccccttttccgatatttcgtagtatctgatagttcttagttagcattgcacgataatattccgcctggatcgatgtcaactcgacagggaccatcctctctgtctttggaggaatattctgcatcgcatcttttttaagccggcgaagcatatgaggagcaacaagtttcttcagttcttctactttctcagcacttgtcaaatcatggaacctctcctcaaaagaagacaaagaagggaatgaagatggttgcaagaagttgagcagattatacatctcaccaatgttattctgaagaggggtgccagtcaagagcacacggtgttgaaaagagaatgtgttgagcaagctaaacagcttactttctgaattctttagacgatgcccttcatcaaccacaagaacttcccatggaaccccacgtagatgagatgagtcagccagaaccatttcataagtagttaaaaggacattaaatttgtaggatgtcggcttcttggtcgtcccagtagaattcttagcatgccactcatagtctcgaattatggctcgtccctttgcacttccatgatactccacaacattaaggagtggagcccaaagagaaaactctgatagccagtttggcattgttgaaagtggaaccaggactaaacaaggtcttgcaactccaaattcaaaataaagggaggagaggaatgcactagcagacacagtttttccaagccccatctcatcagcaagtattacattttttgatttatgccagcatctacgcagccaattcaaagcctcaagctgatgggcaaacaaggcacctcctctgagctcttgaggttgttctgtgagggtaacgacttcacccctttcccttgtgggattacccttactattcctttccaatgttttctgctcatactgatgaaaaagatctattaaatgggatgaatgtttaagaataggctcctccaagctctcccacgtgcattcatcataagctaagcctgtccactttacgtaagcttcttggttaccttcttttgaaacccggagagcaactattcgctgaggctgtttccatttatcttcacagatgtttattacagctgttccgtactttgctttgtagttctctagttttcttttagctagacctttcagctccgcctcagaaatccaagtattatgaatattagatttatccacccatttaacaagaaactcatatgatacagtctcaccaataagatctgaagttttagcagcaacaggctcctcaatttcttcatcagccacagtgcttttttcccctgtttcctgatgtgcttcttcaagtaactccctctcaacagatacatgcgtttcactaactttcatatcttcatcatccacatgtctactcaatgtggcattggaaatgtcttcagaaagcatctcttctttcacctcaaccataccctcggtacctaaagcagaatcatccatatctttatccctcagtcgtgaatccctcgaacttttacctgtctcagaagaagaatctattctgtcctcagcaactactaattcagcattcgtatcttgtactaagctatcccgttggtcagtagcttgtaaattatccgaacacaagtcatctgaaagagcactacacagcgaggttttagtcagaccttggattcggcatcctaaaacacgatgaacctgttaggaaaccacaaacaaaagaatgaaaagagatattaacaagcatgagcaacacatgagtcaccagaaatgagggcgcatcataatagataattctgaaggaacaacatttttattttgatggatacctggaggtttccaaccggaagagagtttgtatcttccaaacaactagaagatttattagtggcacgtactgcacgacgttcctccttgggaagcttctgcattagtacgtataagtggttaagaacatatactaaatgaaagatgatgcaagaacaacaacgaataaaaaaagaaatcaataggaccatcaagaaatttcaactctaaattcctaaagaaaaaaaatcaaactatttccaagctcctgcagttaaaagaggtatccataattcatctgccgaaacagaggtatagtcacatgtatcataactacttgtgagaaaccactatactaataaacaggcaaaacaatattgagtttgtgaagagtcgcaaaatgataagcaaaacaaaatgtcactctggttatataagaacttaaaatagccacaatcttcaggacagaacaagaaacactacatgcaatattgaccaaagactctttacattaatgcagaagatactcaacattaaatacagagtgtcaaacaatcttgaaacgattctgaatcttgtaactctaccaaatctctgatctctgaattttttttcttttatatctttttagtgctacaacacacttaagaaaaaggcgtggatgcaacattttaaggtttcagacaattcatttccctagtatcagcatagtagaatgtctacaaaatctatcatgagtaggaaatcataccttcactttttctggtgtttctgtcttggactgaggtttggacaaggattttaaagtcacacgatttttctttttcttttttttcgaagactccggtgatttggtagtctgagaactggaacccactttggacaaacttttcttcgcgcgtttcttatcagtcttgcacctttcaagactttccccatcatttagttcacgcttccgttttttccttttaccttttccagtctccatttcagcaactgtcttgttctccacgatctcactggaagcatgttccaacttctccacgggtgcttcatgagttttctccgtatctgatagtttagattcggagagatcttcacaggacagcaacgttaatcctgcatcagatggtaaatctgcagtgggtatgacgggtttccccaaatcatcttctccatgagacgatgaatcaggtcggtcatccgcagatgcatgaccaagctcagcagttgaacagccatccatcggggaagaataaacttcctttcctgtggatttgctctcttcggccgatatagatttccctttctctgaagattgttctccagaaattatagaactgcaataaatctgagaagctctttcgcactttggtccggcttttgaatttcttttcttggtttttgttcttgctcgcttagcaatggcatctaaacgattgacaggcttgagtgcttcactgtttggggaacattttgggcagatccacttaccatttggaatccgctggaggagacgagataaggagtaagacaagtttcccaaatttaggtgttgcgaatctacgactacaaacgacacatggaaaaaaaaaaaatcatttaccttaagaggtggattgaggcatgcggtatgataggtccgaggacaactatcacaacacaataaatcaccaccaaggtcacagatcacacattcaaaataattctgtaaggaaagaaaaatgattaattaaacaacaccatataataaaataaggagacaaacttttaagaacaccagaaagataaaatgaagttaccccatcatttcctttcctcttagaggagttcctttcaggagtcgaatcagtcttaagccgctgcttacttggtttagaggaagaagtgtattccggggaatcaaaagccatagaactatccactttttggtctaatatatctagtatagacggaagttttcttcgtttctgcttcatgacccaatctcttttaatcatttcactgcctgaatctttcattttctacttctgtttccataccatatgcttgatagagaaccggatagaccttcatgtgtaaatcacagctaccgaagtaactaaagaatactggccttcaaaaaactctgtctctacactaaaattgtaaacaaaaaacgagtaatgtaaaccataatctaagatcaagagacactgaaacaacagtgaggtagttaaatacttaaattgtacacatgctcagaaatactgaacagaaaaattgataagattaaatgaagtataactcaaatcaatgatgcagcatcggacaaagcacagtgtaccaaaccataaggccataaccacaatttcattcacttttaaaccgatatgaaatcaaacagcgtcatccaagcatataagctatagaagctaagaaactaaatgatgtcacccctaaaaatggtggtataacgttagaagcctcaccatccgtaatcaaaagtcttaattaaagatgagacacaaacctagtaagtaatctaatcttaacacagcttttataataaacgattcgttccctcactccttacgaatacttccattaaattcatacttaattacattcctctactgcaaactacattcctctacttcaaaatcaggtgttctctaaggcaataatacactagttctaaaacatagatcaatgatcctatataactgaaataatcaacgacagatggtagaattcatgaatcactgagattcaagtaaagacagccattggtaatgaaactcaaacaaacataatttcacacacaaatcaatagagaaaagagctaaacaacacacattggcactaaacataaagcttcattggagataaacccaattcccccccaaagaaactcaattaaaccgaatcacactaaatcagtccttaattaaacagcattaacattacacaagcatcaaaacccctcaccaagtaagataaatcatcgaaattacataagcaaatacaaaaagaggaaatacccagaaaggagaaagcagcttacaaatctgggaatctgaaatcggaataaagttgttaaagagtcctccgataatcaaggacgagaaatccggcgacggaagttagggattgaagtcccggagaaaggggcttcttcttcttcttcttctagggcacggcctcacgagagagagatacgaagggaaagagagagagagaatgagagaaagagagaaggcgacacgcgaaacgataaataaattagagatagagagagagaaaggtcaagtctttgagagatgggtttgggttaaagggagagagagagagagagagatagcgaaaagaaaggcatatgattcggattcgccgggctcataggggaacggactctgacatggcacccaacaatcgcaccgcacgagacagaaccgggaacggagagtgacctctcttcctctcttttcactacacgtgtccccctctctctctctttatcaacaacccaacaacaaaggtcttgcctttttgctttcttcctccgtttcggttcggaccggacccttctctgctgttatgtctcgaaccatcatttgtgtcaagtgcgatccaatgagagaagagacaaaaatccgccatggatcttaatttcgaattttgtcttacttattagatcctttagtttctactttgatattatttttatgcttcttgtttttagctggttttagttaaattcgtttagatactactagacagagagctttttagttttatagaataaagttaaaaatttcaaatctatgtttttaaaacgccgccaccagagaaaatgattatcttttctttgacgttaataaccttaatttaatgttcttcagactgaataactctttttttttactgttattttatttacttaatatttatttaatgaaaaattgtaaagtggaccatcaggtatttgggccgaacttaggttacttgtgattgacattaggattatacatttgggacccatttgataggccttttgaaagtgattgctgtcataacatatattcattttatctgacacaaaatttaaagtgtttaaaaaaaaaaaaaacagatgtggttttgtaattgataacgcgtaattttaatggactttgtaacactacaactgaaatttgttcttctatggttagtgtccactaaaaataaggttgcataaatgttgggaaacaaatattgtgattgtgttattggatggatggttgtgtacttgtgttatttgttttttgcaaaccaagttgaacacatttgtttttgttttttttacaaagatgaatcgataagcaaggtgagatactatggtttacatttgtatctagaacacggttttattatatggtgttttactgtttttgttattcaaatgattgttttcttctttggtgatcttatagttataatactgtatctttgtaggttctttgataattgaacaacatattcatgaggaagatgaattaaatgtaaatattatatgtaaaacttaaaattcaagtgtttctttacattacatcaattatggaaaatgtgcctaatcgtacattcttttgggttgggtctagcagttgaaaactcctttcaaaggagcacaaattctcattttttttgggccaatggaccaagtactacttggtaaacattcaagtgttttttctattttgtcatgtgtggtagtaccatattcgagtttcgacttggttaacgttttttaaagaggcagtatgtgattataaacacactcaactctctataagttgaagaactagtcacagtccaacagattttctaaaatttatgtacaataaatttcaaaattttagggtacaaaatatctattatgtgttacataatttgtaaatgaatgacacatatcatatcattattgatgaatcactttgtttaaatcttgcctacttttaatccaatggagatatgataaacttatataacctacactcgaaagcatctgggcaaattggcaagccacctatgttgtgttgggcttctccggcagcccatctcatctaaatttaaaaaacttgtaacgaatctaggcccaaaccaaaattataactgaccaaaccaataactacttaaatctacaaatcgggtaaatgactacaaaatctacgttgatagaacttatgaaactacattgatcatttttcatattaccaaaatcaaaatcgtatcatttctttcttttttttaatgtaatgtcaaattatattcaaaagaaaaaatatatacgtttttacaacttgtgcttcggtaattgaaaataagatcaaaaactttgagaaatttcagaaaaagtttgaaacaaaaatcgtatcatttcacaacacaatttattcaatacattaacatttcaaaccaaaaacactaaaagtctagaagattattttagtactttctagcattcggctcggaaaacaaaaaatgacattaacaaacagagaaaattaaccatcaaaaaaaatatttgattagattagagagctaaagaatattccttgcacgaacaataaactcttcatttttaaatatacttttcatccaaatctcaacaaaacaaagaaagaaggaaatctcaatcttccaaacacttcataggaacactccacgtcgtgttctgcactggttctgacaaagacaggtactttctccaatcatcaaggacaagattcagatcatgaagcttcttgtccaaaccaatacaacaattagcatgcattgtgcaaaccaagtttatgtctctgctcgtttgacaaaacccaccaaagtaaactgtatcaaagaatctcatttggattccaatctctgagataaaaggctcatgcttgattctgttgaacacatcttgatcatgcaagtctggataatctagacgagatttgtgccaaaatttgtaaaactcaatgcttcgattgtttgatctcacgtatgtgaaaccaccattgacccaattgtctgaatcataaggatttccaaagaatctgtcacacgccatttggaagtctccatctggatataaccgaggaaatggatctctaagccacattatatctgcgtcctatattcaaacacacacaataattgtctatataatccctttagcttcgattgagaagaacattgcaaaatcgtggaacatatacaacaaaaatgttgaattcatcaatcaaacggaaaccaaaaaaatgacttatggtctaattagaaaaaatgtgggataaaataaaggtgacaaccaatgtcgaataaaatggcagaattgtaaaatgcaaaggtgaaatagcggaaacttttgctatatggtgcaaattctaattataaaaagttgaaatatctatataataataataataaatgtgttttggtggtttacaaaaacttttgatgtgtaatttttttttatactttacatgtttgcaagaaaaaacatctagcattttggcaaaaacattttaaaagaaaatgctaaaaatgacacgcatcaatggccaaaaaaaaagactgcaaaatcatattctcctaccatttcgaaagacattaattctgcattatttgaagaaaaattttagagggttaagagaattaagacaataccgtgaagatgaagttaaaacccatctcaagtacttgagtaagaaggtcgattctggcccacatcatcttaagataatcaggagtgttgtaaactttctcgccagagaaatcagtttctgatgtttcaatgtggtaacagttagtatgaagttgtgagcatcgttcaaacgccttgatatccaagcaaaccactactacatgtttcagaagttgttgtgttccttgtccaatacgaaaactctctaagaagagatcaaacaaagagtttggttctgcccaagcttgattcaatgtcgttataatcactgtattgttcttcgttgatgcgttctccaaaatctccttgaaactcaactttggttttgtctgcaacaacaacaaaattggactcaaaactacagattcaaaccctaaaataagacgagacagagtatgtataaagagtagaaaacagagtatgtatcagatctgaataatgatgagagctaaccgtttctggagaaatctctgatgagttgaggtttggtaatagtggagatggagaagcttggagagaggttagattgctgacattaagtcgttgcagaggataagctgttttgtataaaaccagacatgaagcggttaaaccaagaaacagtatcaaaattcttgttagttcttttcgcccgattataaatcctgaatccataaatttactgcgagaagaagaagaagaagaggatgaggaagacgaagaactcattattttgtttggaagtgttttttcttctctttagtcttcgttttttgtcggttcttataataacgtacatgagcaaggcaaaagtcatcattggtattcttgtaacagcaatgtgcaatattaatttattttttaaaaatgtgcaatgttttattattattttgtttatgatttttttaattaaaaagactgattccaaaaattaatacaagtggtcgaatcgtgcattgctattatattatgaatcttaaataatagctgatttttttcaataattttcgagtgaaatgaaatgattttcttatattacgtggatgaaaaataaaattttatattcaaaacgacactctcatatctttcaaaaattgcaagaattttaaaatatattttgcaattaagaaaaaactagaatgttatttattaaacaaaattagactaaaatcatgtatcaaacaataatatcagaacaaaatttcagattcatgtcaccagaaagttcataaagacggctttattagtataatagttataattaattattaatagaagactatacaataatttgactagaatcactagatcgatttagtccactacagtctaaacgcgtgggtgtttcctattagtagtacttattaataatttcataaacaaatgtttgtggctgccatgatagactttgtttatttctctcgtttcttatttttcaaaagatatataagtcaataagttgacaaaaatgtgaattgagtttttcgggtaaagatgtgatttactagttaatgtacaaaagagaccttaagcctaattttaaaatttaaaccataaaattaaaaaaaaaattaaaaaaggtttaaaccaaagtagaagagtttattggattctctccaatgtagacaaaagaaaaaatatgcgacgacctttcaacattactacatctgtaaaattattgaatttttaagctttgttgtggcattttagaggagatttggaatttagcggctgtcttttgtagtattgtggctatttctattgtattgtaagttttgatcaaaatccctttaaccaaagaaaaaaaaatttggtcaaagctaaccagggggatatgcgagtagctctacttcaatattgtttctttcaactacatattgtaaggaaatctcagagcaccattaccttagcaataaaatttaaattttggatttcgtaactttttatgatagtaagagattgatataatgatatgacatgccttcaattgatacatatttttgtaatatataaacaaaagtaaatatcaagatagtaatgagtgggggaaaatgggaaaatatcttggcattttgagtttcattttttttgggagatatattgtattttttaatccgacctattgaatttgaaacacacgcaaatcaatcactagacactaacatagtcacttagttaagtgactaacgtatgtaaaatactacttttgctttttcttctttcaaaacagctaattctatcagcattgccttacaccctttttatttttgctccaaatctcctttccaaactccacgaattttcgtaactgcgaagatcttctatactgaattgtccacgtaagatgttccagatcagagattggacaagaaattctcttgattttattgtatcttaatttaaagattttgatatcagtattcatatgagttaaaaagtatatattattaaataatatttagtgattttatataaagtagtgatttaattttaatatattatattttatcctaaaacaatttatagaaaattgttttgacatattatttattaatttttagtttttttttactgataaagatttggatatatgtgggtactttgatagttggacatatatccaaaactatgatatgtaaaagctatggatcatcatcttgatagttgaatttcagatccaaatctgaatatttcaggataaccacatccaaacacaaggtgtgctctctttttggagagaaaactttgtaatagatataaaagagaaatatatatcagaaaataaatggaaagacgactcaattttgttgtccaaacagagaaaatattttaccaccaataattcatgcctatttaagctcgataagcgatttgtatattgcaagtttactcaaatcattaaatataagtttataacattgttattagatatgtgtgtaatattggacttgcaaacgtatttctttaaaacaattcatgtgttgattgatcttatgttgtgattgggacctctatcatgcatattaattaaagagaaggagaaacaattaattgcaagttcttattgatttgcataaacaagaaacagcagatgtaagctaaagtaaagtaaatgaaaatcaaaccaaggttattcagattatctcattaattattagcatttctgagtatattgaaataatttaatatataaaattattttattcgatcatacatataaaacaaatgatcaaatattcttacaacattattaatatacaataatttctatttctcatattttctatgaaaatggatactaatcttcgaaacaaccattagcatcgttagtattgatagactttccatacacgttactgcattcaacaactggtttatttccatcgaccgtagcaatatcaattttatcaagaacaatgtctttgcaatatgtgacttcgctgcaatctatctttataatctcattgcgttgtgacgttccacgaatatctgtgaatgtcacattactaattgccactgctgattcctaaacacaaaatatacaaatttgtttgcaatctagttatgcttttgaaattttaatagaaagaatactaagatgatttacctccacgtctaggcgacccttatcgacataattttggtcgattataatcggatttttggattctctgaatgtaaggtctttaaaaagtatatttcttgcgtatccttttccattcttaaaaaaaaacaaaaaaaaataaatatcacttgaagaaaactataacaatattgtgacaagttatctagtttttaatatagaaaattgaattaaaaaatccttaccggccatgtcttaattctaactccattatctgtcctaaagaaagtacaattagttacttggacattctcaactatagattcttctccatctcttcctaggctccccacactgtaattatagagattaaaaagaacagatattgtatatagaatatcaaaaattagtatatgtacaatggtattgatcaatcacacacatatataccttattccatggccaggtccacaattcatccttgtaatattgatattcacacttccgttgtttatagctacacaatcatctcctggaatatttttaagaaaattaaaactcaaataactatcacaccatttcatattacttttaattaatgaatgtgcaagagagatatagctatataccagttccaataaatgtgtcgtatacatcgacatcacttgatcctgatatattaatcccatcagtgttaggactatcctcgggtgctacgagttttatcttcgttagttgaactcttttgcattcgctaattgatatatggtttcttggactgttgaatgaggttattccaattatcttgagatcgttgcatctttgaaaatgcaattgctataaggaaaatgaaaaaaaaaaagtattcatcatgaacattccaatataatgatgacgatcaatggaataagatatttttgtttgagaattgagaataatgttttgtgagaaaacgagaaactcacagtaggacgtttagaaggtgacattcttggctggatatattgaaaatgaaaagagaaaaatattagattcacattttgtatatatacaattaaaaattttctctcttttgtatataccaaaattttttctctcttttgtatataccaaaaattttcaccttccaaaaagacgagccacgtccatgaattgttcccgaaccattgactgttaaaccgattatttccttaaaactaacccatctaaataacttactctccgaccaagctgctttgttaataggtgcaacaatctttccgtcaaactgcataaatgaatacatatgtaccccttttatagtcagatatttgatcgcgtaaaattgtaaatgaatttataaaaaatatcgataaataccttaacttgtactgaaggagatttacaagggccttggaaagtaagaggttgtagtaagaatgtttggtttgaaggaataaggaatgtttttgaattcccaccactaccacacatagcgctccatgctttcacaaaagtctattattttataataataaaaaatcaaacatattagaattcttaacttaataactaaaattttgttacaacaattctgattacgttgtaggaaaataaataaaaaaactactgagatgtatgatatcatataataatatttttgttcaaaaacttacaatattcagatatttttatagagtaaaacaagataatattttccaacataataccttcgaatcatcggtaatgccgtttccttcggcaccaaatttaagcacatcatagatttggccatttacaagaacagaatggagtaaagtcaacaagaacacaacacgtagtatgatttcctacaacatacaaaatcaatgttagaaagaaagaaaacatacgaaattttagcaaaaatttatcaatttcattttcatatatatatgtaccattgggtgctgatgatcaaatgatcagatgtaatgtagtgtatttttttgtatttttttgtcgaaatgtaatgtagtgtatatgtatgtgattttgatcacttaaatatacacatacaaaatcataggtatatgtgttttaaacaggttcatggatatagttttaaactctacatattttgtgcctaaaatcattagttaatataatggatattattttgcatataagtgatattatctttcttattatatcagatttagaaatgaatcatagcatcttattatataaattaattatttatatttagagagaatagataaattgagataaacattagaacactaaatattgaaaaactgtgtgggttactatttagaatttaaatatcataaaaaataaaaacaagaagatggaatatgtagaattaatttttttgaggctcttatccattaagataaaatatatagaattaaaattcagtttgttgtcatgacgtaaataattaaattttactgcaaaatggaatggataagattaaaatttggtttaagaatatttagataaaatgaaaaaagtttggattactattagaattcaaatattataagaaattttttatttatttcttacgcccgcctatttaagtggattttatctagtcaaatagataaaatataattaaaaaatataagttaaaagagaaatgaaaattcttgagtaaggggaaataaataaaaaccattttggatcaaagacagaatcaaatttggatgcatattgtgatctcattgcattattaacttatatttaacaaatacgagtaataatatcatgtgtaactaaatagccaactacagtagaaactctataaattaataatgttgggaccatgcaattttattaatttatagtgatattaatttatcctataaattaatatttattaatttatcgtataagttaataaaaattaatttataggtatatttacgtaaatacaatactatatttttttaaaaatgttattaatttaattttctatatgttttgttgtttgcatatatacttatgttagatttttatttttctttgactttttaaatttatttttcggcaagatattgtgtctgtatatctacgacattaacgtgaacgtaaacatg

SEQ ID NO: 833 - DNA, 75709 bp, Arabidopsis thaliana
aagcttaatccaatttctctttacccaaatcttagcaatgctttctcaaataaaagattttacaaaatcaactatgacggatcaaatatgcaaatagttatgcgagtacaacaaagatcatactagttgtattttttttaaagttgtaattgtaacttgaacaaaaatttcatataaaaatgagtcttaaaatatatacttaagatctatgattattaatttataatattattgggactataattttacatagggatttcaaaaaaattattatcttattatcttatcgattttggttaatttttacattggcccgacttgggaccaacaaattttattaatttatcgtgtttattaatttatcgagtattaatttatagggtttctactgtaaatgtttttctgattattaggtagtgtcattatttttattaaccacacatatattaaaggtaactcgataattggtttcccaatttggagaagaagagtttacaaaattaacctcagaaaacaataaactagaaaaactagctaaacaatatgccgtggaattacctaaacgaaaaatataaatagaaaaaaagaaaaacagtaaatttgaaatatttagacagtaatttaaaataaaatatgatatcatgaatttattaataatgtatcgatgattataaaattgaaagattggtttgatatacgataaaagtttagaaattattcgaacaacacatccacggaaagaattgtatatataagggggtctggtccttatgcaactcccaaatactcattcttcacatggttagctatcaacaatcgtctttcaacagagatcgtattcaaacttatagtcatcttttcttctcatgtcgttactcagctgcagtttggcattctctcatgggttggttctttgccaatgtttactctattgattgggctctactaaacaattcaaactactatcggtacaactcttcagtatactaattggtatgtttttcaagcaactatatatcatgtctggaacaaaagaaatggacgaggtaatggagcagatgtaacctaaaagtaataattcatacaatttgattaaacacaagaagaaacaattcattgcaagttcttattgatttgcataaattagaaacaactgatgtaaactaaatgaaaatcaaaccaaggttattcaaatgatctcattaattattagcatttttgagtatatcgaataatctaatatttcaaaattattttatttgatcatgcgtaaaaataatttatcatattcttacataacattattagctatataaaattataactatttctcatattttctatgaaaatggatactatgttttgaaacaaccattggcctcgttagcattgatagactttccatatacgttactgcattcaacgattggcttatttccatcgaccgtagcaatatcgattttatcaagaacaatgtctttgcaatatgtgactttgctgcaatctatctttataatctcatcgagttttgatgttcctcggagatctgtaaatgtcacgttactgattgccactgctgattcctaaacaaaaaatatataaatttgtttgcaatctagttattcttttataattttaatatttttatttaatagaagaaaatatattaagatgatttacctccacgtctaggcgacccttatcaacataattttggtcgattattatcggatttttggtttctctaaatgtaagactcttaaaaagtatattttttgcgtatccctttccattctaaacaaaaataaataaaaataaatatcacttaaataaactatatcaatattgtcacaatagatccagctttagtattgaaaaactatttaaattttttattaccggccatgtcttaattctagctccattatccgtcctaatgaaagtgcaattagttacttggacattctcaactatagattcttctccatctcttcctacacttcccacactgtattttaattttatagataaagaagaaaatgtaatatatatatatatatagaatatataaaattagtatatgtacaatgctattgatgaatcacacacatatataccttattccatgaccaggtccacaattcatccttgcgatattgatattcatacttccgctgttaatagctacacaatcatctcctggaaagttttataagaaattttaaaattaaataatcttaaaataccatttgagattactttttaattagtgagtgtgcaagagagatatctagctatatataccagttccaataactgtgtcgtatatatcgacatcacttgattctgagatattaattccatcagtgttaggactatcgtggggtgctacgagttttatcttcgttattttaactcttttgcattcgctaatcgatatatggttttttggactgttgaatgaggttattccagttatcatgagatcgttgcatctttgaaaatgcaattgctgtaagaaaaattgaaagaaaaaaagaattcatcatgaactttccaaaatattgacgacgatcaatgtatataaataaataaaatattttcattttagaattcagaatgaattttagtgagaaaaagataaactcacggtaggccgtttagaagcaggcagtccttgctggatatattgaatatgaaaaaaagaggaaatattaaattaacacttttgtttatatataattaaaaatcatatcttttattgtgtatataaatttctttcaagattgccaaaaaataaaattgtttcaccttccaaaaagacgagccacgtccatgaattgttcccgaaccattgactgttaaaccgattatttccttaaaactaacccatctaaataacttatagtccgaccaagctgctttatttataggtgcaacaatctttccgtcaaactgcataaatgaatacatatacacctttattaatcagataatttgcacataaaattgtaaaaagatttataaaaatatcgataattaccttaacttgtacggaaggagatttacaagggccttggaaagtaagaggttgtagtaaaaatgttttgtttgatggaataatgaatgtttttgaattcccaccactaccacacatagcgctccatgctttcacaaaagcctatttattttatcaaaaaatcaaatgtattagaattcttaataactcaaattttgtgacaaaacgtatgactacgttgtaggaaaatgaaaaacctaataatagttatgtatactcaaaggctgtatgatattatattggtttgaatttttttttgaaaacttacaaaattcagatattttcataatataaaacaagataaaattttgcaatataatacctttgaatcatcggtaataccatttccatcggcaccaaattcaagcacatcatagatttggccgtttacaagaatagaatgcagtaaagtcaacaagaacacaccacgtagtatgatttcctacaacatacaaaatcaatgttagaaagaaagaaaacatactaacttttataaaaaactttactaacttcttatcattgtgtgatgatgatcagatgtaactcttaccattgtgtgatgatgatcagatgtaatgtagtgtatatgtatgtgatgttgatcacttaaatatacacatacaaaatcatgggtatatcttattaaaacatgttcatggatatagttttaaactttacatattttatgcctaaaatcattagttattatggatattatttcgcatataagtgatataatctctcttttatataagatttagaaataaataaaatagaatttgaagaaatagtaaacaaatacaagttaaaatagaaatgaaaatacttgaatataagggggtactaagtaaaaaacattttggaaaactcaaaaatagaattaaatttggatattgtgatctcattgcattattaacttatatttaacaaatacgagtaatattctgtgtaactacacagccattgacattgaaaactaaaatgcttttctaattatttggtagtgtgatttgcaatatatatagacagtaacttgaactaaaatctgatatgatgaacttattaatataatgtattaatcggtttgatgtacgataaaatgttttaaattatccactagtagggttgcatacatggtacattcaatataaccctttcaacgacaagaacaagcactaggtttctgattttaagctctaaactatgtgatttaatttatttgtttgaaaaaaataaagtgtgctagaatatgggatcatgatcatttccattctgaaaattaacgatgtacatttttttttaaaagatagtgtatattaattagtttgttatagttttgaccaaaaaattaaaataaaattatcagttagttaaatttaaaatccaatctgaaaaagatatatatgtaacaaaatttgtttttttaaaaaacactctctgcgtctggaaaaaaaaaaaaagattaaaaaccaataaagaaagtttcggaactaattagggcttccttttgcttacatgaaatataccgtcgcaagtcatctagcactctgcttcgtaagtttcgtcttatctgttctagagaaaaggtcttaccattccagaagaagtttatgaagacaagatcagtaaattgtccgacgacttgcttgtgcagattctattgcttgtctccacaaaagatgcagtggccaccacggttttgtcaaaacgctggcgtttcatatggacaatgatgcctagacttgagtacaaagatgataagaaaagcaaacagagtatttggttgtttcttgaccagtcactgcaactccacaaggcacctgtgctacacagcttgtgtatcaaacttggttcacaatgtcctgttgatgttgaagtcggcaaatgggttgcaaaggccgttgatcgctttgtgcgtaagctaaagtttaagcttctctggtccgcagatccaatcagcttacctaagagcctttacacatgtgaaacgctagtgaaactgaaaatctccgacaaggttctcacagattttccttcttctcccgcgtgcctcccatcccttaaaaagctcaacctaatcaatgtggtttataaagacgatgcttctctcattaggttcttatcaagctgctctgttattgagaaactacgagtggaacgagaagggaatgacaatatcaagaatttcaatgtgatagtgccttctttacatgacttaacgtatactgattacaatgatatttatagttatgtaggaaactcggtcaggttcttggttatagatactccggcagtgaagtacattcacctcactaattgttcaaaacagtattgcttgatcaagaacatgccttgtcttgatcgtgcatatataagtgttcatacgtacgctgatgacaagttgccaagatctctttcgtccgtcttgtttcttgagttggatttggctgatgaaatggtagctttctctatctcttgtgatcacattttttgaacctactaattatgttttttttttctatggcagcttttgcgttgtagcgctatcaacttctctcgacttacagagttaataatttgtccggatgaatcagactggttggaaccactcatgcttttacttggaaaatctccaaagctaaaaaaactttcggttgattatgtaggtatcttcctcctcttttagtaacaactaattaaaatcgcttcatatacatcccttgtttgtttccagggaccaaccgaaaaccccgaggatctcccactttcatggaacgaaccgagttcagttcctggttgcttgtcttctcatctcgagatctttgaatgggtggaaaaatatggaggaagagtagaagagttaggattcgtcacgtacatcctagctaactcgaagtgtttaaaaagagcaacaatctccctaaggtctgcattcaaccttgaacagaaacaaaaggtgatgaaggaattggattcaattcctagagtttccaagtcatctcagcttcttctcaaatgaaaaattgtattgtttctctttggtattaccattttgccacatacatcaagtctctacatttgagtttatatacttactgcaacttactactcttgaaagtgatttgagatgtctcatatatatgcacacatcaaatttcacatgatgattcaggaataggcgtacataagtttccaacaaaggctcttcagatgcctaatactaagtaatactacatgataaagaggatgtgctggctcctgcaataaaagacaaggatgttccaatatgattgttctgatcaattattaccttcacctctttccattcacctttcaaagtagcttgatacagaggaatacaaagattcaggtctttctctctttcaggggtttaaacttgacccggtagtgatgtgctcgctcctgcaatatccactctgagtctctcacagcttcttgagatttattccagctgtccagattgttcttcgttgtagattgagttaaagcacctgatcctgagctatagagaaaagatgggaagtttaagactcactggttaccttcaaggactgtctctggtgtggcataggcatagtctgcttcgcttctgatcttgcgaaagggatctatatcctccattgttgctaaataaacgataaagtcaaccaagaggggaaaaaaagcttgagagagtgctcgttacaaattgtgatatacaattcaatatgcaagacacaaaagttctgttgcaaaaaaccagaaaacatgtaacccacaatgcttgaatctccaatgcaattgctccttagaacaagttagctctcatgcgcacaatacaagactaatatgacaagtaatactgtaacggaaccaaacaattgtctaataaacaaatttatttcattaatcttccaattttgggaagaaaaaaacaacactatgaaattacaaaggaacagaacatctgcaatataagtctatcccccaaattaattcagattatgcaaaagctaatacaaacactatagaaaattacaaacattacaacttacaatgacaaaccgcaaaaaccgtttcttcttcatcatcatcatccaatccatttaacgattaaatatcaaagttctccatctgaatactgctctttaacggcacatagtcaccaagatatccaccaagatgatcgtgcaacgcagatttatcaatcggctgatgatgaaaactcttacaaacatagtaaaacacactctgcacaagcagcccaactagattcacaatcactagaatcccaaccaagaaaccaccaacaacaatcttcgtaaacaacccgaaatcatcacctccatgaaccacaacaccaccgaaaacaccagcagtgattccacaaagagcaagatacataaaaaccatcgaacacgccatattagttcttccattaagcaactcgtaactcttcttcatcgcggcgataccgtaaatcggttcaagaacagagactacactagctaaatgccaccaagcagtcatgtaaacatgaacacccaaaaacagaacgaaaatcacaaccatcgagaagacagcgagaatcacgctttgtaaatcgatagctacgatcaaaacaacgagaaacaacaagaagacagagttgtacacaagcatcattaaagaaacccaaaggaaggtaatgaacaaacgcttcaaaaccagaggaatcgctgacattgttgaagagaaagaaactggctttcccgtgtaaagcgaagcgacggtgaagacgacggcggctgttgagagaagagagaaggcgaagaggaagatgacgtagatgaattgataaatgagaagaagggtccattcgtgattggttttagattgatctgaaggaggagttgcatctagctgagctaagattggttgggtaaagagggaatgagcgaggattgcgaaggagagagggaaaattagggttagggttatgaggtagaaggtttttggggaaaatttggggattgttgtggattcacgtaatatgccttgaatgttgagaaattgaagctcttctgcagcgagatccatggctgagattagggtttgtagagagattggagaagaatgttaaagggggtgactttttttgaagatcggatggattttttttttctcagagatctcaacagggagagaaaaaagacaaggaagacggtcacttcatggttaaaaaagtttgttggaaaatgaactaaaaattctaaatttagcatcaaagacacgacgagaaagaaaagagacagggtcaaagattttgtttttttttttaaaaagaaatatagttcactaattaaatcatggttaattaccttcttatttgctaagaaaatttgagacagttaactaaaactcacttttcttcgtaagcattgtaggaattcggtactattcaaaaagagggaaaattccaaaacaaaaacacaattatttattaattagacgtttaatatgtaatactttatggttagaagaaaaatatgcatattaataaaaattgtgcaattttatcttcaaaaaactaattgatgttattttcatatcaataattttacaacaaaattttaattttaattttactcttactagttcaattaatcattaatatttaagtgatgcaacattaattttattttatttttaaatttactgtttattaatattttgtttctgtattcatcccaaaagattttgtttttctaaaatagattattttatttttaaaattcaagagaaaacaaattaaccatttttatgaatagataaattttgagaaatacaatgactttgggattgagattttgtcgaaaatacttttattggtgaagaatttaaattcaaatagagagtttctcacgacgaagaagaagttcatatcgatgttcgttgatatcatatccatcacaacgaaaaaaaatcgtgaacggctatcgaattcgatgttggaaaaagagggcaaaaggagattgtttaacggcgattcacatagcgattaatcgagaaaatctagaatcaaaaattgaatcctaagagaaaacgtctctttcattttctcctaattttttatgttgaattttaaaataaatgaatatataatagtaaatgaaattttaaaattaatgtacataaaattaatttctttatccaaaagtgtaaaattaatgccacgtcatcttaaaaactaataattaattgagatagtacgtgcataattatcatatttttttatgatatcgttattatgaaaataaccacatttaaatgtttaaatattaaactacacagtttattaatctttttcatccaaccaaaaactattagatattaaacgtccaaataaaaaatgagattttttcctttcaaaatatgtttacaaaattgggctttttttcttttgaattttgattttatacttctcaacctagcaaaaattcgatgtcggttataaaaataaatctctatcaaaaatttgttacgtagaggaatacgactaaaggaagagaagaaaatagggctatattaatttatatacccagaaaacataaaaataaaaaataaacttataattttttttataattagttctctttccacaacttctataagttggactaaaataccctttcgctcataataaactaattaacaacataagaaaattgttaccgacatcttttatatgattcagatgatattgtttatcaaatatataagtaagaatatattatgaattaactgataactgttatgttaacaagataacaaaatatatagcaataagtttataactatattgtgttaaaccatattgtatcgcgataagtttataaatatattatgttaaattatcttgtaccaataattttttgttgttcattatgttttgttatttgttaattattttaatatgatgtaattatattgatttgatatgatatacatattattttgatataaaatttaatacttatccattaaaataacgtgtgcataatcaaaatccggattattatgattaaatcctcttattattaaaagagaagtacaaattgaatttttgtctaatttgacctcaattttgatttcaattttggattttcttctttgctattcaaaatcattaagggtaatttggtcttaacaatctattaaactttatatgatccgattcaatctaaaccgttcaataaaattaattcccttcaatctaaaccgttcaacaaaaataagtaaataacaaaaaaaaatcccaattattatttagttatgtttgttttaaaaatttttatttataagtttaagatatcaaatttattcaaatatttagtataaaaaccaaataaaccgattgtccgcggtaaaccgcgggttaaatcctagtagatagttaaaatgtatagcaaaatagaatgcgtaagattaaaattttagtttttagaaatttactaaacaaaatacagaaaaggtgtgttgacaactatttaaaatttaaatataatcaataagatatagttaaagttattaagtgtatagcaaaataaaaattgtaagaataaaattggatttaaaatttttttagtaaattaaatattttaaaaatagggattatcatttactgtttagaattcaaatatcatcgataaaaatttatactattgttttataaatccgcttatctagacgggcctaacctagtaaatatataatacacatcttatcattcggtcaaaatattatgaaaacatcattaaaatttgatgattacattccataagtaatttgttaaagcattatgcattttcctgttctatggacattaatttgaaccatacgactccatctaattcacttgttctcggcagctagcattcgaatcctgacttttcaaatacaaattatcggtcaagatgggtgtgcgttacgttcatttacaaatcactaaaaatgagtggtgaataatcatttggacaatacggatacattcatcgaagttgactccattatcctaccgtcgtctcctaacaatcgaagcacaactttgcaatggcagcatcttccgaaatactcccggagtcgtggcaagtgttcatcaatttccgaggagcagatttgcgcaacggtttcatcagccatctggcgggagctttgacctcagctggaatcacatactacatcgacacggaagaagtcccgagcgaagatctcactgtccttttcaagaggatagaggaatcggaaatcgcactgtccatcttctcgagcaattatgctgagtcaaaatggtgtttggacgagctcgtgaagatcatggaacaagtaaagaaaggaaagctcagaatcatgcccgtcttcttcaacgtgaagccagaggaggtgagagagcagaacggagagttcggacttaagctttacggagaaggtaaaagcaaacgacccaacatacctaattgggagaacgctttgcggtctgtcccaagcaagataggcttgaatttggcgaattttaggtagataaattgttcttattttgacccgtttcttatcgtagtgaatttcattgatttctttttttcctcattttcgtgtttgcagaaacgagaaggaactccttgacaagatcattgactccatcaaaaaagtacttgcccgaattacacgagcaagcagagtagcagaatctctaaacgggatctcaaaagactcagaggcaaagaatgtagacacattttcgccaaactccagtgattttccatctacttccattgacgacgacctcagtatcaactcgcctcagtaccaagccacaattccccccgcaagcagggaaggtgaacgtctcaacacgatctctactgtaagttcaactggtagtattgaacatcctccacccaactacggaatagaaccacgccttaaggagatggaagaaaagttagattttgatagcctcgaaactaaaactgttggaattgttgggatgcctgggattggtaaaaccactcttgcagaaacgttgtatagaaagtgggaacacaagtttgagaggagtatgtttttcccagatgccagtaagatggcgaatgaacacggaatgtgttggctgcagaagagattattggaagagctgttgaaggatactaatctcaacataggatatacaacgaatgaacatgagttttgtaaggatgttcttctcctaaagaaagtttttcttgtcatagataatgttagtagcgaggaacagatcgaaactctttttggtaaatggaattggattaaaaatggaagcaagattgttattacgtcaagtgatgagtcaatgctcaagggtttcgttaaagatacttatgtagtcccaagtttgaacagcagagacagtctactgtggtttactaatcatgcatttggtttggatgatgcccagggaaacttggtaaagttgtccaaacactttctgaattatgccaaaggcaacccactagccctcggagcttttggtgtagaactttgtgggaaagacaaggctgattgggaaaagagaataaaaacattgacactaatttccaataagatgatccaagatgtcttgagaagaaggtatgatgaactcacagagaggcagaaagatatttttcttgacgtcgcatgtttcttcaaatcagagaatgaaagttatgtacgacacgtggtgaattcatgtgattctgagtctactaagagttgggatgaaataacagatctcaaaggaaagtttcttgtcaatatttctggtggtcgagttgagatgcatgatatactatgcacattcgccaaggaacttgcttcacaagcattgactgaagatacaagggttcatctcaggctgtggaactatcaagatatcatgtggtttctcaacaatgaattggtgagattatttgaacatattagaacctctaacgtgtgttagttgtattatattttcatttttcaattgctaactattttgtttctgcggtttgcttacgttttatcattaattattggttgtaggaaatggaaaatgtcagaggtattttcttagacatgtctaaagttccggaggaaatgacatttgatggtaacatctttagcaatatgtgcaatcttcgatatctcaaaatatacagttctgtttgccataaggaaggcgaaggtatcttcaaatttgacacagttagggaaattcagttaccattagacaaggtacgctatctccactggatgaaatatccatgggagaaacttccatcagacttcaacccggagaatctcgttgatcttgaactgccttatagctccattaagaaagtttgggagggtgttaaggtgtgtctcactgtacgatccacaattcttatatgaagcattcatcaaattcagtgttaaattctttgtcttcttcttctttacaggataccccgatactaaagtgggccaatctaagctattcaagtaagttgactaaccttttagggttgtcaaatgctaaaaatcttgaaagattgaatcttgaaggttgcacaagtttgcttaaactgccccaagagatggagaacatgaaaagtcttgtcttcctgaacatgagacgttgcactagtctcacatgtcttcaaagtattaaagtgagctctctgaaaattctcatactcagtgactgctcaaaacttgaggaatttgaggtgatttcggaaaatctggaagaattatatttagatggaactgcaataaagggacttcctccagcggccggggatctgacgagacttgtcgtcttaaatatggaaggctgtacagaactggagagtcttcccaaacgtcttggaaaacagaaagctcttcaagaactggtactctctggatgttcaaagctcgagagcgttccaacggacgtaaaagacatgaaacatctacggctcttattgcttgacggcacaagaatcagaaagatcccgaagataaagtcgctaaagtgtttgtgcttaagtagaaatattgcaatggtcaatctacaagataatctcaaagatttctctaatctgaaatgtcttgtcatgaagaactgcgagaatctcagatatcttccttcgcttccaaaatgtcttgagtacctaaacgtatatggttgtgaaagactagaatcagttgagaatccactggttgctgataggttaacgttattccttgatagatctgaggaattacgttccactttcttgttcactaattgccacaatctgtttcaagatgcaaaggactcaatctcaacctacgcgaaatggaaatgccaccgacttgcagttgaatgctacgaacaggtctctctctctctctctctctctctctctctctctctctctctctctctctctctctctctctctctctctctctctctctctctctctctatatatatatacatatttttgttcattgctgttgttttgtaggacatagtttctggagcttttttcaacacttgctatcctggatatatagtcccttcgtggttcgatcaccaagcagttggatcagtcttagagccaaggctggaaccacattggtataacactatgctttctgggatagctctatgtgcagttgtatcattccatgagaaccaagatccgatcatcggcagtttctcagtaaaatgcacattgcaatttgaaaacgaagatgggtctcttcgctttgattgtgatatcggatgtttgaacgaaccaggaatgattgaggcagaccatgtttttatcggctatgtcacttgctcacgtttgaaagatcaccactctatacctattcatcaccctacaactgtaaaaatgcagttccacttgactgatgcttgtaaaagtaaagtggtggattgtgggttccgtttgatgtacacccagagccgtggctgtttgttagaggaagaagtcaacgccaacttcactaaattatacttgggtttattgtaaaagtaggcagtttttagaaaattatttgagaactagacagtttttttggaaatatgctgagagagtactttttattgggcttgtctaataggattcatgtgagatagaaaaaagtagcaaaaatccaaaagaggtgtcaaatacaatagtagccttgtgttttaaaaacacacattccggctgggttcgacgaaacaaattggattgggttttaaaactcattttaggcccgttaactccaattcgtattaagtgagcccaaatatttgagcccgatagtttcattacgttttttatccaaataacttctgagcccgtgtttattctgagattgagttactttactcttcttggtttttcacgaaccctagccacagtcggtgtacaacaaatcgagggtgaacgagttcgagaagagagacgtttgagagaaacccagtacaccaaatgggtacactataatagtacaccaagtgagaacactagaacagtacaccactagtacactagactagtacactagccaagatagaatataatagtagactagaatagtacaccaaatgggtacaccaattagtaaccaagtgaattaaaaacagtacaccactttggtgcactagactagtctactattatactaaaaacatttaggaaatgcaatggaattaaaaactataccctaaaactatacactaaaagacattattgaaatgtagtgaaattcaaaactatacactaaaagtcaaagagagaagactaaacccaaggaaaaccatatatcatatggaatgaagtttaaaactataccctaaagccttagattactagaatttagaattccaagtaaataaataaagggttaatttactgaatgaccaaatttgacatccttattaagagaatgaccttctcccagaaaagttgggtatataacgtttttttaccatgcgaaatatccgatatagcctctacggatgggcggcaaaaccatattcccgacagcagacttgtagatgtaggggagctagagattgtagggcaatgattacaacgtatcaaaaaaaaaaagcatgcattacttatgcagttactactaaataaagcatgaactatttatgagtgtagatctcaatttagagctttcattactacaactttctaagtttgtactgaacgtttcataaaatacatgcaatttacaactgcagcagcatgtactatgaaaggatttatttcattttttttttaaaaaaataatcattaaaaaacaaaaaaattagtattgaaatggagtatataccacgatattgggctggtaactttttcgggtgagtattgtactggattgattattcaacaaggtgaatgggcttttaccttgaatctatgaccagcagaagtactacgatttggtaaacagcacaagtactacggaaacaacatgtgatgttttaaaatcacaataatcatatcggagcaacttggaaagaaaacataagagaaaattattagaaaaattcccggatgtgacaataaaaagcgcgagcaaagagagatggagatacgtatcagacgcatttaatgcggcgtcagaggatatacagcttccaacgtaatatattgttgtatgtgtaaacccttttctttagtgtagcactttttaacacaaggtttgtgtgcttatgctatacgctacaaaatggcaggtcgataagttgacacgttggtcaatgacgtcaagattacgaataggcaagtgggggcagaagatatactgaatctatacctcggttcacggaaatgtgtaaagcaaagactaagtaaatcacatggttattttgacgataacatgcaatacaaataaagaacacttaacacttcgatttgacattggttaattgtgtaaagcaaggtttgtgtgcttatgctatacgctacagaatggcaggtcgttaagttgacacgttggtcaatgacgtcaagattacgaataggcaagtgggggcagaagatatactacctcggttcacgaaaatgtgtaaagcaaagactaagtaaatcacctggttattttgacgataacatgcaatacaaataaagaacacttaacacttcgatttgacattggttaattgtgtaaagcaaggtttgtgtgcttatgctatacgctacagaatggcaggtcgttaagttgacacgttggtcaatgacgtcaagattacgaataggcaagtgggggcagaagatatactacctcggttcacgaaaatgtgtaaagcaaagactaagtaaatcacctggttattttgacgataacatgcaatacaaataaagaacgcttaccacttcgatttgacattcgtgaattgtcgcttcacgcctccctcgggtgttgggagggaaatcataccgttttgaaattcgcgtggctgcaaatggttaagcaactgttactagaaatatctttagttactgtagccctaaaaaacaaagttaaccttttctataaaagaagaaagatggcaagatatcatctctcacacctctacttcttcctataaagcacacactacgtatccaacaacatcgaagaactcgatcatttctgttttggtatgcaattaatgaatgttcttttggtcgggtttgttgctatttttaaaaaactcatggttgatttatctctatttaatgcaactctattaatgtgtaggtaccgatggtggttataaccgaaataaccgacgatcgttatgtcaggacggtgagtggctcctgggcaatcggagctgatggaacatggttattcatatccaatcacaataatgcagtgaggaggttgagcattggggaaggggagaagttagcatctgtgcgccagcttgttagagaagcgtacggacaggaatacgttgaaggcccactacacctgacttaccaatggcctgattggatggacatggaaactacctttggtgggcgcacgaagccagtaagcataacttcagaggagacaatgggagtgtttctagctatgcgttttgagttggaggacttgagtttgtttgtctccaagcaaacggtggatgatggttccgaagatggtggaacaagtcagacttcaagttacggatttgcagataaaggcaaatcacctttatacgtcaacgctgaacgatcacctaactacgagtccgttgtgtggaaaaggcttatggatgacgaggcggtcctccgctggatgcgttcaacggaaacagaaggtcaaaacgttggagactcttctaccaacgtacaacaacaccctgtgagaccagctgttgaggcagcttccccgatgttaacgactgaaagtatggacacagcgactgaagatggagatcaggtaaaatattctgcgtttattaaattcagccactcgaatataccattacagtactaagacatctatttacgcaggaagaagactcaactgttgttgaggcagatttacttaaaaatctggggttaccgtcaattaatttagccactgaatcttacgactctctcagtgaaggggaagcgtacaacgacgaaaacgactatcccgggggcgagacaattaaggagtgcaatttttttgggccttccgcaactaacttggtggaacctctaggtgtacacttggatctcgcggtacctctgcatgaggctcttgaagacatgtgccttaacttcgcatctttcaacagggatgcagcgccaaccctagacgaacaaggggaagaaggtaccaattacatagcatgttgtttttaagaacaacacatattgcaagagtgttctaataataaccgtcatatagagtaacatgttattcgtataaataccatgcaataaaaatttaatttcgctgaattcctgattagtcgtacgaatacaatcttaatatccacatcatatttgtttagtttaaataacaaattgtatttaatatcatgtaatataatgatatgcttacaaaccaacacatggtttcaatttacgttgatatccctgagatatccctaatcaaaatatagagtaacatgctttaatattgaacatcatgggatatagatattatgttggtcaaagtgttactatttagtcatacaaatacatgctttctacattcacaacatgtgtacagtgtaaataacacacgaactttattgttgtgtaggccgcgtcggaatggaattagcaattcgggatgtggtctacgaaggtgatgaactgtttgttggccgggtattcaaaaataaacaggattgcaatgtcaaattagcagttcacgcacttaatagacggttccatttccgtcgtgatcgttcctgcaagaaactaatgactttaacctgcatttctgaaacatgcccttggcgtgtatacatcgtcaagctggaggattctgacaattaccaaattcgaagtgctaatctcgagcacacttgcactgtagaagaaaggagtaattaccacagagcagcaacaacgcgggtcataggcagcataattcagtctaaatatgcgggcaacagtcgggggccaagggctattgaccttcaacgcatcctattgaccgattactcagttagaatttcctattggaaggcatggaaatcaagagaaattgcgatggatagtgcacaaggatcagctgcgaatagtttcactctgttgccagcctacctacatgtgctgcgcgaggctaatccaggttcaattgttgatctaaagacagaggttgatggaaagggtaatcaccggtttaagtacatgttcttagcattcgccgcatcgattcaaggtttctcttgcatgaaacgagtcattgttattgacggtgcccacctgaaaggcaaatacggtggatgcctcctaaccgccagcggccaagacgctaatttccaggtttttcccatagcgtttggcgtggtcgatagcgaaaacgatgacgcatgggaatggtttttccgtgttttgagcaccgctataccggatggagataacctgaccttcgtctcagacagacattcctccatttataccggtcttcgaagggtaatccttaaaattgataattttaaatgttacatgttatatacagcatatggctcttatttattttagaacacatgctatctaccaatatgccctgctatatacgtataacacatgttaacatgcaggtctacccaaaggctaagcacggggcatgtattgttcatctgcaacgaaacatagcgacctcatataagaagaaacacttgctgttccacgtgtcaagagctgcgagggctttccggatctgtgaatttcatacatatttcaatgaggtgataagactagatccggcttgcgcacgatacttggaatctgttggtttttgccattggacacgcgcttatttccttggggaaagatacaacgtcatgactagcaatgtggcggagtctttgaacgcagtcttgaaagaagcccgtgaactaccaatcatttccttgttagagttcattcggaccacattaatttcctggtttgctatgaggcgtgaggcagctagaaccgaagcatcgcctctaccaccaaagatgagagaagttgttcatcgtaactttgaaaaatcagtccgatttgcggttcatcgccttgacaggtacgattacgagataagggaggaaggcgcaagtgtctaccacgtgaagcttatggaacgcacatgctcctgtagagcatttgatttgcttcacttgccttgcccccacgcaatagcggctgcagtggctgaaggcgttccaatacaaggactgatggcgccggaatattctgttgaaagctggagaatgtcttacctaggtaccataaaacctgtacccgaggttggtgacgttttcgctttacctgaaccaatagcctctctccgcctcttcccgccagccacgcgccgtccatcgggacggccgaaaaagaaaagaattacttcaaggggggaattcacggtaaacgttatacatttggaatttactgtaacacccttagtgttttaaattcctaacaattgctcaatcttcatctcagtgtccccagcgacaagtaacacgttgttctcgttgcacaggcgccggccataatcgcgccacgtgcaaaatgcccatataaaggtacaatgttattttataccgtatcatgctatagatagaaacaacgttcatacaatttttataatatcatctgcagggggtgttgtgtctcgcgtcttcttcatgagttatatgttgtgttatataagcaaggggaagtccatcacatatggatattatgtaaaaggaagggtcacttggtataatgtacatattagcaattagatgtggcaattagggtggcaactaaaagctacgttgagaatgcaatcaagggaccccaattccagtaagtgccgtatagaagaccaccttctacggacaaaggataatgttctgttttttggcttttgtgtagaaaaaaactttatgttcccccttttgtaaacagactcatgatattaagtaaagacgcgagtgtttaattattaatacgtggtgtaatgtaaaattcagatccacagacaaggggttaaatgaggaaatatatgaaacaaatataacgaatagatatagcaccattactggcaaattaaagtccataaaaatgttcagccatcatgaactgacattttatgtcaaggattccaacaagatgaaatcattccaaccataaatcaaaataagatgctattcgagaaaaccacatgtgatgtttagcaattgcgtgaggtaaaaccgggcaccgagagttgaacagttccacataggattccttatgccacttcgactattttctcagaacccaataagtgcttctgcaccacacatttcaccccccaactacgccacataaatgagtgaatatatacactaacaatattggactatatatacatattggctatcaacatctccgtcaataataaaacgtccttcggcctacttacacatgcttgcaagggtagaaatgagacagtatcgtcagaatccagtactcatgcgggtgggtgggctgttcagaaaacaatttgacgacgcattggaggcaaataacccggaagcacattatcttgaagggctaaggtatgcttgttgggagaaagatttagtcatggcaaaaaaacacatttttaaagctgtaaacaaggtagatgaggcgctgtttgttatggctatgttgtctatttgtggtggtgagaaggagctaggtgaatttttcactgaacaactgtttgccctaccttgggccgaagtattagctatgggtgattctttattttcagctcttgaacgaatggctgtgcgccatggtacagcttacaagcttacatggaatggggcccatcctccatgtgtatcaatccacaacatatataatagatgcgaagagtgctacattttcttttgttcaaaagaattctgtcggcgatgttagatggtacaagctgcacccaacgtggaaatctcgtaaccagaagggaagcatcctttaaaataatatgctgttattttatattaacccgcgtagcatctataaatcacattctgtttgtaaaaagtacatgttttatgtctaatgtgttagtcgttatgataatggtgtcaaataacgatattacattaaaatggcgtgatatgtacctatattacatgttttatattgactttttgatcatgttaatctgtctaaggtgtataatccaaaatatttttaaacgggtcattattattgcaaagtttacaaccgggtaagtcctaaatatcaactaagccacagttagaatgcatctatatttaaacgaatcatgaggtaaatataaaacgcacggtacatattagaattgcagtgacatatgtttactacacaaaacaggtgcatagaaagaacattaggtactcaactgttaggtgtctaatatattacagagtcaggtaatagaaggtaaacacactagaacatttgggtcagacaatcccattagctaattcaaaaccggcaatgaaatatttgttagcagcagtcaccacatcagcatgcttcacttctttgcaagcctgaatcccaccattggcatgggcttcaattaaacgagctgccatgactccagaatattttacagaatctgcctgtggaatatcattttctctgtgaaccgcaagagatttcaaacgaagtttcttttccccagccattttaatagcaaatcgaaatagatatggtaacatttcagcaaggggcaaaagcactttcttcaattttgtttcacgccataatcctgtatagcagtcgaggacgctaatgatccttgcactcatatcaacacaaagccctacccaatgctgtaaatcaatgagaaatggaatgtagaccacagcagaacctgtaggggtacattcaagtaggtcgtgatcaaacccatacattcccttatcagcagacttgacgaattttgggtaatgcttggataattcaaccacaaatgttgaatcaatgaatgaaacggcttggtgcttttcaatgatattatttgcacaccagttaatccttatgctattaatgaagatgtccataacctgtaaatagagtagaacgcatattaggtgtttaaggcaaaccctatgtttatagagcactatgtaatcttttttacccacatgatatttatcataccattttgggtacaacggtcttgaactcaacaatctcacgcaactcaatggcggaaagtgttcgacaagccccaaaatcaatgtccctaataacagccatatgcataagttttaagtaatatgagtcaaacaaaataaaatagcataaggttggaattaatacccagacatgccatataagcgatttatcttgttcttacggctaacatcatgcccaaaagtaacagacctaccgcttgtggaagaggctattacggattcatgttggagctgtgagcaacgtaaacgtgattagaaaatcagatgttatcttaataatcaggaaattagagtttgcataatcctaaacattctgtgttaaacttaatggcatgtaatttgttctaaaaccttgatgtttgtacgggcaaaacacttacaatatgacaaaactttttaaatatttttttgttatattaggtaaaaccctgaaccatgctgaaaatacatgatgtatcgcaaaatataaccgtgtgcatattaaaccagtgttttgtttttaaaaaccatgaataagtaaacttgacctaccacaaaactacgaaatccatatttaacaatatcttaaccattcatgcacccaaactagacctaacacaaaactatgaaatccatatttaacactagctaaacgcatttatgcaaccttgccatcagggtccacaatatcatttgttggggctggcagggacggttcagatatcatcggcatttggcttaaattggcctaaaataagaaacagttgcatgtaattagtttgttagtggtaacgagagtaaaaaataatgaattatatgatctaacattatcggctgtagcaggtgggtcagcaagtccttctccatctttatctgaagcaccgtcatcaaccattggcccgggggttgacttacattgggcagtcaaatcagactctatctgcaaggcaaacaacagacgttagagccaatacacggaaaaaaaaaaacataaaaactatatgagaaggtttgaactcactatgcatgggatggtgtactgcaactctggctgacctacattgtatgcaacaccatccatgtcaacaagcaccacatatggatcagggaggctgggctcagattcaaagaactcattgacgtctgtgggaggaggaagcaaacactgagtatgactcgctgcagctggaataggtttatcagggctagtttggatatcatcaaggccctctccacctatcccatcaccgggggcatcaaccaagatattatcttgatgggatacagttttatcaccagaaacagacttttccgcaaacatatcgtctaattctttagccggcagagtggaagagccaatgtcatgaatcccatctctagctgactcatcctcagtggtatcagtcaccacccctccaactttgttgatattgacagcttcaggggatacatgtttatcagcagaaacagacttttcagctgaactgttgtctactgctggcgtcaggatggtggctgctgttgggccattgttgcctctcttccgtttctgtttgttatgaaaacaatacttgaattaggaagaactctcataaaatacagaatatttacaaaactgttaaacgtataccagagaactacgcaatccaggcctagtcggtggggataagcgacctatgggggttgtagtctgtgtaggttctgcgtcgttaatatcatgcatcacttcacctaagacttgatcaataaatccagaaccactgttctccttcgactgggctaccctgccattatccaaaacaacaagggaggatcccttcttcccacctaatccctcacccacatctcttgacttaggaccactgtgacgcttattcttcctgccatggctttccctcaacaagctgctcaatctagcctctgaatcagctatagccttcaacatacgcgactccatacgcttgtctttcatgtcaatgtaatttttaatcgaatctggtatgtgaacctgccctttagttttacggggtttagaagagccaggcaaggaagcatcaggttgtatggtatcctcatcaacacaatcataagtgctacatacatcactgttgtcattcctttcatcgggtagcgaatcagggacaacaccacctgaaaacatggaccccttgaatatgtgctcctcttttattagttgcaacatgtagtcaacagatagatcttcttcgtcctcgacccaacctgacttgaaagcgtcaccagtcggtgttccactccaaatagaaacgactttaatctgaaaaacaaagagttagactttagccacatgatattatgttttattacatgtactaaaagtatttatactgttactaacagtgaaatatagattatgtacccatgtgctccttaaaaacaacatgttatttcatcatataaccagatgttgtaatgcataccgccatacgtgacttactaaggtaacagggtatggttattaaaaagaactgtgatcatatttaaaaccatgcagtttttgcataaatcatgatataaataataaatagtaaatcagcacatattaaaaaaaaacttaaccacatgctacacatttacagccatgttatgattattctaaagaaactgtgatcagatttaaaaccatacaatttatacagaaatcatgatataaataacaaatagtaaatcaacacatattaaaaacctaagccacatgctacacgtttacacagaatgatatgaatctataattgtatgtttttgataggaaaagaagaggttttcatgataaaaacgagcatatgaaaattaatttacgagagcagagatgcattgctcacctgagactgccggtcgactttccaaacaagatccaacttcaaactccataagcgctcaatttccgtatctgtttcctccatttctgagtcactatcttcaacggcttcagggaattgcaattctctgattcgaggaacactttgcagtagcaaaagttggagtgcgtgtgggaaaccttgaacggtgatagatttccgcataagtttatcagctccccttgcagtaacactcttcaacgtcattaggaatgacatagtcccccaaggaaaatttagaaacatgtctaaattttctgccatgtccgcatggaccggagagattttacttctacccgaggttgggcataaaacgccatcaatcaaggccagcacagcgtaacgtaaacgaattccttgatcttgaaccactcgcttcttcagcctgccaacaacccactcaacagatacatcactgcggtcaaataggctgtaccaatacttgccaggcgccaattttcgtttccctttcctctctttcatacgaggcggtttgtcgcagttcaaaccggtaacattttgaaactcagaaatggaaaaccgaacaggggatccagagaaaattacccaaatttcttgtttcttcctaacaacaagctgcctcgttagcaaaaagtgaataagcttcccagaatacgcggcgctttcggagaaatcaaataatttcccaaactgagattcccggagaattttcatgtcctccgcatctaacgcgttagcgatgtcatctatcaaagacagttcactgtaggactgcactctctcaccgttgggctcggatccagacctaaacaatcgacggggtaaagagttgttcatcatctacaagtcgaacccttttctgcacaaaatagaagtttataaatcagaaacagtatgtacctaagatttcagttaatcggaatatagattggagaaataaagaagttgatggcgatcgagaacgttgaatagcttaaaccgcatatatttgtgaaattacctgtagcccgatggaattgattgcctaactgcgagattgaatctaaagaaacgatatgtatgagaaacaatatagatttgaaatagatattcggagagtttgcagaatctatgggtagagaacggaagacgtttcctctcggaaaaccagcaaatgaagcggcgctaggtttttttttggagctcctgatatttcaaaaaattcgataataaatcgatttctcgaaattaaaatctatatcgtttgcgtccacatacagcattgctcttaccaaggttttcaaaattcaaatttctgcaatcatacgcctatacacctatatgtcccctaaccaagaacacagttatagggggttgcgggtaatttcagatacgtctccgacagacactatagactcatagttagtttctatattattattgatttcatggtcatctagtgcatatacccataaataaattcctaattcaaaatcataaccctagattattattatgcttcataacacttgaattgaaatatattgtattataatttggattgatactttgacattctagaagtagactagaatagtacaccaaatgggtacactataatagtacaccaagtgagaacactagaacagtacaccagtagtacacaagactagtacacaagactagtacactagactagtacaccaaatgcgtacactatgatagtacacaaagtgagaacactagaacagtacaccacttcggtacattagactagtacactagccaagatagaatactaaacaaaagacgtcgtgaccaaccatggagaatcttcgccggagaacttgttcaagtgatttgaaagtctgaattttttcgcagttaatagcctttcctggcctagttttatcaaccttgaaatcccaccaaccattggagtagcaaatccaccggccgaccatggagacgcaggattcatcgtcccctgaaaaaacgaaaacagagtcatcgtctccatcgttatttgttggccgtacactcaatttcataaactgtaaagcttcttatgataactcataccttccatctcgacagattttgacaatgtgtgtatgattttcgaagtgatgagggtttatcttcttttgacaatgacgacttcagagaagatgtcgacgacgagagaagtttatgttcaacgagggtttaggagataagtttatgtttggtttcaatgtcttgaggacaaatgagtttgagttttgtgatattagcccatgacaaatcttgaattttgaatgatattgggctggtttgaatttggtccattagttttcatcaaaacacaagaggggtaaaacggtctttgactatttgctgtattagaggagggctgtattagagaggacagaagaaactaccctatcagcctattttttaaaaaactgtctagttctcaaattatttctctaaaaactgcctagttctcaacttatctcattatacttctaatctagaagggcatatttttagtcataactcatttttcactttttgttgtttacttacacatattaatgcattttaactttatttgtctttgcccatcaataattcaaagattattattctatggtttttattgtccatgcacttgtttttaactatttttagtcagttttaatcatttctttatacatttttagactttgaatttcagtcacaatagtttatatatgatctgatttgtgttgttaaaaatttatttataaattattccggtaaagttttcttacttaaatattgaactacattttgtgtgatatatagttgttaaaaaatcatttttatacattaaattatatttttattttgcctatggcatcaaaaacctttggcacggctctgtgtacgccgaatgatgaatgtgtaagtgacgaggaagaagatgaaggcactgggcttactaatgggctgcgtccgagacagtcctcacgtgtaaggaagcccaataagaagtatttggattaagagagacttcgtctccacattttcaagttctgcaaataagtgtggaagtggtctccctaattgttaggaaccattatcacctctttcccattatttcccaaattgtaggactggtgttcactccattgcattgttgttttgttcttctatttaagaaatgaaaaagccaaaaagaggcaatatcgattgcccaaaaatctgagtctcattgttctttctttcaagctttcttttaccttcggtactaaaattgtgatacgacgaggtcatatctatcaccgaaccaggtaactattaagtggataacgtctctgttgaagcgaatggccatgaaacctttcggtaaaaagtcctggtttaagataatacagattatagttctatcataattttgtcagtttgcactgtaaccatttgctttaaaaatgtgaagatttaaaactggtttgtcttgccttattgattaaaaagcaaaaatcattaataagatcctctctgattcattttatttcttctacattgggatcttcatacgaattgggcattggcaagacacggccgagctgcagaatatctatagccaccggcaatggattgactagtgtcccttaagttccgtgaagttaattaagaaaatagccggctttacccgggacacatatgcatactactcaactatttttttaaaacaaatattttaacaaagatttaatgcgttctaaatcccagggcatttttgtgtgttaacgtcttccgcaaggtacctccgaccagtgaccaaccaccgttctatcgccaactttagatttcgaggggtcaatgtctgtatagatggcttcaagcggaacaggggaaacttacaagttacaacacctcttgaaaaaatttatgtactcgaaatttcgggtttgatcttctccaagaggttcccaaagtcaaatagtgcttggaggaactagtgaagattgactgcaaacataaccgcccacacctcagaaagtcagagataatatttcgtgatacttcatgaatgatggaaacttggggtttaattaggtcccaaatttttcggtatatgtgattaaaagggtttaaaagtcttaggtaaagaaacattaaaagccaattcggttttattgtttgtgttatgttactagagtaccttacactatttcgtgtctttgatcttaattttaaatcgcatggatgatccctagctagaataattgtatcataagcaaaatgatcaagagtggggctcacttgtctaatgcgttttttgcagcatctctaaccctactctattttttctctaaaactctattttagaatacattggcttcaacttctctctatatgttactctaaaatatagtaaatggtaggattgttctagatatatagtaactctattttatttacactgcctctattttagagtgatacattggaaagaaatcatgctctattttagaattacattgagatggtctcaatgattttttttatatcttatgaatgccattatgacttgtgatctgtgtgtggatataagtaaagtctaactatacaggtggggtattaattgatttcttgatgatttttatagttgatatatatgtgattatttttgtctaactagcagctagctatgagaacattaaattaatttattgtcttataaccgagaagagtactatatacttctgttggcccggtctcgttggtttctctgatgcatattgcgtaacgggttttggtgttttcgtggagagttaaaagcggttaagaaagagcttcacatacatgatcagtgattagcaagttttgttgcctcgcaattggttatatgagacattttaagaatgctaagtggttatttgattttcttgttttagttgtatgatattttattgtattgacatggattactactgtgtctctttgtctagtttttgttttgttttttgattgtgtaaccaactacccagttttgcagttaagattatatggattaatttaaggctcactcaaatccggtcaactattctaatcttctttgtagatcaatgattaataatggaatcaattatgattaagtaaaacacaatgaaaccattgaatcaaacgttcttacagaaaaaaatacttcttgtttttcctcagcaaatagtttcctcaaaaaccattaccttccatgggcgcctccttctccctctttaccgacgttggaccgatcccgcctcagtatcaagtgttcatcaacttccgaggcgaaaaacttcgtgatgggttcctagggtttcttgtggatgctcttttaaaagagaatgtcaacgtttttatagatgatcatgagcttagaggcagagatcttgatcatctcttcagtaggatcgaggaatcgagagtcgcattgacaatcttctccaagaacttcaccaactcaagatggtgcttagatgagcttgctaagatcaaagaatgtgtggatcaagaaagtcttacagtgattcctatcttctttaagatgaaaacagacgatgtgaagaaactgaaggggaattttggagacaacttccgggacctgaagttaacgcatcgcggcgagcctgaaacttatcggagatggaaagatgctatactgtatgtttctaagaaaactggcttgtcttcgtcacgatacaggtctggactttgtccctttgcttatgttctttgttggaaacttggaatactctgtttcttgactctgttcttggttagttcaggacataagcttgttcactgacagatcttttgaactctgttatgacagtcgccagaatgatttggtcaacacaatcgtcgaggaggttaagaaagttctaaacgatatcgccgagatcgaacgacaaattgctgaagagaagcgcaaccatttggcggcaagaacagatgaattgattagacttgttgtccggttcctaagtctgtttcttctttttacaatagtttttggtccttatgttttaggccttctcacttttttctcttttcttgtgggtcgtttgataatcaatcgagctgtggaaagtgagtggtgaatggtaacgtttgcgtttctatgagaatacgtaaacgcaaagaatctgagactgagagtttcattttggttacacattgttgcattcgatatttttttctatgaaataatttgatttcgattagtttgaccttgcatcaattattgataaaagtgattacgattaataacactatctcctttataacctaccacctaagacttttggtcaactactagatcaatgagacttccacatgttttatttggttatgatcttgaaatagaagaaaaaatacaaatctaaagataaatgtttctttcaaagtaaccacttttcactcttttgctttatttttcttgtgcaaaaagttcccaaagtctccgcttctctattccaaacagttaaaacccaaagaaacacatagtctcttcgcttgaccaaagctcaaaaaaaggtcagaataattcatatgaagttgttgagtgtccctaaaaacacgagatgtctaatgaagtcatcaagcagctcggtagtcgtggtcgtgcttgaccaaagctcaataatggatccagcacgaccacgactaccgagctgcttgatgacttcattagacatctcgtgtttttagggacactcaacaatttcttatgaattattatgacctttttttgaaaaaaaagtagttaaatctaaatatctaatacaagaatagtttaaggatagtttacatttgttcattgaatatagatgaacaaatatctaaatatttgtcctatatttccaatttttccataaaaaataataaagaagacagttgccaagagttgacttttgaaatgaatttttcctaaaaaagaaataaatgctttgacttttgaaatgaattggtccaaaacaagaaatgaatcttttacttttccagcttcttcttctccatatattcatgaagaaaaattaaagcaagaaagtctcaactctcaaccctcccatggcagaaccaccaccgtaccaacgtcctcctcaagtattcattagtttctatggaaacgaatcgcgcgacaatttcatcaaatatcttgtgtggggattgagagacgagagagtcaacgttttcgtagacagagcagaagcaaataggagagacatacgaaatatttccacaaagatcgaggagtcgaatatcgcggtcgtcatcttctccaagaggtatacagagtcagagatgtgcttgaacgagcttcaaaagatgtacgagcacgtagaacaaagcaaccttaaggtgatacctgtcttctatgatgtgagcataagcggtgtaaagaacctcgaggatgaattcggtaatcatttcgaggaactgagggagaaatacgcaaacgatccactcaagatcttgaagtgggaggattcattgagttcaatagtagagcggaccggcttaacctccgaagaccacgggtaattattcttttgatgaaatttataagtagtgaaaacacaaactgttttgaattttctatgaattttttttttagtcaattcttgttaatttgttcttaggaagactacttatttgagctcatttaacggtttcttcctgacatatgtttgcagaacgggtttaggtcttgtgagggcaatcgtcacggcggttaagagcgagctaatggactctgaaagacaaaatattactaaaggacaagtgtttgttttggcttcagctgcggtttttatctgtagtctcattgtagctcgtttactatgcactgatgtgaaagttaataaagctgttaagtgtttactagggtttccagttttggctggtatcttgcaccagctttactgtctacggacccaaccaaacagatgatgacctcttgattaatcaccaacttgtggtcaaatggcttttgatacgattggagaagcaagtaaagaaaagaaagaagcagaggcagtcaacaccgttgactgtgtgtgttgactgtgtgatgagctgggaaggaaagcaaagtctctgggcatgacaaagggtttgcggttgcaggcttgggagtataaataaggagagatatcgatttagagaatctatgcttattgttgattgttgttgaattgtgtgagtcttgcatgagagacttgagagttgagctagtgatgtgctagtctctctcatatggtgtactgagagctgacctagtgatgtgctagtctctctcgtgtatggtgtgttagtgtgtactggtttggttaaggaatcggaggtatcgatattggaaacttaacagttttgcactgtttggctatagattacatctctgtttagttgtttcactctttatagtttgtcttcaaaaacattatttacccgacccatgacccaggatttagagtatttggatccattgagacaataatgttgtataatattaaagaaagactgaggataggcgcagacttggcatcgagccactgattggtctgaagaattaaagaatcgtttctctgtaatgtattttaaaggacaaagtgagacaacaaagtctctcaccaactatattcactattttttattcagacgaacctagacaccattccaatggatgagcaggtccaagaacctctttctgatcaggtgtttatcaacttccgaggagatgagctgcgcgaaatctttgtcaaccatctagagctgcaattaagaaacgcagggatcaacgtcttcatagacactaaagagcagaaagggagaagactacaatatctcttcacaaggatcaagaagtcaaaaatcgcgcttgctatcttctccaagaggtactgtgagtcaaagtggtgtttggatgagcttgtgacgatgaatgaacagatgaaggaaaagaaactcgtggtgattccaatcttctataacgtaagatcggacgatgtaaaaagagcagccaatcccgatggagaaggcaatcttgatggagagttttcccttccttttaagcaactgaagcaaaaccatgcaggggagcctgagagggtcgagggttgggagcgtgccctgagatctgtgacaaaaagaatagggttttcccggtcaaactcaaagtacaagtaatacttcaaaatacatgtattcttgattatgtttggatctatgcccgactgatctttgattagtagatctctttggtaaggagttttccgcaaatccaccaaggcaccaacccacttgaccgagcgatatatgccgaaacttgaccgctcgagttttcttgatgattcttgtattattgatataaccaaaaaaaagtaaaaacctacttgcatcatcttcttctttctctaactcatgttataatttttttttttgcagacacgataccgattttgttttggatattgttaaggaggttaagaaacagctaaacataccaactgacaacagttggtcagctataggagttgctttcttggctataaccatcaacttgatctttagtttcttcattgcccctaagtatctccctgatcagaagtttttccagactcctgaatggttcataggtactctggcagttgttcttgcgtcgtggttttggtacaaaaataaccagaacaaagcaccacctccttcataagtggcttttgtgcaactttatgctgtttgtttgtgtgttgtttaaatggggtgttaaagatcatttggttgctttgtacatttgtgtgtctctttgttaataattgtgttgtaattgtcagttactattttaaagaacaaacttgtgctttgtattactctgtttctgttctctgtgtaggctctatgactagaaattctcattgccctaaaagtcttttgcttctccattggttagctaataatgtaaatggttgatttcatcacttgtgtggtggtctttgagtattagcaaattaaaagataaaatgtacctctctttgcttgaatctctcttgatatttaacactcccaaagtcaaaacccaccaggaaacgcgcattcttgatcaaacccttgacccggaattagagagtgatgtggtttctcttgttgttcctatataaaaagaaaaggcttagaaaggcgtactgagtcatgtatttgggaaaaaacgaagaacaaagaatggttctagttataatttataaggactaaatgatcacatttctttacctttccagtctttgattcatcattaataatgatcacattttgttgcttagcatgagcttgctaggcatttaaccttactagacaccatggatgatcccggtttggtttgagcataaacaagaacattgagggtcacttccatctctcttgatcatgcgcttctcccgattaatcatcagtttgattagcggtatcttcttagtaacttgtctccagatctcgttcacacttccatttagatgtgtatagtcaaaatatcgcctaacctacacaaaccaagtccataaacttcacaaattggttttcataaaatccaaagaaactttcagaagacaaatgaagaaactcttcttacctctttcataaccttttggtacttcaaaatctttcctggtttcactttcctcagcttcttaaccacaaaccctggtttcaaagcggcatctctcctcaagaatatagagaacttcctgtaatctatgacatcttcaaaaggtagctcaatcccatcgcttacaatcaccgggacacataaactagcaatggcatcaaataatctgcaagcagaagaagtatcaccagctagatgtagacaaaacttagacgtatgcattccttgtttaaccgcacgcatattctctcttgactgtgttccgcgtttgatcacaacatcctcttctttctcaagcagcttgaaaagcaaatctcggactttgcctccctatcaaacacacacacacaaacaacaaagcacatatattgttaataaacccttttccaaattcaagatcacgaacaatggagaccaataaatcttacatctttgcgatatcgatttcccatgaagaacaacaagttggtcctctgcttaactccaagctcgccttcataagcatcaatcctatgagaataaggtatgattacgtctttcacaagcgacccttggtctgctcttaaccggtcaaaatccgtcacaagcaaaaccgcattcttaacccgatccatgacccgtttcaacgcatttggatcaccggcaacaatcacatgatccctcccattgttcctcctccaccattcttgactttctaaccaactcaccaaactctcctgcatctcctcatcactgtacccaaacccgggccgacccgaatccacaatcaagcttaacgaagagaaagcagagacgtaaaacaaatccgcctcagccgggtcaaaaacccttacaatcggagacccgactcgtttaacttcgggtcgggtaagatccgagtaaagataccactcatgcatatgctgatgacccggatatttcaacccggtgacgtcatcagatttttctccgccgtgttgctcgataactccgtaagtaaaattcgtcggcaattcgtacatgtaaaccttcgttttacgaaaatttcccggaaaatggaaactttctcgagaatcaacgagattgcgtcgaattgagccagagtcagagtaaaaacttgggtagaagaaagtattaacgaagacgaacactaagaaaacagagagaacggaaactgtgaccttcttcgaagatgaattattgggttttctgattttggggttcatcttgtaaaatctgtgataagagagtgaattgtcttattatgatgaatgtgttacaacatatatagtacttagtctagggtatacacaactactaatgacaattatatccttaatatatacaactccttatacaccccctcaagatggaggtaattcttgaactccaatcttgctattgagctccgtaaaacgtggacgtggtaagggtttggttaaggcgtcagctagctgatccttagtcgaaacatgagaaactcgcaatgctccggattgaatgtaacctctgacaaagtgataatcaagagccacatgtttcatacgagaatgaaacaccgggttcgcgcatagatatgtggcgccaatgttgtcgcagtaaatgaccgggactgtggtttgtgatatgcccatttccaaaagaagagagcagagccaacgtagttccgaggcggtgtttgcaacagctcgatattctgcctccgtagatgagcgagcgacacttcgttgtttctttgaggaccatgataccggactgccaccaaaataaacgatgtaggcattggttgagagatatgcatccagatcacatccccaatctgcatccgagaaggcatgtattgttagaggcgtatcggagcggaggaagatcccatgcgattttgttcccgcgagataccgaagaatccgttttgcagcttgccaatgttcattggttggacgatgcatgaactgagaaaggcgatttaccgcaaaagctatatctgggcgtgtaaacgcaaggtattggaggctgccaaggacggtgcgatactccgttgcatcatcaagagccgttccggagagaagagagagctttggcgtcggtgacatcggtgtggacacgggctttgtatcaagcatattgtgcttctttagtaagtcggttatatattttcgctgcattaggtgtaagccgcgtgaagttctagtggcctcgatccccaagaaataactgagaggccctagatcctttagagaaaaccgactggcaagtgaggcattgaaggcttgtacaagagcgttttctcctgcaatgattatgtcatcgacatatacaagaacatacatgaaggtattatgccgattatagataaatagagaggcatcggctagagaattgacaaaaccagcttgtaggagaaatcgtcgtagttcttgataccaagcccgaggagcttgtttgaggccgtataaagctttattgaggcggcaaacatgacttggccgatcacgatctataaatcccgggggctgcgaaacatacacctcttcgtttagagttccttgaagaaatgcattgttgatatcgacttgatgaatactccaatttcgcttaaccgccacctctagaacagtacgaatagtggttgactttatcaccggactaaacgtctccgaatagtcaatgccatactgttggttgaagcctcgagctacaagtcgcgccttataccttgcaatagagccatcaacgttatatttaagcgtgaaaatccacttacaagaaataacatgtttagcttcctccggtgacaccaaatcccatgtgtggtttttcatttgagcattgatctcctctgacattgcatttctccaatttggatctttgagagcttgtgctactgtcgtcggtattgtcggtttagaagacgtgagagatgtggtgaggttaaatttggttttaggttttgtgatttgatttttggctcgagtacgcatagggtggtcgttttgtggaggtggtggaagcggtggattttgtggtagtggtgacggagtaggtgagtgttggtgaacggacgtagttggcgaagtaggaggcgtggaattttgggattgatttgtattggttggatttgggcttttgcttagtgggcttgtgttttggtttgtaggtgtagtatgtgggctttgtgaagttgggccagaaacacttacttggcctgtggaggaaatattgtcgtcgttaatggcgtttgacgatgatgaagcggcggtcaatggcacatgctctgaaggtggagaggcaggagacgacggtgagtgcggcggagagtgaaagatcggacacaagggcaaggcagtaggaggagctatatgaggcggtcgttgtagaagcgggataacattggtggtggtcggttgagacattgtctgtgtagagtcggtttccgatgttcgaggagaagcaaacggaaaacttgattcaacaaactggacatgccgagaagtgtagatgcggttggtggctatgtcgagacacaaatatgcgctttgtgtaagcgaatatccaagaaacacacacatcgttgaccgtgcttcaagcttattagtgttgtacggacgtagccatgggtagcacaagcagccaaatactcggagcttaagataattaggactcatttgaaagagtttgacataaggagacgtgccttgtaagacctccgttggcatcctattgattagatacaccgcagttgcaaaagcatacgtccaaaatgtcttgggtaatgacgcatgagtgagaagcgcaagaccggtttctacgatatgacgatgttttcgttcagctaacccattatgttctggtgtatgaggcgggcttgtgagatgagaaatcccatgagcagcaagaaacgggcgaaggccaatgaactcaccgccattgtcagagtataaggttcgtattcgtgactgaaaccggttttccactaaagccttgaaagccacaaacacatctttcacttgcgatttctgcttgagaggatacatccatgtatatcttgtgaagtgatcaacaatgacaaggtaatacttgtagttatcaactgaaatgcatggagacgtccaaacgtcggtgtatagatactcaagaggttgagaagagacaatggtgtttgtgaaaaatggtaatttgtgacttttattgatagaacagtccgaacatggaagctgttttggaatagtgtttgaaagtggtaaatgaaaatgagaaacaacatcttttaaaatgggtaaagcaggatgcccaagccgttgatgccaagaagagaggtcggtttttggtgatggagacgcggtaaggatagtgatggatttctggttaaccggccactcatatagctcattcctagttctgccttggagtaatcgggcccccgtgttgagatccttcacctgaaaatgtgcgggaaagaattccaccgaaacttggttagcattacacagccgataaaccgatataagattcttgctaacattaggaacatataagatatctttaagagcaagagatcgagatggtgtagggagtaaagctgaaccagtgtgtgaaataggtagacccgaaccatccgctatggttacttcttctccaccggtatagggctgatgcattgagagatttgccaaatccgaggtgagatggtgtgtcgcaccactatctagaacccatgggttaaacggaggagcagtggcgatgttagctcgtggttgccatggagccatcggagaaggtgaataaccgttggttggataaccgctaggcactgattgggaaccaccactgccaccatagggctgaaactgagagcatcgtcgcgcactatgaccatgtacaccgcagatttgacaacgaccttgatagcctttgccttgagagccacgattgttggagcgagactgttgtgtttgattctgctgccattggttgttttgattgccacgagaagaagagcgattgttacggccgttgttgttgttgttgtaggaggctgcgttagcggtaaccggagtagaggaatcagggaccatcgcttggagtttaagctcaaagttaatgagcttctcgtgtagctctgtgattgaaggcgaaatatcacgtccttcaatttgatcaatgacacgcctataatcatcggagagaccgccaagtatgtacgcgatttgatcttcatgtggtatggcttcttcaagtagtgcaagttgatcaaaacgagtagtgagcccaagaacgtagtcatcaatggaacgagaacctttcttccattgtttgatttgttcacggatctgttgcttgtggccacggctaggatttgcgtaagtgtcaacgagtttacgccagatctgggcagaggtggtagcctgggacaagagaggttgaaccgcaacagagatggcaccgatgaggccagagtaaatgagtttatcctggcgtttccagagtttgtattctggattgggagaggtaacaccatggacagtgactgtggtgtgaggttcttcgatcgaaccatcaacgtaaccggcgaggtcatacccatccaatagcgcatgaacttgacgacgccacatgagaaagtttgttgatgtcagctttgtgacattggacatgttcacattgaggagagaggtagaatcagcaacaacaacggtttctgaggaggaagacatagccggaaatgatgaagcttgaagagcaagcttgtagagaaagaaggggagcgagaagaagaagaaaggtcgaagagagaggcggctcttttgttttaaaaaaaaaaaaaaaattaggtcttttagaatcactgctctgataccatgtgataagagagtgaattgtcttattatgatgaatgtgttacaacatatatagtacttagtctagggtatacacaactactaatgacaattatatccttaatatatacaactccttataaaatctactaaaagattccttttttgtttcttcttcttcaccaattcttcagttgaagaaagagcttaaagatgtacagtatcagaggaagaagaagagattgagtttcgtgaaagttgtattttcgagtaaaagatattatcgggaatatagaaaagttcatcttcacgagacatcgcgtgttgtgttgtttgtggaaattgacgtttgaagttcaaattaaaattaatcacattaaattagtccaaacatatatctcttgttctgtaataaattctcgttgacgaacgattatagtatgctttaaaacaagttaatgtgtgtttactactttcattttctttttcgttaactgacttttattaatgaaatgttacaagtctaacaaaacagcccaattacaaccaaaaaaaacttaatacaaaaaatcccaaaaaatgtccacaaagatggaaattaagtttttgttagggaaaattaagtccaactattttatacatttacaaattttaagctaaaaattggggaaaatatgcccaaattttcaaaaaagtttcaatttattccaccaaaccttaaaaataatttattaccttagaaattaaaaatattttattgccctaaatccccaaatatattgggcccgatagcagaaatccccttattattaaaagtgaagtacaaattgaaattttgtctaatttgacctcaattttgatttcaattttatattttgttctttgctattcaaaatcattaagggtaatttggtcttaacaatctcttagactttatatgatccgattcaatgtaaaccattcaataaaattaatttccttcaatctaagttattatttgatttaattcaaaaaaaaatcccaattattttttagttatgtttaattcaaaaaattgtatttataagtttaggatatcaaatttattcaaatatttagtataagaaccaaataaaccgattgcccgcggtaaaccgcggcttaagtcctagtgtattttataacaaaggtaccaaactagtaattttatctcatatatagttattaatttacgattctaatgagttatattcagatttattattttcttattttgttatttatcaaattttgttaattttatactaatccgacttaaaaccaaaattttattattatttttattgtgtttattaacttttttctaacatctcaaaactttcattaaactgtacacagataaatacaaagtatatatatttttttggacaaaaaatacaaagtatatatatgcccaaagtggtaggagaagctttgatgaagaatgaaactcctacacccgtgttggatcttttctgaaaacagaaacatatatttgtttgggaaccaattggtttactttagagaagagagtgcggtaaacttcagtatccaataccgaatgacatagaggagtgtgccaatcatgttaaaaactaatttttgtgagaaatagtgtttaataccttaatcattattttatttttaacatcagattattaactcgtaaagagatgttacaaatatcgtttcaaccatataggtggtacagagaaagtttaacacaaagagttaatagattgagccttcttggataaggtatcagcagcggcatttctttcccggttaacatgtgccaatgaagagaacgggagcttcgcaatccagtggcgaatatcgtagagaagggcttttatcttatgatgatcacctctaatattaatcaaatttactaactccccattatcattttcaaaccacacataccgtaatccttgagtccaagtcacttgaagggcatggagaaatccgagagcctccgcttggagaggggagcttgattgttgaagatttgcacatcctgatctgagaaactggccattacttgagtatttgtgaagggtcttccttgagtataaccgctatcaaagttgcattttatctatccaaaaggcggcagaagccattgtctacatcggcctcctgattgggtacgtggcgaatgtagactctccgtgtttttggtttagagactgtgttgctttcaccattgactcccttccttacttcacagttgggactgcgataaccttttcaaacccaaaaaagtaaaaggaattcatagagatttttctatagttttatggacatatttattgtttaaggtttatttttattttttggcccaaacccaaaaaggtaaaagaaagaaaccctcgtaggatgtcacgaacccgatctatttaatgatcatctctctaaataacacttggcgtcgttggcgatatcttcggcgacaatctgcagtcaaaacaatcgacggagacggttagttcatcatttatccttggattacttaggaagttttgatcgactttgaaacatagaaattaggaatcgatgttgttgttgacttgtgttgttcatgatctagggatggaggagttcgattatatcagtgaatttccggattgtttgctaactcagatactcttaaaccttccgaccaaagattctgttaagacaagcgtgttatcgaagagatggagaaatctttggttaaacgttcctggacttcgattacgcacctttgacttcccagtcttcccctatccttatgaagaaggcttcgtaaggtttatggacagatttatggagtttaagtgcaggtcacgcctgcaaaagttcatgataacgtatttcgaacacaatggttatcgagatcgattaatggagttgatcggtacactggttgatcgtggaattcaacatttgtatgtttatatgcatacttgtaacagagttgatttcatacgtcaaaacatttacaagagtaagacattggtctctttgaagctttataacgtagagttaaagaatccagagtttgttgtttctctaccttgtctcaagatcttgaaactggagaatatttttcacggtgaggatggtcctttggtcgtggagaagctcatctcaggatgtcctgttcttgaagatcttgagctgattaggccttttgatgttttgactcgatgagttttgctgcgtctgcgtgtgagctctcagactctgaaaagccttggtttatattttgcgattaatagtacaggtgctacagatttttcagttgagattgataccccaagactcaagtatatgaaatgttatgagagtctatttcatagaattatggtaaagaacctgagttctttgtttactatcgacattaatacgaaggataatgttggctatggcagtcttacggcaccaaagtattcaaggaatagagatatcatcggtgattttttaaccgtgatatcgagtgtaagacatacgatcatctgttactcgacttcaaaggtataaatatatacactctgtgatacgtatataactatttagttctctatgaaacaattctcacatgtatccttttcattcttcttgcagatgctttattcttactccaaacaactgggacctattccccaattccataacttatatcatttgcaggctaggttctcaagctcatcgttacaactattgccaacctttcttgagagctgcccagcctgcccaaatctgaaaaacctaatcatggtaagaatctgcttgaatctgggatttggctaaagaacattgttgaaacatatagtaaaatcagcttgttcctttttctcgcaggagtttccctttgagcctaagaatatcgactttcacaaagtgcctcagtgtttaatatcgactctcgagtatgttcaaattgaagaactgatattgaaggagaaaagtgggattaaactagtggattactttcttgagaattcagcagtcttaaagaaactgactctaagtttcacatatcattctaagaaaaagcaagaccctgagagctacaagaagcttcttacatccacaaagctttctcccacatgtcaaattatcatcgattgacgtgcagccgatgatgctggtgagcacatgagcgtgtttcattgaaccttagcgtatgaattatctgtactcatgaaaaatcgttgttagaataaggtttattaggttatcccatctttttgttgtttgaattctttaacaactaatgatctattgatctttaaagggcaagcctatgtaacttttattgctttggtttcaagctattttgtctcttgaatcggtaaagttactagattgtttcattgaacgaataggttgttggagtatatcagaagaaaataagaatccacatgggcaaacaaaatgtttagagattcagatttttggttcggttttggatttttttttaaaccgaactatgcaaaaactaaatgtattaaataatttttgatcaataatattttacggcatatttttttattggttgaattaaatgtagttaattgatttttttataggaaaaaaaatcaaatgagatttttgtgtgtttttaatctttgtgaaatatgctcaaatattcccaagatattgctccaccatactttatatcgattcatttttgtctttaactgcttaaccctgaaacaagatctctggcgataatctgccgtcagaccaaatcgacggtaagttcttcactcccttccttgaatgtacgtttaccttagtgattaaaccctaggtttgagatataaaattgaaaaacttcatcaatgcattggatttgatttcggattttgatgtcgtcgtcgttgtttatgatttagtgatggggcgcgataggatcagcgaattaccagatggtttgctaaatcatatactcatgtaccttcacatcgaagaatctattaggacaagtgttttatctagcagatggagaaaactctggcttaaggtacctggtcttgacgtgaacgtacatgacttccctgctgatggaaacttatttgagagcttgatggacaagtttcttgaggttaaccgcggacgcctacaaaatttcaagttaaactatgaaagtaatttgtattatctaatggacagatttgtgccgtggatcgctacagtcgttgatcgcggtattcagcatctagatgttacggccactgattgtcctccatggaccattgattttatgcctgccaacatttgcaagagcaagacgttggtgtctttaaagctcgtaaatgtagggcttgacactccaaagtttgttgtttctctaccttgtcttaagatcatgcatcttgaagacattttttatagtcctttgattgcggagaacctcatctcaggctgtcctgttcttgaagatcttaccattgtaaggaatcatgaggattttcttaactttctgcgtgtgatgtctcaaactttgaagaacttccgtttaacatttgattggggaatgggtagtaacgatttttcggtcgagattgatgcaccaggacttaagtacatgagttttagagatagtcaatctgatagaatagttgtaaaaaatttgagttccttggtcaagatagaccttgatactgaatttaatctcaagtttggcctcggcagtcctttggaaccggaggacttgactaagagagatattatccgagattttcttaccggtatttcgagtgtcaaacatatgatcatctctcatcctactctggaggtacgtacctatatatttgaagtctctgatgtattatataacacattgattaaatgtactttaatttttcacatgtatcatattcattatccttgcaggtgctttatcgttattccaaaatcggacagcttccaaaattccataacttatatcatttgcaagctgtgttctccagctcattgttacaactattgcccgccttcctagaaatctgcccaaatctaaaaaacctcatcttggtaagaatgtgtttgaatatgtgatttggcttacaataaagaaccttgttgaagtatagtgtaaactcagcttgtttctttgcaggactattctatttcagcagagccagagcaaatcgactttaccaatctgcctcggtgtttaatttcgacgctggagtacgttgagattaaacaacttactatgagggaggaaagtgggattaaattggtgaaatactttcttgagaattcagcagtcctcaagaaactgactctgagtttcatagattctcccatgaccaaccaagagtcagagatctacatgcagcttcttacatcaacaaaacgatctcgtgggtgtcatgttttgatcttataatgcttaaaggtcaaattattcaacttttcttgctttaatctcagtttctatattcttaagaaagttgcatttatagacaaggtggtttaggtttaacttgggaattaaaacctcaggtggtaatattgtctttttgtatttttgaaactatggaatattcatatggttaaaagccaatttatctatgcattttattgttttggatcatcatcgaaaatcggttctgtgctatatctctaccatggacaagtatgtcgttgaagtagaaaataagaatttacatctataatgggcttttgctcaaggtatcttaatatcttatactatttcaatttttggccgaaattatatattgtacaggtttcaataaggtttcgtaaaccgcaagtaagttgcattggtcctcttttggtttatgtttttttttatagggcccttttggccctaaacccaaaaataagataaaccccctcgtaggatttctcgaacctgatcgattcaagtatttaacgatcatctttctaattatcaaatcaaatcaaatcaaatctgccgtcaaatcaaagcctagtaggatttctccaactccggcaataatctgctgtcaaatcaaatcgacggagacggttatttcttcattcctcatcgcacgattttgatgttgatgttgttgttcaggatctagggatggaggagtgcgattatatcaacgaattgcctgattctttactaactcagatactcttagaccttcggaccaaagattctgttaagacaagcgtgtcgtcgaagagatggagaaatctttggttaaacgttcctggacttgacttattcagccttcaattcacaaatcctcatcatgaagaaggcttgataaagtttatggacagatttatggagtctaactgcaggtcacgcctgcaaaagttcatgataaggtatttcgaatgcaatggttatcgagatcgattcatggagttgatcggtacagtggttgattgtggaattcaacatttgtatgtttatatgcatacttgtaatagagttgatttcatacgtcaaaacatttacaagagcaagacattggtctctttgaagctttataacgtagagttgaagaatccagactttgttgtttctctaccttgtctcaagatcttgaaactgatgaaaatttgttacggtgaggatggccctttggttgtggagaagctcatctcaggatgtcctgttcttgaagatcttgagctgattaagccttttgatattttgactcaggacgttatactgtttctgcgtgtgagctctcagactctgaaaagccttcgtttatattttgcgaccaatgggagtggtacagagttttgagttgagattgatgctccacgactcaagtatatgacattttacgagagtcgatttgataggattatggtaaagaacatgagttccttgtttagtatcgaaattagagccaaatctagttttgagtatggcggtcttttgaaagcagaggatccaagaaagagagctattatctgtgattttttaaccgtgatatctagtgtaaggcatatgatcatttctgggagcattctagaggtatatttaacaatttattgtatttaattctgtatgaaaaaaatatcttcacatgtaatttttgtattttttgttgcaggagctacattcttattccaaactaggatggattccccaattccgtaacttatatcatttgcaggcttcgttcttcggtacatcgttacaactattgccaacctttcttgagagctgcccaaatctgaaaaacctaatcatggtaagaatctgatggatctttaatttggcaaactaagaatattgttggaacatattatgacatctgctttgtaagaatctgcttgaaatatgtgatttagctacagaacattgtttgaatcatattttttcgtaggactatggggcatttaaggaagaaaatatcgactttcacgaagtgcctcagtgtttgatatcgactctcgagtatgttcacattaacaaactgatgatgatggagcaaagtgggattaaactagtaaattactttattgagaattcagcagtcctcaagaaacttactctacgtttctcatttttttcttctatagagagcgagagctacaagaagcttcttacatcaacaaagctttctcccacatgtcaagttatctttgtttgacatgcagatgatgatgcttgttagcacatggtcttgtttcatcttttgttggttttgtttcaatctcaggacagagagttacgcagttaaattatatttttgtcttttttctttaagaattaatattttaatttcaacatataataattgtagtttagatattattaattaataactaaaagaaatttccatttatctagttgtactaaagaaaattttaatagggtttggattcataatttatttgctatataaaagcaattcgttcttcacattaaaaacaaacaaaaaaaacaattcgttattattcattcggagagttcttctgattcctgctttgatcgttacgtttcctgtgattgtttaaaccctagaatttggagaaatctgagcaaaacaccttttgatattgtagttttagaagcttttagggttacgtctcataatgcgaaacgatataatcagcgaacttccagattctttgataactcagattcttttatggcttccaaccaaagattcagttaagacaagtgtttatcgaccagatggagaaatctttggcttgaagttccaggtctagacttaaactccgttgacttccctttcccttacagagatatcatcaagaactacactgaaagatttcttgagtttaacagtgcgtcaggccttcaaaagttcaagatgacaaataatcacggcaactacaatgtgtgttgcgacagattaaaggagtggatcgccgcagcggttgatcgcgggattcaacatttagatttcgagaccaaaaatccttctctctttctcaaagattccatgcctatgaacatttataagagtaagacattggtgtctttaaagcttgtatgcgtagagcttgagaatccaaagtttgttgtttctctaccttgtctcaagatcatgcatctagaaaataattggtacggttatgatgctcctttggttgtggagaaactcatcgcagggtgtcttgttcttgaagatcttaccgtggtaaggattcatgatatggtaataccagatctgcctcttctacatgtgaagtctctgacactgaagatcttacgtttagtgtttgatttggagatgatgactactatacctatttcggtggagattgatgctccaaaactagagtatatgagttttataaataggcactctgatacaatcatggtaaagaatctgagttcattgttcaagttaaatcttgatactgaatttggctacagttccttggaaccgagagatattatccgtgacgttctcactggtatatcgagtgtaagacagatgatcatctctcaacgtactctagaggtaaataatgtttctctgtgattaacaatttagtttttctagctatggaatgattcctcacttaataacattctgtttctcttttgcaggtcatatgtcgttattcaaaactcgggcctattcccaaattccatcacctatctcatttgaaggctgcattctccagcacatcattacaactattgcccgcctttcttgagagctgcccaaacctgaaaaaactcatcttggtaagaatctgtctttgatctttgatttggcaaattaagatcattgttgcatatattgtaagctgattagctctttttattttgcaggacttatatgtttcagcggagccagaggaaatcgatcttaccaatgtgcctcggtgtataacatcgactctggagtgtattgagattaacaaactgattaggaaggaagcaactggggttaaactagttcattattttcttgagaattcaccaatccttaagaaactcaagccgagtttcacagattctcctatgagtactatgaccaatctaccgttagatcatctctataaaatgtatcttacagccagaaagcgttctcgcagatgtcaagttatcatttcttaacatgcatctgatcatgtcaatgagggcatgagcattgtcattgaagatcaatgtagaagaataatcttatgaaagttgtagtcaggcttagcattctgtagttggcacacaaataatagtgtcttcttcagatttggttatctcacttacatgcttaaaggtcagattaagtgacatttctagttttgatctcaatctcagttattggtttgtgattttcgcagactgttacgtagaatctgttgtgattcaatcaagatatgttctatcatttataaaggattgatgaaatgtttttgttgtttctaagacatcttattttattaattagaatgttgtcaatacataatttagtttgggcaatcgggcagagtttggccttgtttgcggcatacacattttccgtttacgcaacacgcccgacgataatcagaacatgccaaccctccacactcaaggtatgtgtcacatatccctccatgattcacatcgattctttttatattcccttcttctaaatttatccttgacggattaggaagacatttgctgtcgttacattctttgtcttccttagcctcgattagtttactctgatctgtagtttatttcaagaaaaacaatgatttcaaattagtattctctatgttttcaaaaattgatttaagtagcgtatacgaatataatggaaacatagattatgcaaaataaaaaaaaagcttgagtttaaccactacaccattttatgaattcccaaatcaaaattcaaatttacttacaagagaaggacagtaacaagagggagagaagaaaagccgtcttaaaataaaggttggtcatagctaacaattgtctgtatttgaatgttggatgattgttgtgtaaagagaattttatagccttgcgttcatttatatatgggatgaaagaacaggatttgttttttctatacaactggaactttaaattttagtactataattctacatagatcggataggaacaaactttttttctttcttcagttatgactaattcaatcaagatatgaaagtctatttccccaaaaacaattatggtaataaatccacaatttaatttgggatttgtcctttctactacttttgaaaatatcatttccaaatctatattttgattccatatagtgagatggaaaaacagttttcatattttactttctatgaaaatttaactttatagattagattttatcagttatgaacctcattcgaatccaagatatgaacgtctatttcccaaaaaaataattgtttgggatatttgcgctttctactatttttgaaaagattatctccaaatctacgacatttcataatttcataattcctttccatttctatgaaagtgttgtaccacaagaaatttttttggatgaaactattgaggtatattcttgagaattatgtagtgctcaagaaactcattttaagtttatattctataaccaaacaaacctttgatacatccagggatctttttacattccgtttaacatttaattagataataattaataggtagtacagatttatcgagatagatgctccgacttaagtacatgagtttaagagatagtaaatccgatagggtcgttgtaaaggatgtgagttcattggtcaagatagaccttgctgctggaattaatttatatcaagtttggccttgacatatacagtcctttggaatctgaggaattgaccaagagaaacattattcgagaatattttaatggtatttcaagtataaaatatacatatgatcatctcgcatcctaccctggagaaatctatatatttgaagtctcttatgcattatatacaacaagtaaattcggaccggttagaaaattccataacttatatcacttttaggctgcgttctcctgctcatcattacaactattgcatgaaattgttttagataatttggtgtttgagaaaattgattttttgcgtggacctacatggcaaatcatcctccactgggaaccactaaaccattaccattagaaatttagaatgagattccaatttctgacccaaagaagaagaataaattattgaactattgacatgaagtttcttataagcatatggtttgaatgtcattctcttctttccaatagtttaattattattttgtgcaaattcatagggataaaaagccaaaaaccaataggctttggctcatggttgcttataatgtttcaatttttggccgacattattattgtagagatttgcaactttgcataaactttagaacttttagtaataaaatctctcaacaaagatgaatcctaaaaaaaaacctcaactatatatttaattagaaaaccctcaacttaaaatctgttaaataaatcttgtccatctacattgtcgtgaaaattggacgaactacagttaaattgacattaaaaccgacatatatacatttaacacatgaatagtcaacaaaaacagcaaaatgttcttctcttcgattataaattctcaaactttagctctaaagttttcaaagtgataaatctaaattgatgaaccctaatttattataatgggattctctaaagtttatgtggtgttaaagtcgattatgagagattctgaaaaatattacgttataatttgaactgtagaccgtccaatttaacgatactatagataaagggaaattttcattagcatatttgaagttgaaggattaattactaaatatgaattgaggggttttcttacaatatatctttagttgagggggtttattactaaaaaccctacgctttatgttttaacttgttttggtcctcctcctttaggcccaactaaatgaaaaaaaacctaatccatcaattgtcacttggctatatatctccggcgataatctgtcgactgtggacaaatcaaacctacgaaattacgtaagaaattttaatcgaatttgggataaaaattgagaagctaatagagcggattatgtggtgagctacagaacaagaagtttcttccatatatttcggttttcttagtttgttgtgatgtagatatgatctccgtagatattctaagatagtgtttgtaatctatttaaacgcttgtaatttcagttctgaacatatcgaaaatacatttctcttccattatgatctctgaatctatagacagtagccctaggaatcgattttgatgttgttgttgttgttcatgctctagggatggatcgcgattatatcagcgaattgccggattctttactaactcagatactcttagagcttcgaaccaaagattctgttaagacaagcgtgttatcgaagagatggagaaatctttggttaaacgttcctggactcgaattattcacccttcaattcacatatcctgatcgcgaagaaatctttgtaaggtttatggacagatttatggagtttaagtgcaggtcacgcctgaaaaagttcatgataacgtatgtcgattgtaaaggttatcgagatcgattaatggagttgatcggtacactggttgatcatggacttcagcatttgtatgtttttatgcatacttttgacagagttgatttcaaacgtcaaaacatttacaagagcaagacattggtctctttgaagcttcataacgtagagttaaagaattcagactttgttgtttctctaccttgtctcaagatcttgaaactggagaatatttgtcacggtgaggatggtcctttggttgtggagaagctcatctcaggatgttctgttcttgaagatcttgagctgattaggccttttgatattaggacacataaagttcttctgcttctgcgtgtgagctctcagactctgaaaagctttaccttacattttgcgatctataaggatcgtacagatttttcagttgagattgatgctccaagactcaagtatatgactgttgaacagagtcaatctgatagcattgtggtaaagaacctgagttccttgttcagcatcgacattggtactaaatttaatcctttgagacatgaggatctaaggatgcgtaatgttttctacgattttttaaccgggatatctagtgtaaaacatatgatcatctgtttgtggagtctccaggtatgtgtttatataacaatttaatgtattaattctcaatgaaacatatctgatttgcatttattcttcttgcagaggttttctccttattcaaaacccggactgattcccaaattccagaacttgtatcatttaaaagcacagatgtggagctcatcaacacacttattggaagcgtttcttgagagctgcccaaatctgaaaaacctcatcttggtaagaagaatctgtgattttggcaaaagaacattgttgaaacatatcgtaaaaactcagcttgttcatttcgcaggaatataatgttgaattggatcgagagcaagtggactttaccaacgtgcctcaatgtttaatatcgacgctggagtatgttgagattaaagaaccgaatgagaaaagtacgattaaactagtgaactactttcttgagaattcagcagtcctcaagaaacttactctacgtttctcatattcatcttctatctacctaaagagctacaagaagcttcttacatcaacaaagctttctcccacatgtcaagttatctttggttgttgaacattgtttcagtgacgttattcctgtagtttggctttttgttgctttgatttcaatttcaggacagagtttcagtttaattatagttttctcttttttttttaataaaaatttttattttcaacataataattgtagtttatatacattttaattaataattgcatttctctggttgtataaaattctaattgggttttggattcataatttatttgctattaaaagcttacgttactgttggtttaatgagttcttcagaatcctaccttgatcgttacgtttctgtgtaatttttggcagaaatttattaaaagctttccttactattcgtttggtgagttctacagatatgctattaagaacttcactgaaagatttcttgagtttaacagttcaagatgaagaatgatcatcacagccgttgatagcgggattcaacatctagatgttgagacacaaaatcctagtcctaggtatgttatagatggaatacctatgaacatttctaagagcaggacattggtgtctttaaagcttctataagaagggatgtagaatccggagttttgtgtttctctaccttgtctcaagatgaagcatcttgaaaatataattttatacggaaaccatggtcttgtgaagaatctcatctcagggtgtcctgttcttgaagttatcatttctaaacatgtatctgatgtcagtgagagcatgaacattatcattatggtttacgatgttaaaaatcttatggtgttaattataatgtcttgtacagagttggattgtctcatatgcttgaaaagtcgtattgatctctgtttcttggagtagtttaatcatctttgcattcaaagtggtttcgaaaagtcccatggtcaattgtttaatatgttggtatggttgacttcaaggttctctgttcgaaacatttgtccaaagaaacaacattttgttttttagaaataacatttgtcaaaagacttttcttctaatccaagaagcttctttggctcgccaatattgactcaaatattttcacctttatcaattacgtaccatctaagaaagcagttgaagactcgctcgctacatcatcctggtcaatttctgatcgaaatcgtatcttgcattcatttttgtgttaggtgcatatttactttattcattcttgatcacttaagtttttgtgtgtgtttctggttaggttgtaccctgcagatttaattgggtaatctatagtttcacaatgatgttttaatattataagctttgtgttttttttttactctccagtgtacatcaacaatggctacaccaatggaaaacgaaaatccgaattttgctagaaccgcaacatcgttccgaaactttgtttcaaaagatcctgactctcagtttccagcagaatcaggaagataccatctttatatctcttatgcttgtccatgggcttctagatgtcttgcaatcttgaaactcaaaggacttgacaaagctataagcttttcggttagtaaagacgacacatttagtttcgatttttacagaacataatctgatcagtttgttcattagtctgttcaaccactttggagaaataccaaagaaaacgacgagcatatgggatgggtttttccagattcagatacagaggttcttggagctgaacgtgatcatatcaatggtgcgaaaagcgtaagagaactttatgatatcgctagctccaactacacgggcaaatatacggttcctgtaagttcttttaatcatggtgtggtctaatcttaagtcttattttgttacgtcactaaacattttcggatatttagagatattgttggtttctttgtttttggtaggttctttgggataagaagcttaagactatagttaacaatgagagctctgagatactccgaatgttcaacaccgagttcaatcatgttgcagaaaacccttctctcgatctttatccacccaacctccgagccataatcgatgagactaacgaatggattcacgatgggataaacaacggtgtttataaatgtgggtttgctacaaatcaagaaacttatgatgtggtaacgtaactttgcgattttcttatcaatattgtaattaaaatttgattccaacattttaattatttgtctctctttgcaggaagtgaaacgattgtatgaagcattggaccgatgcgaagacatactcagaaaacaacggtttctttgtggaaacactctgactgaatcagatatccgattattcgtcactgtcataagatttgacgaggtgattttacctcgaattgttctgttttcggattttcatatatacgttttgttcaatttaccatatatcttttgagaattttgctttgcaggcttacgcggtgatcttcaaatgcgataaaagactcgtaagagagtattatcatctctttaactacacgaaagatatctaccagatcgcgggaatgagcagtacagtaaagatggatcatatcaagcaaaactactatggaagctttccttctataaaccctcttgagatcatcgctcatggaccaaacattgattactctttgcctcatgatcgacacagattctctttagaaagtgactataccagacttgagttatttgagagtgcaagttttgtttgtgaattgaaattaattgaaatttttgattctctttaaaaagtgactattaattaaaatttttggtagttttttttaagtgaaacactaatgcttattttgttttccttttttacattcttaataataagttttgtttcgtccaacaaaaaaaaaaaaaaccatttacaaaataaagttacagaaaacacaaacgcttcgtcggagctcagcttcccgcttcagaatcggagttgaaatcgaaaattttgaaagtttttagaatctcacttccataacgcttctgaaaaaaacactttgaaaacttattggaagctgtagatttcattttggaagtttacgcttccatttaaattttgattattcacaaataaataagaatcacataattatttttgatagtttttgttttacaaaaaaaaatatgattttgcaatttagaatattttgcatactagcctttctattaaaggaaatcgctaaccgaaatcgaaagtcaggaaaaataaaaactaataaaccaaaactctctaccggagaaagagggtttgaaactttctatttgtcgtcgtgaggctgtcgaataataaagttgactttatgcaaatttgaactaatgactttgggagcgaagactttttacaaaagaatgtaaagagcgattaaaagcttaagatccacgaaaaatccacttcccatggcggttccctccatctacagtgaagaaatcccaccgcagcaccaagtcttcatcaacttcagaggagaggagctacgaaaaagcttcctcgggtttctgttgaaggccatgagagacgcgaagatcaacgtctttacagatgagatcgaagtcagaggtagagatatacagaatcttttgagcaggattgaggaatcgagagtcgccattgcgatcttatcgaagagatacactgaatcgagttggtgtttggatgaattagtgaagatgaaggaacggattgaccaagacgagctcgttgtcattccaatcttctacagattggatgccacaaactgtaaaagactcgagggacctttcggcgataattttcggaatttggagagagactatcgaagcgagcctgaaaggatcaagaaatggaaagaagctttgatctctattccccaaaagattggcttaacttcggcaggacacaggtattatattacaattcatttcgaattttgcagttagggttccgagtcattgtgtatagcttgaacgagaagaaagagatatcgagacatttattaaacattttagtacatttctcattggtaatggtagggatgagtctgaattggttgactcaatcgttaaggaggtgaagaaagtgctaatcgatgtttcaagaaaggacagaaacaattctcaaaattccactaacataaaaggttgtcttttagattataattgtgtgttatattgcttgtgaagtatgatttgagttttgaaaagttgtactaatagttttgtttttgtgtgtgtttcaggtcaatcttttgagcctctaatggcagagctagaccgactaccaacacgtcgcccacaagtgtttgtcaatttctgcaatgacgagcttggcgacaactttattaaacatctcgtgtgggctttgagagactcagggatcaatgtcttcaaagacagcttcaagcttataggaagtggacaaaaacaagaagtgttcatgagtatagagaactcgaatatcgcgcttgccatcttctcaaagaggtattctgagtcatatcggtgtttgaacgagcttgtgaagatggaagagcttgccaaggaaggaaaactcgtggtcattccagtcttctacagtgtgaaaacaaacgaagtgagaagacttgagggagagtttggaatacattttagaaacacaaaagagagatttgctatggaaccaatgatggttgaaagttgggaaaaatccttgaagtcatctactgttacagggaggattggcttgagcttggaagcacacatgtaatagaatatttaatagaactcttgttttgtagtaagatcgactttgtggtaaggtcgtctaatcagtttctttcactcattttgcaggaacgaatttgctcttgtcggtgccattgttaaagaggttacaagattactaccaaactctccaaagaagaagaagaagaagaaaattaggtattggagaagttttcttgagggctttgactgctacatttatctttgctgtcttcatataccctatgcctatgcctgatgtgaactttttgaaaattggtaagttgttattaggctttccgtttttggttgttgtcttgcacaagattttatgttaatattagaaacaaaatgatgttttctcgcttctggcttgtggacgctaacactatatgtaatgttgtgacgcacatcagctatgtctatttgaatgttatctctacggttattttgtgatgtacatagtaaaccaatccatgtccacaccgcactgtgttgagagaagatggtgattatcagaatagaattactatcagctcaaatttatcatcttcaaagacgagaaatttgcatccaaggaagagtataatgtgtaaaggaaaaggagaaccgatacatgctacgataaaccaaaggatgcaattcaaacaaaaaagccaaggttccctaaatgagaagacctgcctttctcgcaatcttggacctcatttcttctcactagcattctcaagctccttctttaactgacgcgagaagtcgtcactgacatcatcatcatcccagtcatcttcccactgcaggctaacttccttcacttcctctttctccaaccaatctgccaaacataacaataaaaatatccatctttatcaattctttcaataaagctatttgttaaatctcaagactgaactaacattgcaaagcaaaatctgttaaaatcagaaactgatcctagcttaagttgaattgtacaactctcccccaagctactcaatgcccccaaataattcctaaatccaccataacctttaggccctttagctcatgaagccttgccgattaataatgcaaacataatcaccagtagtttgctcataaaactgcactattatccatcaagtttatgagaccgtagcttcatcatcataaacatatatcaaacagatccgttttcgcatcagaactacccaacttcatacaatagagactatcttagtttgtataagacagtgcagaatcaaaatttgtatttataccaaaacctaatcaatcaccaaatcagttgctaatgaaatttgctcttatctccattaattttataaccgatgatgaatcaatttcgaaaatcaaagaagcaattagtataaaacaaaaaaatcaccttcgttgatttcaaattcctcgaactcatcgtcgtcctcgaatagatccaccttcaccacttcgacagctgccttgggttctgccgccatagttacagatgtttaagcaaatcaaccagatcgagaaaaaaacctaagaagaagatcaccaaactcgattaattcctccaagttaaacccaaccagagctctttaaacgaacctttttttcgttttgggtctaacttgaagaaggggaaaattaccaatttccaataaccgacccgaatcttatatgattcataccgaatccgacccgaatcttatatgattcataccgaatccgacccaatattaaaaatatccgattgaggtttaaaagaagctgttttagaccggtccaatagtcgcattcgtcttgaccaaatccatgacatacaaaccggtccaaaagttgtcacgctttccccacagaacccagctgagtcaactcgttagtctgagttaactcgctaggcgtgacagagcagtgaagacaaagcaaagtcctttttcggattccttctctttcactataagatgacatccctcattaccatttttccttaaagctcactttttcttctttaaccttatcgccacaaaacagcgacattcgacgccaaatacataacatcgtcgtcaacaggttttgtctcttatcttcttctctgcatgaatcatgttcttgttagacattttctgagttctgggtttgattttggcccaatgatccataaatgttgaaaatcatatttgaaggctatgaattatgaacattttattttaacctttttctagctctaatgagataattaagtaaaaccctactcgaaatttctgaactttttgatgctttgattcgtttcctgtgatcctttacctagagaaaattgagattgattatgtgacaagtgaccatctataagaaatctctcaaagttttcaactttactcactctattgaggtgaaaaagaaaaattgtgcattctgaaatttttattcttttcgtttgtcatgtgaattttcgtgtttgattttttattagtagcaaaatggctaggtctggggttgatgagacatcagaatctggagcttttgtaagaacagcatcaacattccgcaactttgtttcacaagatcctgattctcagtttccagctgaatcaggaagataccatctttacatatcttatgcttgtccatgggcttgtagatgtctttcttacttaaagatcaaaggacttgatgaagcaatcaccttctcggttagtacaaattcattgctcatatcgaattagaagactttgttaacctgaagcatttctgttttatttgatttgattagtcggttcatgccatttggggaagaaccaaggaaactgatgatcatagaggatgggttttcccggattcggataccgagctccctggagctgagcctgactatcttaatggtgccaaaagtgtgagagaactctacgagattgctagcccaaactatgaagggaagtacactgttcctgtaagttttgatctctttggtgaactctttaatctttctttgtcctgtttcttgaatgtttgttttgttattatgttaggttctttgggataagaagcttaagactgttgttaacaatgagagttcagagataatccggatgttcaacactgagttcaatggtattgcgaaaaccccgtcacttgacctttatccttctcatctcagagacgtaatcaacgagactaacggatgggttttcaacggaataaacaacggtgtttataaatgtgggtttgcaaggaaacaagaaccctataatgaggtatatatccctcaatgtcttaaacatttgaacagggattcaaaaattgatcccttttctctccaggcagtgaaccagttatatgaagcagtagatagatgtgaggaagtactcggaaaacaacgatacatctgcggaaacactttcactgaagcagatatccgattattcgtcactctcataagatttgatgaggtatatgagtcaacttgtcttctttgtttccaaatagaaaatccatcaggttcttgacatcatctttttctgcgttccaggtttatgcagttcacttcaaatgcaacaagagactcttacgggagtacccgaatatcttcaactacataaaagacatttaccaaatacacggcatgagtagcaccgtaaacatggaacacattaagcaacattactacggaagccaccctacgataaacccattcgggatcatccctcacggccccaatatcgactactcttcgcctcatgatcgcgacagattctcctcgtgaaagaaacaaacatcaaatgtcaatacttgtgtgtgtgtgtgaaaacgtttcaagtcatgttatgttctacattttgagaagtgaatgtatgtttggagattaacctagtttttgaaacactttgacacagatcattctcttttatttaagcttgttgatatgcttattgtgttgaaagatgataaagagagagagggagagagagtgtgagcatgaaagcttttaaatgacgtttgagtatgatcacaccattttgcaaataagattaataaaaccatttctttttgtatgatcacaccattaataaaaccatttctttctaatgtttttttttttaatctatttcttggttttctactatagataaaacggcttctttataaagtaaatttacaatgatttgcctttttcgtccaaaaaaaaagagggatacatttaaaatggtttatgtttgtctatgtattttagttgattttttattcggtaaaagaaaaataatttacaattatatatggattttatctattattaagaaaaatcgttaaaataataatttttactcgtgtgcattttaaattttatcaatattctcaaaattccctaaaagtatatttttgacctatatatgtagacatcattgaacaattatgtattgtacattcaaaagattgtgcaggaatatacactgtaataagatccttattcggctctatatattttaaaaagttatttatcccttattttttcacaattatttatatattacttaaactatgtaaatatctaatgaactaaataatagggaatcttgcaaaatctgtcatatttcactctatttctttcaatttctgtcatattctaaaacttttttcaaaatctgctacattttggtccacgtggaattcagtggacgaaattacccttaaggtgggtcagcgctctgacgaagatggtgacataacaacttttggccgatgtgatgatataagacgaaaaatcatggtggaagcataaaggattaggggacagaatagtggagaacagctggcttctactgttgttattgggtatttaaaaatgacttgtttaaacaaattggttatccaaaattctgcgggggacaacgtaatatataatacattaggagacatgattacctgatatcgggggacaacgtaatatataatgcattaggagacatgattacctgttagcagagaacaattggagcaagacttttgttttagtctccagatcttgtccccgaatagaaattctctgttgcatctacgttttgtcctcgatttcatcatcttgctctattattatgaatcatacatcttatatgcaattgttctcatttaagaattttgaattttatttagattttcgccatctattttggtccacagattagttgagcgttattgttttcacagagatgctgaaaccatctatttttcgccatcttatatgataattttgaaagatgataaaatcggggacaagatctagatacaacagataatttatgatgaataaaattgggaaacaaatttaattgaaagttatatatagagaatatgtgcaggttgtcaggggaagtgatagaaagacaaaagcttttcgttttgtctttggaaaaataatggtgtatggtcaaaatgcacggatttcgaggaaatagagataaaatatagaagaaatggtgaggataaaattgacatttcccatctaaatgtggcatgagttgtaagacctagaaaaataatgacacattatataaggattttaaaaaatatggcataggatataatttttcctaaataatataccaacaaacaataatgttattaaaactaaataaaaagtaaaaatacatttggcaaacaaaagcgtgtcgctgtttcctccgattatggttttgagaaaaaaagaaagaaaaaacaaagtcttcgtcgtccactctcaagctcaacaaagttcttgggtcctcctctctattattaccacttcttcaccaatccttttcgaagagttttgtattcacgacatgagaaagatcccaacactactgatcggttagtacttctttcttctctgtctaataagcccccaaatttcccaagatttttcttttgattttgattagtaactccattgtttcactcaatttctttagctcttttcatgtttccttttctgggtttatcacaattttcaatcttgctcattattttccaataaagctctaacctttaagatacataagctaatttgtgttcttgagactttggtattagtccctctggtttgatgattattttcttaatgttgcttgcttcagtctgtttatatttagattaagtttatttgatgagctctcttcttgtttatgtactttcaaattttagtctttttaaaactaatgtacatgattcagttttagtataggttggtgattgtgtatcttcattagtagaaggttaaagatggaaggaaagagattggatcttagatttcatcactctacatcatcacaatctgtggaatctgctgcattggatttggataaaaatgtttacaatcatattaaattggcgtcttcatcgccgcttcaaccgtttccatcaggcgctcagcatcctgaaactagtgctgctgctgcttacttctcttggcctacttcaagtagattgaatgattcagcggaagacagagcaaactattttgcaaatcttcaaaaaggtgttttgcctgaaagttttgatggtttacctactgggaagaaagctactacattgcttgagttgatgatgattagagcttttcatagtaagaatttaaggaggtttagtctcggtacggctattggatttcggattcgacgaggtgttttgacaaatatagcggctattcttgtttttgttgctcggaaagttcacaagcaatggcttaatcctcttcagtgtttacctacagccttggaggtgagatatctcttgcctatgatactttacttataatcgtttgcttgtgcttgaaagagtatattggaacttttagtaatgtaggtactacagcatggaacctattatagaaaactttactaatgccgcctatttatgttgccttctggaatcctttttttacttcatagtatcttgctttgatagggtcctggaggagtttggtgtgatgtagatgttgttgagtttcaatattatggtgcacctgcgcaaacacctaaagagcaggtgtatacagagcttgttgatgatctgagaggcagtggttcgtccataggatctggttcacaggtaatttgtgtactaaacttgcatatacgcttgtattatcgacaatattacaataatcatctggccatgcctctcatcttgtaggtggctagccaagagacatatggaaccttaggtgcaattgtaaagagtaaaactggtatcagacaggttggtttcctaacaaaccggcatgttgcagttgatttagactacccaagccagaagatgtttcatccattgccacctagcctcggacccggagtctacttaggtgcagtggaaagagcaacttcattcattaccgatgacctttggtatggcattttcgctggaactaacccaggtagcctagtaacaatgtatagagttaactctgatgtataatggcgtagcacgattttaattatcggtttctctctttctgcagaaacatttgttcgagctgatggagccttcattccatttgccgaggacttcaatacgaacaatgtaaccacaactgtcaaagggattggtgagattggtgatatccatgctactgatctacagtctccagttaacagtctaataggaagaaaagttgtcaaagttggaagaagctcgggtttgaccactgggaccataatggcttacgcgttggaatacaatgacgagaaaggaatttgtttcctaaccgattttcttgttgttggtgaaaaccagcagacttttgatcttgagggtgatagtggaagccttattctgttggctgcgggcgatgagaagaacgagaaaccgcgacctgttggaatcatatggggaggaacagcaaacaggggacggttgaagctaaaagtgggggaacaacctgagaattggacaagtggagttgatcttggcagagttcttaatcttcttgagcttgatctcattacttccaatgagggtcttcaaggtctgtgttattacttagagtctttttgcagtacttttagtatacactgtttcctacaaagtctcttttgctgagtgcagctgcggtgctggaacagagaaacggtattatgtgtgctgcggttgattccaccgtcgtggaatcatctcctggtgtgtgcaatatttccaggtgtaaaacgggtgagaactttgagcctattaacttgaatgtccagcaagttcttatagaagacgacaactcaaacattcacccagagttccaaatagaagacgtgttagaatcagtggctgtgatcgaagaacaccagttcattccaagttcaagcaacaacggatccgcacttcatcagaaacctaatggaccagagaatctcgaatccaagaacctgtcttcgcttaagactagtagctcaggtgatgagataggcttttctttgcagttaggtgagtcagatacaaagaaaagaaagcgaactgattcaccagatggttctcaagaagatgaagagtgagggttatgctcatgagacttcataacataccagaggagtcaatagtaacatcactattatttttccactgcattttttctccagaggaaagatattcagaatagcatatttgtaatggctaatgccaagggatagtcaaacgttatgagcatatatgtgttggtgattttatgaacacctataattttgttgtaccttaagaacatctgggagcataagcaattgcaatgaaacctcccagaaggaattgttataagtgtaagtagatacagccctatggattaattggattacaaaaacgctcacaagacgaagaatgcctagtcgctagtccgtagatacagttggccagccttggtcagcttgaaactttacaaattcagcgagaagcttgatttcttcgtcctgcaaccgcggtccaaaggtacattgtcctctcggtgtgcatttctcaccaaatccctgaagtaaatcatcagacatacttcagatcatctagctaagtggaagacaattctcagttttatacaaggaatttcttcaaggagatctcaccggcattcttccctttccaaagtaggtaacacgatatatttcttcctcagtatcaactccatttctgtagaaaagtaaataaaccattgcaaatcttaagagataacgatctgtgtaaccgatttttcctgtcagaatattatagatgcacacagcacacagttctttgagtgtccagcataagttatattacctttcgaggtcttttgtgaaaagcgttgcaccctggaaaagtggaaagatatgagctaattgactcgaaggtaatgaaagatgacatgagaagagaatcaagaatggtttttagctcacaggttgaataatgtttccacctgtatcatgacacccgatacaagctctattaaacaatgtagctcctctctgtatatccaaagtctgcccaagagattctacaccacaatacccataaaagcaagaaactttcataaacacattcaaaacatacttcagttccaatagcaattcaacgatacattgattacatcgttgtttccagttacagaatccagattccatatcagtagttccaacaagaaaacattcttgaataaaacaacaaattcagacagaaatttctcaaaatcctcttcatttttcacaagcaatgggtgagacaagtgttctacaaaaatactctgttaacttataactatacgaattccttaaagtgaagagctattctgtaatatttcaatctaagtgcaaatactctaaaggtagaagcttttggtcggaggaaacaagggtttacctggagggaaacagatgggtgaaacagcaagtaaaaccgccgtgagtggcggagctaacttctttaacagaaagtccaaatctttgttgtggtttagagaaattgggtttttcagttcttttcctcttccattgacctttcgaacaatagatacaaactcacgttcatgtatgaaaccattatcttaacaaaatgtttacatagagagaaagaaatagagaacctgttgggaggaacaaaaaaggttggaggtgaaagaagaggcaccagagagaacaagtctcatctcaaagaatttttttttttttccttttaactgtttgatattatccattgcactctctgtttgatatattatctttaaagtaataaattgtgtcccacaggtttggatgtccgaacaaatgttaaaaaatcaaacagattattattaacattgcataatagtaactatctattcagaattttactaggtaaattgacctccctatcatcactagagttcttcccttgggcttccatgttgcctccgctgcttctgcgagagagaaacatagtctgagaattttcctcaagcttgtccatatcagcgaaggtatcctctggaaataattcgggtatgaaagtatcttcttcaacgtcaacatcgaactccatattgtcccattgctccatgtcctcctccttaaccaccatggccgcataaggaggagaagcaggggaggaaggcaaatgggatttatccggtccttctttgtcttgggagactgtcgatgaggcagaagtagttacatctgagcatttggaggaagaggaacgagtggagccggcaagagtattgcgtagagtggggaatggatggttatgctcagagatgtaagtaattactgaaacatttggatcagtgcggctacgttcgacttgtttcctagcaaaacaacctttcgagctggcacatctatagtaactcctgagaagtaaaaagcaaagacttaattaatccttaagtaaacatcaaagatttgtgtatatatatagtgtaccttggataaggagaacttttgatgggtttttgaccatactttcgccaaacccataggtcactggaccggctgcctcgatccactacgcaaaccactctcttttccttgttgttcctgcatccaccgtcaataaaaactcattttaaacaatctacaaaatgtatgatatactacaaaaagtaatctaaaaactaagcaacctactttcggcgactctttgaacgagtgatctcgatttcctttgttgcgatcatggaactctgaatattgtcgactaatttgtcagtcttctttgattctgtatggaggatttctttacccatttgtcgtagcaaatagtgcatcactatttccccattggaagatacacgtatgagagacctataggctaagaccttgagcccataactaacgtccatgtcaataatgttagcaataagtggtgctaccaaaccaacatcctcgtcattgaacaaacccgctatgtaaagaaacaaagctttatatatctcctgtaaaccagcatatctgactctcaatacttcttcatcttcattaccagaaacctccatcggatccaaggacaaaactggtgatatattctcgatacttgtattgcagtttacagcagttattaaacggactccacatcttgtcactgtgcaactatcatttagaggctttctctgtttattgacaggaaagaactcaaaaacaactaaatcagcccagatatcggggtcatttccttcatcggtatctggacgcatgttgacatcaaagaagacaaacgtatgatccctttcaacagctttccctaaagcccaacaatgcaaatttatttctctcctatgagagtggccttccttgtttttccatttgcaaacacaactaatgccaaaatcagtatcatcacagtaaccctcggaaaatgcgacttgcaccagcatagcaaagcccacaagtgtgttcctccaagaaggatctagtcgtgtcattgaagaagatcctggttgcagatcaagtttggaattttgattcgcatgtgagggcgcacagaagctgaaagccaaagttttgttgagttcctgttgcaataatacatgataagtcagatatgatatatgaaggaccgggctagatgtacatagcaggatgtagtattacctgctgactgtcacgactcgaacgctgcacagtcttttgagaaaagcctgtgacatgacgctctcttggtatgtgttttgcaatcacattagccatcgcctgcactaaaaaatcgttgaccacttgtggagatagatcgaaacaattactaaatgtgtaatgcacaggaagcttcttgaagtccaaacgaattgatttgagagagacacaaccatgggcattaaagaattctagactttgaggaagttgtggcacttgtcttactgcagtgccaacaagatataactctttcaggttccgtgggaaaccctggatagtctcgagctctgagcaaccagaaagatcaagggctttgagaagttctaaattaaccatgtttggcagacttcgcaaacgagaacaatcattcagctccaagcaactaagctt
